United States Patent Application Publication US 2025/0122569 A1 - sequence listing, part 5

SEQ ID NO: 647 - DNA, 7755 bp, unidentified
  source 1..7755: mol_type = unassigned DNA
  misc_difference 283: note = a, c, g, or t
  misc_difference 284: note = a, c, g, or t
  misc_difference 285: note = a, c, g, or t
  misc_difference 286: note = a, c, g, or t
  misc_difference 287: note = a, c, g, or t
  misc_difference 288: note = a, c, g, or t
  misc_difference 289: note = a, c, g, or t
  misc_difference 290: note = a, c, g, or t
  misc_difference 291: note = a, c, g, or t
  misc_difference 292: note = a, c, g, or t
  misc_difference 3288: note = a, c, g, or t
  misc_difference 3289: note = a, c, g, or t
  misc_difference 3290: note = a, c, g, or t
  misc_difference 3291: note = a, c, g, or t
  misc_difference 3292: note = a, c, g, or t
  misc_difference 3293: note = a, c, g, or t
  misc_difference 3294: note = a, c, g, or t
  misc_difference 3295: note = a, c, g, or t
  misc_difference 3296: note = a, c, g, or t
  misc_difference 3297: note = a, c, g, or t
  misc_difference 3717: note = a, c, g, or t
  misc_difference 3718: note = a, c, g, or t
  misc_difference 3719: note = a, c, g, or t
  misc_difference 3720: note = a, c, g, or t
  misc_difference 3721: note = a, c, g, or t
  misc_difference 3722: note = a, c, g, or t
  misc_difference 3723: note = a, c, g, or t
  misc_difference 3724: note = a, c, g, or t
  misc_difference 3725: note = a, c, g, or t
  misc_difference 3726: note = a, c, g, or t
agtggccggactgcggctgcgagcataagaccagcgccaaggacaaagagcacacgccctttgccgagcagaagtttgaatactttgaaaaatactgattcaggggaaccgatgtgcagaatttaaaaaactcgtttgcaagtttctggaaataccgctacctgctgcaaaacctcatcacgcgggattttaagctcaagtaccgccgcagcgtgctgggcgttgcctggagcgtgctcaacccgctgctgacctgccttgtcatgtgggctgtgttcggcgnnnnnnnnnncgctgttcaaccagcgcggggatggcattgaggatttcccgctgtttttgatcattggccagttgatgttcaacttcttccgcgaatccaccagcatggcgatggaaagcgtgctgaaaaacggcccgctgctgcgcaaggtctatatccccaagtacatttttccactggaaaaatgctgctttgcgctggtcaacttctttttcagcctggtggcgctcttctttgtagcgctggttacctggtcccatatttcgctgcgcacggtgctgctggcggtgtatcccattgttatgctgttcgttttcagcctgggcgttgggctgatcctgtccacgatgtatgtctttgtgcgcgatatcatgcacatctgggaggtcttctgcaccctgctggtatacggcagtgccattttctatgaccccagtcagatggcatcctggatgcaggctgtcatcaacctgaaccccatctactggtacatcacggcggtgcgttcctgcgtgatgtggggcaccggcctgaccctgaacatggtgctgattcctttcctgtgttctgcgctcagtctggggatcggtgtgtatgtattcaaaaagaaccaggacaaatttgtcctgtatatgtaagggggctgcaagatgagcgaacaaaagcaacagcccattatttccatcgaccatgtttcgatgcgttttaacctggcaaaagaaaagcacgaaagcctgaaagaatattttgtggcccttttgcacggcggtgtgcgatttgatgaattcttcgccctttcggatgttagctttgacattatgccgggggatttttacggcttgatcggcctgaacggctccggcaaaagtacgctgctgaaagtgatttccggcgtctacaagcccagcgccggtaaagtgacggtgaacggcaccattgcgccgctgatcgaactgggtgccggttttgacatggatttgaccgcgcgggaaaacatctacctgaacggcacggtcctgggctatacccccaagtatattgattccaagtttgacgatattgtggagttcagcgagctgcaggaatttttggatgtgccgctgaaaaactattcctccggcatggtggcgcgcctggcctttgccgtggcaaccatgaccaagccggatatcctgattgcggatgagatcctttcggtcggtgatttcctgttccaggaaaagtgtgagaagcgcatggcggagctgctttccggcggcacgaccgtgattctggtcagccattccattgagcagattgagcgcatgtgcaataaggtggcctggctggaccacggccacctgcgccgccttggccccaccaaagaggtgacggcggaataccgcaagtttgaaaagaaggacgccatgaaggcggacaaagtggagggataaggcgcatggcacaggacccgaaccagaaccgcccggcggatgtggcccaggcggacagtgtgggcggcatggccaaacgcctgctgaaccccgcccatttgtcagaccttgcccgccgcagcgccgccaccctgaaagagcagggtgccgagcagctgtggcgcgatgtgaccttccgcgtggggctggcgttccaccatgattcctggcagcaccgggcagacctgcccctgcgccgggagctgaaagcccagcgcgccgagtacgcagacggcaagccgggaccggtggtaagcgttgtagtgccattgtacaacacgccggaaaagttctttggccagatgctggccagcgtgcaaaagcagacctacccccactggcagctggtgctggtggatgcttcggacgcagcccatgccgcgttcagcacccatgccagcaaggccgcggcaaaggatccgcgcattctgtataagaaagtggaaaacggcggcattgcggccaacaccacggcaggctttgtgctggcaacggggacgtatatcgccctgctggaccatgacgatgtgctgtaccccaacgcgctgtatgagagtgtgaaaaccctgcaaagccagggagccgagctggtgtacagcgatgagatcgtgctttcggcggatttgaaacagctgggcggctaccactttaagccggactttgcgccggactatctgcgcggggtcaacttcatcacccatctggcggtgttctcccgcgcattgctggaccgtgccggtgcatatgaatccagtgagtacgatggtgcacaggaccatgacctgatgctgcgcctgaccgaacagaccacgcgggataaaattgcccatatcaaaaaggtgctctatatctggcgcggccatgtgggttccaccgcggcgggcatggaggcgaagccctatgccctggcggccggtgtgcgcgcgattgatgcccagctccagcggctgaacctgcccggcaaagccatggaagtgaagggtgcgcccggtgcgttccaggtgcggtacgagctgaccggccacccgctgatcagcgttatgatccccaacaaagaccatattgacgatttggaccgctgcctgaaaagcctgtatgccaacgcaggctatgataactttgaagtcctggtcattgaaaataactctgaacagcaggaaacattcgcctactacaaaaccatgccggagcgttaccccaacagccgggtggtgacctatgtggggccgtttaacttttctgccgtcaacaaccttggtgcgcgctttgccaagggcgagcatctgttgctgctgaacaacgatatcgaggtactcagccatgattttctgcgggagctgctgagctattcccagcggccggatgtgggtgctgtgggcgcaaagctctattacccggatgataccatccagcatgcgggcgtgattatgggaatcaacggcagtgcaggccacagccacaagagctacccgcgcaaggctgtgggcgatttgtaccgccttgtcaccacgcaggactatatggctgagtacnnnnnnnnnncgagatctacactctttccctacacgacgctcttccgatctcctgatgaccaaaacggagctgtaccgcgcggcgggcggcctggacgaagccaagttcgccgtggcctataacgatgtggattactgcctgaagctgtggcagaagggcctgctgaatgtgtacaccccccgtgccgaagcctaccattacgagagcaagagccgcggtctggacactaccctggaaaacgccgcccgctatgcccgcgaaaaggcaaacttttacacgaagtatcacgaatatattgatcattatgacccgtactataacccgcatttcaacaacctgtttgaaaactttgggctgaaataaggcagggcagagtgcatttattttggaaagaacccacccgattgcggcagaattcccaggccgtannnnnnnnnnggcgcacaatgcgcgcccctacggtttccaacatcgtccaacaatgaaagagctgcgtaaccaaacacctccatcaccccatctggcaaaaatccttccatgaccacgtcatccgtacccagacagattatgaaaccatctggctgtacatcgattccaacccccaaacatggcagacggactgcctgaacccgaaccggaacaacccccaacaatctgacacccgaaaggacgtaacgttatgaaccagcaggccaagcgcatcaaagaactatttggctatgcccgtaccttgacgaaggaacagggcattggcaccatgtgcgtgcgcgcggcgggctttttcaaacggcgctttttcggcaagcgggcgcggtactggccgtccaacatggcgctggaagcccagcgcagcgaccccgcggcggaaaccttccccatcatttctattttaacgccgctgtacaatacgccgcaaaactttttaacagaatttctcgatagtgtggaaaaccagaccgcccacaactggcagctctgcctggcggatgcttcggacgatgcccacacctatgtgggggagctggtgcaaaagcacatggcggccaacccgcgcattcgctatgtgaaaattgaaaacaagggcattgcggccaacaccaacgcggcggcccggctggcacagggggaatatctggctctggcagaccatgatgacatcctggccccgcacgctatctactgcatgggcaaagaactgcaaaaaacgggggccgatttcgcctacagcgatgaagcccttttccgcaaaagccccaaaaccgcccatgtggcccactttaagccggactatgcgccggaatacctgatggcctgcaactacatctgccacctggccgtgttccgcaaaagtctgtttgatgccatcggcggggagcgcccggtgtgtgacggcgcacaggatcatgatctgttcctgcggctgatcgacgccatgcaggcgaaagacgccaacgccgcaccgctgcatatcccgcaggtgctgtattactggcgggttcatgcggcgtccacctccggtggcaccgaggccaagccctatgtggtaaaagccgcgcagaaagccgtggcggaccacctggcggcaaccggccgcagcggcagggtagaggagggcatcttccccggtacctgccatgtgcagtgggaactgccggagccggaaccgctggtgtccatcctgatccccaacaaggaccatgtggatgacctggaaaaatgtctgttcagcctgtactccaaaacgctgtacgaagcgtttgaagtgatcgtcatcgaaaataactccaccgaccccgccacaaaggcttattatgaaaagctgccggaccgctatgccaactgccgcgtggtggcttacagcggcgggttcaatttcagccgcatcaataactttggccgcaagtttgccaacggcaagttcttactgctgctcaacaacgatattgaaatcatcagcggaaactggctgacccagatggtggccgaagccagccagcccggcgtggcggcctgcggcgccatgctgtattacccggacgataccatccagcacgcgggcattatcaccggtttgggtgggtatgcgggccacagccacaagtaccacaagcgcggcggtagcgggtacatgttccgcctggccaccgtgcaggattattccgcctgcactgcggcctgcctgctggtgcgcacatcggcttatgatgccgttggcgggttggatgaagcctttactgttgcattcaacgatgtggatttctgcctgcgcctgcgggaaagaggctggcgtattgtgtggaccccctatgcggagctgtaccaccacgaaagcaaatcccgcggttcggacgaggaagaccccgccaaaaaggcccgctttgccaaggagcaggcccgcctgtatgaggtacacggtaagcagaatatcctgcatgacccctactacaacccgaacctgagcctggattatgaggatttccgcgaaaacggggatctgcgcaatctgaaaaatgtgaccctgtgacccctgccggaaaagcagggcaaaatctgtgcagtttttttgctgttacggcttgccacgctatgccggatatgctataatctaaatgttaccgcggcccggctttgggcgtatgccctgcatcagggagccttgattgccttttgctgcgccgtaggcaaatattataaagcgaggtattactactatgagccagaagtctgctatcgaaaaacagcccatcattgcaaaagccgccatccatgagggtgacaccggttctccggaagttcaggttgcgctgctgaccgcacgcatcaaccacctgactgagcacctgaagaccaacaagaacgacaaccacagccgtcgtggtctgttcaagatggtcggccgccgccgtaacctgctggcctatctgcagaagaaggacatcaaccgttaccgtgctctgatcgctgaactgggtctgcgcaagtaattcgcaaaacgggcagggcgctgtatgtgcgccctgcccattttctatatttcaacaggtgttccggcattcatttttattatgctctgccgctggcctgtaatcatattgaataaagttaggaccccgagggagaagaacggtacttttgcactccggccaccgttgccagtccattatattccactgccttttacaatgtaatgtgcggtacctttggtcagtgctgtaactcctaactcctccctcctacctcctacctcctaacttaatgtttttggccgcccgcatggtttgtgcagtaaatcgaacgccggaacaaaacaaccgttccgccgctggatttattgctcaaagcatggggctgcctgaaccgcatattcccaccaggtatcaaaaattatatcagaaggagaattactatggcactggaatttgcatcccgtaaggcaaccttccccaactaccgcaagtttgaaacaacttttgccggccgcccgtttgtggtggaaaccggcaagctctgcggccttgccaatggcagcgcaatgatccgctatggcgaaacctgcgtgctgtgcaatgttaccatgagcgaaaagccgcgtgaaggggtggatttcttccccctgagcgtggaatttgaagaaaagctgtacgccgccggccgcattcccggctcctttatgcgccgcgaaggccgccccggtgaacacgccattctgtcctcccgcgtggttgaccgccccatccgcccgctgttccccaaggatatgcgcaacgatgtctgcgtgaccatgactgtgatgagccttgacccggactgctcccctgagattgccggtatgaacggcgcgtctctcgccattgccatgtcggatatcccctggaatggccccatcggcggcgtggcagtcggctatgtggacggcgagatcgtgctgaaccccaccaaggagcagcgcgagcgctctgacctggccctgaccctggctgccagcatggaaaagatcgtcatgattgaagccggcgccaacgaagtgaccgaagaggtcatgatggacgctatcaaggctggccatgaggaaatcaaaaagctgctcacctttatgaacggcattgttgcagagatcggcaagccgaagaagagctttaccccggtggaactggaccacgctctgttggcggatgtgtacgccaagcacctggaagatgtcaaggctgccatgaacaccgacgacaaaaacgtccgcgatgccgccatgctgcccatcatggatgctattgccgaggaacaccccgaactgaacgccgccgacctggatctgatcagctataagctgcagaagaaggttgtgcgcacctggctgctggaagaaggcaagcgtgttgacggccgcggcatcaatgagatccgcccgctggccgccgaagtcggtgtgctgccccgtgtgcacggctccggcctgttcacccgcggcca

SEQ ID NO: 648 - DNA, 6205 bp, unidentified
  source 1..6205: mol_type = unassigned DNA
gccgaaataatgaacgacagtgaataaaatagaatgaaaaagatagagataaatctgaatgcccacttggagtgatagttgcagagagcggttatccataaaatgactaatggtaacagcaatatgtagcaagctataacattgtcaaaccatagcccttttataaatgcagtggcttgcatgagaaagttgttttgtatatcgggaggaaactgataatctattgaggtgaacaggacaagccggaacaggaagaaaaaaagtaaagcaactatatgtatgataaataagtaaagtaaagaaagagtaaactgttggataagcttagcttgattcttacatgctgttacaaattgctgcatgagtgaacggagatatttcatttgttttagtaaagtttgcatttgtttgaatcaattcggatgattaacaacaaaggtaaacagaattttagaaatatcaaaagagggtatgccaaaagtaaaattggctgccaatttgttcactttaggggcaaacatgtgagtccgcccgaaaatatgggcaagcagtttccgtttcttattctattttcgggaaggagtaaggcggtctcgtttcatagtcagaacaaaaggacagaatagccgtgctatccggttgaggcgctccagacgtccgtctttccgcgttccgtttaatttctgccggaggagttcccataattgcagttttacttgctctgttgtgcttaatttggcaatgcggttgtaaagcattcctctccgtatacatcgtttgtatctgctcaggtgggtaaggtgttgttccataatgcggactatctcaatatcttcgctcttaccccctccgttgttttcagctttgacggtaactttctgggtatgttgtctgaagtagttcagtacttcatatctttctataatgtctccttgcattgccatataaaaccagaacagccagtcgccgctgtagcgcatttgcaggcattgttccatattttggacatttaccatgctttttctgaaaatggccgagcttgcattggctatgtaaccacgccagtaaaggttatgttcggcataagtttccccattaaacacggcgtatggaggtatggcagatttccatttgttcatgtcgcaactcagcacattaccgtctttatcaatatacttggaaccggcaaagcatacggcggcttgttggtatttctccattaaaggaactactttctctaaaaaagtaagctcacacaagtcatcggcttcggctatccatatatattttcctttggctaattgcatgcctttaaaccattgtttaaatggatttccggtgttgtgttcgtttaatagaatatggctcactttggcatggtcttgatagtccgataatacctcttcgctaccgtctgttgaggcatcatcaagtaaaatcagttcgatattctgataggtctgttgcagaatactctgaattcgtagattgaggtatcgtttataattataattaggtaccactacactgaccaagggaagtgcattcatgctctattgttaagttagttcttgttttatttctacaaatgtaatgttatacaggtaaataaacaagttgcttctttgtttttttttcaaaaaacaggaattttgttgaacttttaaaaagaaacgataattaacattttagtatgcagtctttcttgtacctttgcattatacactacatagcatttgctgtattaaactaaaaattaaattagacattagactattgtttaaattcaattagtatgagaaagaaaattctttttattattccgtacattccttatccgctggattcgggcggtaatcaggctttctttaatatggtggagtatttgcgtcataagatggccgtatctgtattgctttatcctgaaacagggagacgtatgcaagatgtagagtcattgaagaaaatttgggataatgtggatttctttatttatactcctaaaactaaaactgtcagattacccaaaattaaacatcctttttattataaatggctgcaaaagatacatgcgtctgtaacccgtaaaatgaaccggcaacagatatggacggatgaaacgggcgaagttgtggatttagtacggggaaagagtactttgttcagctcttgtttccagccgctagaccaggggtatgcggagtatgtttctcaggtggctcattcaggttttgatattattcaagtagagttttatgaactgttgtcattgggattcttgttgcctgaaaatgtacagactatttttgtgcatcatgaactccgctacatccgtaatgaaaaggagattactttgttcagggaacagactgccggtgacaggatgttgtttcatatagcaaaggattttgagcgcagtgcattattgaaatataaagatgttattgttctgactgaagtagaccgtaaaattatggaggacttcataggacggaaagaccatatctacacttctccggctgtggtgcaagtgggtgacaggctggaacagccttttgttccggtccaaagcggacgcctgacttttgtgggaagtgaggatcattttcccaatctggatgccgtggcatggttctgtcacgaagtgattccgcatctgcgtaaacgtcatttttcgtttacattgcaagtaattggtaaatggcgtggagagtgtatcaatcgtttgcagtccgaatacccggaactgaagctggtaggctatgtggaagatctgggctcttttttaaaaggcagtgttgctgttgttccaatacgtatcggtagtggtatgcgtatgaaaatattagatgctgtattgtcaaaagtaccttttgtaactacggcaaagggtgtggaaggcattgattttaaggatggtgaagattgcttgattgttgatgaccctgccggatttgcagaagctgtcatagccttgtcaagtaatccgcagttgcagagacagttggttacccatgcggaagacagtttgcggcaagtatataaccccggacagatgcaggaaagaaggcttgccgtgtatgaacaaatattaggggataaagtggggtaatcttgggtgattatttcttttttgttacctttgcggcattatatataattgataattatgctgaaacagttctttagtttgttgaagcggtatattcttccataccgcaaatatttgacatgggcattgatactgaactttctgtcgcaatggcttaatgtgttttcgttcatggcgattgtgccaattttgaacattctgttcaaaattgataccaagtcttatgagtacattcctatggatattcataatttggataaggatgtactcataaataatgcctattactttgtgagcaattttgtggctacaaatggtgcgttctatacacttgccatgatgggaggaatacttatctttatgactatgttgaaaactgccggttattttgcttctgcggctgtcatggtacctttgcgtacaggtattgtccgggatatccgtattcaggtttataataaagtgttaagtcttcctttgagttttttctcagaagaacgtaaaggagatatcatagcccgtatgagtgcggatgttacggtggtggagaactcgttgaccagttccatcgatatgcttatccgtaatcctatcgctcttttggtttgttttgtcactctgttttcggtaagttggcaaatgacgctttttgttatctttattttacctctgacaggttggataatgggggttgtcagccggaagctgaaaagacagtcctctacagcacaggcgcaatggggagatattatgtcccaattggatgaaacattaggaggtttaagggttatcaaagcgtttatagccgaaagcaaaatgtctgcccggttctctaaaacaaacaatgacttccgcgatgcaatgaacgagatgattatccggcaaagttcagcccaccccatgagtgagtttttaggtacttgtgtgattgtgaccgtgctgttgtttggcggtgctttaatcttaaatacaaactatgctccgatggatgcggctactttcatattttatctgattatcctttatagtatcatcaatcctttgaaagaattttcaagagcattttataatattccgcagggattggccagtatggagcgaattgatatgatattgaaagcggaaaatcatatcgtagagccggagcagcctttgccattggacgctttcacagataagttagagtttaaaaatgtaagtttcagctatgtagaaggacgtccggtcttgaaccatatcaatctgacggttcctaaaggaaaaacgattgcgctggtgggtcagtccggttccggaaagtctactttagtggacttggtaccgcgttatcacgatgtatcggagggtgcattgctgattgacggcaagaatgtgaaagatgtatccatccacagtttacgttctctgattggtaatgtaaatcaggaagctattctgtttaatgacaccttctataacaatattacttttggtgtagagaatgccactatggagcaagtaatagaagctgccaagatagcgaatgcacatgatttcattatggaaacggaaaaaggatatgacacgatgattggtgatcgtggagggcgtttgtccggtggtcagcgtcagcgtgtcagtatagcccgtgcaattttgaaaaatcctcctatccttatattagatgaggctacttcggctcttgacacagagtccgagcgtttggttcaggaagcgttggagcgtttgatgaaatcgcgtactactatcgctatcgcgcatagattgagtaccattaagaatgccgatgaaatttgtgtactttatgaaggtgacattgtagaaagaggaactcacgatgaactgatagccttaaatggatattacaagaagttgaacgatatgcagtctttgtaaagtggagcaaataaagaaattggcaattgttattcccgcctacaaggggcgtttccttaaggaaacgctcgactcaattgcagttcaggcccataaagatgagttcgtgttatatataggtgatgatgcaagtcctgaaagattggataagattgtggaatcttatcagaataaggtaaatctggtgtatcatcgctttagcgaaaatatggggggcaaagatttggtggcccattgggagaggtgtatccagctgtctgcagagccgtttatctggcttttctcggatgatgatttgatgccggctgatggtgtggaacgtgtcatggaggctttgtcgcgcccacaccatcagcgaggatatttctttcgttttccattagctgtcattgatggtgaaaacaagcggatacgtgccaatcgtcctttggaagaaggaagtgtgtcttgttaccggctgctgctagataagttacagggaaagatagattcggctgccgtagagtacgtgttcagtcgggagatatggcagtcggcaggtggttttgttcattttcctatggcttggtgttcggatgatgctacgtgggctgcttttgcccgtcatgcggggggtgttatttctttgccggggcagcctgtatgttggaggaatgttgaaggtgcaaacatcagtaattctgccggtcatgacaaagataaattgcacgctactattcttttcttgagatggatgaggaatatgttttccgattatgtggatgatccggagctgattaatgcattgcaatgctatatccataccatccttcgtatttcattgcataaacattataatatatgtggtttgtggggggtatctatggctttgggaagatttaataaaagggcggcctttactacgtttttcaggaattttaggttgttctcttaatttcatttatgcagccgcttgcgatttctcaagagtgcctgtattttcataaaaagtttgggtgcatatatgccctcacttcatatttctgtcctgtatgtatagtcagatgtatatcttcctgtcatatattgtttcacttttttaaagaaggacattggggagttttttcatccgtaaggaattgtgtggttttaaaatcagattcatccttaaaatatcttatccgcatccctaaacatttcttgctgtatggttaaggg

SEQ ID NO: 649 - DNA, 16289 bp, unidentified
  source 1..16289: mol_type = unassigned DNA
atggatataattctactaacagaaaacaagaaacaatacatagacctattgctacttgctgacgagcaggaatctatgatcgaccgttacttagagcgtggagacatgtttgtgcttaatgacaatggtgtaaaggctatttgtgtcgtcgcagatgaaacgaacggaatttgcgaactcaagaatattgcagtgacttccgaatcacaacgacagggatacgataagaggctgataaattatttagttaagcactatgctggaaagtacacccagatgatagttggcacgggtgatgtgccaagttctgttagcttctataaaagttgtggatttgaatattcacatcgaatagaaaacttcttcactgacaactacgatcatcagatgtttgaagatggggtgttgctgaaagatatggtatattttaaacggaatattccagagagcatcattataaaaacctattacagtcgtgttcctgcctgcggtgtattttgtggtggttgtcccacttatacgcgagacaagaaaccctgtttaggcgctgagcaaaacaaagaaaggtgtgagagatgtaaaacatttcatctttgttgtaccgaaaaaggaatcactcattgttatcaatgtaaagcctttccatgtgcaaaatttaaaagtttcgcaaaacgatggctgaaatatggacaagactttgttgccaatcaaaaactattaaaacaagccggtgaaatggaatttttaaaacagtataatcaacgaacagtataaagattaaaagaacaaaatgaaaaataggaacatactcctcataggattcttgttttgcactttacggctatttgcgcaaactgaatatacagtaaatttatatgatgcacaaagagagcgcattgttccaattgctatatatgaaccaaaacacgtaaacaaacatactccggtcattatattcaatcatggatatggacaaaatgctcctgattcgtatatatcatactcatgcttaacaaagccattagctatgaaaggttattacgtgataagtattcagcatgaattgccaaatgacctgccgttagcgatgagtggcaactttatgaaaacacgaatgcccaactgggaaagaggtgttgagaatatattgtttaccatcaaagagtttaagaaattcaagcccaaactgagttggaataacattactattatgggacattccaacggtggagatatggcaatgttatttgcagccaaacatccaacgatggctcaaaagattatatctttagatcacagaagaatggtaatgccacgatgcagttctcctaaagtttatacgttgagaggttcagactacggagcagacgaaaatgtaattccgacagtagaagaacaacaaaagtatcatatctcagttattcaattagatgatattaaacatggggatatggataacaaaggaaaaagagaacaacacgatacaatactttactatctatataaatttctaaaatgaaaacagattataaagtcggcgagttgatatacgacgcaaatatttacgatagattgaatacctttctctcagatttgcaattctataaaaagtggcttcctaccaacaaagaggctcgaatacttgaactctgctgtggtacgggtaggctcactattccaattgcacaggagggatataatatttgtggcgtagattacactccgtcaatgcttgagcaagcaaagtggaaagctaccgaagcaggattagagattaatttcattgaagcggatattagaacactggacttgcaagagaaattcgactttatctttattccgtttaactcaatccaccatttatatcgaaacgaagatctgtttaaggcgttagcatgtgttaggaaccatctcaaagaaggagggctatttctgttggattgctttaatcccaacattcagtatattgtcgagaacgaaaaaggccaagccatgattgccgaatacacaacggacgatggccgagaagttttaataaaacaaaccatgcgttacgagtgtgcaacccaaatcaaccgaattgagtggtactattttataaacgaagagtttcattcaacccaaaatttggatatgcgattgtttttccctcaagaattggattcatatctggagcaagctgggtttggtattgttcacaagtttggaggttttgaagaagaaccgtttgatgataaatcggaaaaacagatatacgttttgtcattaaactatttgagagataatgacaagtgatgcaatagcagaggaatacaattcagattttgaataagtaaaatagagtaaactttttaactgaattcactttgcggttctttcattactgggtagtgtaaaataaactgtgtcacgcattatttatctctagaaaactcatcggtcggggaacggcccgcgccaaggggcgggaccacccgtcccgacgagcgtaaaattacaataatttaaaccggtttccaaactttatagccagttgttgcgagatggtagcccaattggccagtggcatggtccatttcttacgtatattgcggtatgcaagataaacaagtttctcaagggctgtatccgatgggaacacgcccttgttttttgttaccttgcggatctgacggtgatacccctcaacggtatttgtggtatagataagcttacggatgaccggagtatactggaagtattcggacagcttatcccagttgtcctgccaggatctgataacgacaggatactgttcaccccatttttcatccagcttgaggagctcattttctgcggattccttattgactgcctgatagacacatttcaaatcccttaagaactccttctgattcttggatcctacatacttgatggagttacgtatctgatgtactacacaaagctgtacggctgtattaggataaacgctttgaatggcttcaggaaaccccttcagaccgtctatacaggcaatgagaatatcctcaactccacggttctgaaggtctgtcaacacgctgagccagaagtttgctccctcattccttgatatatacattccaagtaactccttgtgtccctccctgtcaatgctcagtacattatagattgcacgggttaccgcgcagccacgttcatccgttactttgtaatgaatggcatccatccagactataggataaacagaatcaagcatccgtgatttccatgcttttatctccggaagtacacggtctgtgatggaactgattgtgtcggccgaaacacgattcccaagattttcttccatccagtcactgatttcccttgtgctgtttcccattgcatacaagccaattatacggtcagcaacaccttctgccagaatagtctcacgcttcttgataaactggggatcaaaactcgaattacggtcacggggagtggaaacggttacttcgcccaagggagtctgaacctgcttttgcatctttccgttacgacggttacccatctggcgttcttcttctgtcaaatgtgtatccatctctccttccagggctgcattcaatatactttccaatagtggggcaaaggcgccgtccttacccaacaaaggcttgccggctttcagctgttcaatggccttgttcttgatactctcgaaatcaaattcttctttcataaaaaaactgtgttagcaaagttaatactttattccttgctgacacagtttaatttacatcctccattactgtacaaaagcactacaaataatcaaatatgaagtatgcttgtacaaaagttctgcactttctttgaaccatgtaccccatttttcatatctttgtcgctgcaaaccatttgtaaccccaatgcggtaacacccaccaaatcaatcttctaaaattgattggagactcccgcaaacaggctgaaaaaatgcggtacaacacgtatatcgaaagacctgaaaatcaacacattgaatttcccgatactttcaatgtaattgtaaaaacaaggtttgtaccatttaaaagagcaaaacgctaacactcaatagtgtaaatatgctgcgtcggcaagtaaagctaatcatatatacccagttatccccaaaacgaaaacgatgagagattttcctttatagatagcttaggatgttcagttctcctatctcccatttcaaaacaaaggctgtccattatctaatatgtgacagcctttctatgaaagttttcttcagataaatatcatacttttttcataaactccttcggtgtttttccaaaatactccttatacctgcctctgaagtttttcagatttcgcatacccaccatttcagcaaccatagtcacagaaaattttccgctttccaaaagttcccgtgccttctccatcctgattctcgaaatcaaatatttgggtgcttctcccgtcaacaacttccacttattataaaaggttgtccggctcatgcacatcctggaggcaatatcatctactgtcaaatcctctttatccatattctccataatgtaaagcttcacttcattcaaaaatgccagattggcatcctgctgagcccgctccataggtttcgttaaaaaatcttctccaaaaactttctgaagaaatgtcttccgaagaaaacggctattatttatcaatatggatatttccactttaaggtcctccagattaaagggcttacatacaaagagatcagcctgagaagaacaacgcttttcccgccgtttcacatcaatgtgcgcccccatcaatatcaccggaataaaggaggtgtccctcgacgtcttcagtttagaagaaagttcctcaccgctcatacctttcaacatgatatcacaaatcaccaaatccggatactcttcacatattacctccaatgcttcctgaccgtcatcaaagctcctcactacaaaacattccgataaacgtttctcaagataatccttgaatcccttgtcattatccgcaagtatcactaaaggtctatccatattttttttcttcgagaaaccatggaaagctatttccgactcattcacctgaaaagtgtccggaatatttaaggatgtatacccccccgaaaccgcacacgaacatcttatgggaaatcgaagcagagcctccttttccaaagtcagtattttcccgtcacatatattcatcaacttgtcaaaaaacacaccgcccatgccatactgcttgccatgcagaggtcgcagaataggaagccgcgacgagtaccatctgcaacatttcagaaatcgcttgttgcctgtatccttaatcctgattgcccagtaatctcccttcaacgaaacctgcatcgagagatgcgtttccggcagagaacactcgatggcactcaatacaaaccggtcgataaccggagatatctttcccggatcaaaccaagcgcttgcatagtcaaaatccggaaccaaatccagcttcatctgtaacccggccacatgagactgtaaaaaagacactttcttcctcataaatgcgccgatttcatgttctgcaactaccaggctaccagaattgccaaatagtcgtttcaactccatcaacgctatcaagtgctgctccagcccgcctatatgatgaagtgcaacagccagttccttctttatgtcttccggacagtctccttcgtaaactgcccctaacggtgtcttaatcaaagaaatgggattacgtatgttttgaaaggtatcaatgaaatactgatttccctctttcagtaaatctctttcttcactgatacagagtaaatggaacaaaagccaacataatatacagattccactagccactattggcagaacagaccagggaaccttatgatatacgccgatggatagcaggaaaacgcataatgacactactattattattatcgataaatgtttcatactattataagtttaagtaataatgattcatactaatatatacccgagttttcagtcaatagcaggataatcccaagtatgtcatcaggaggcggtctaatgggggaacggtaggttccttgagtcatcgaattcaccttaccaaccctcgtttgctagcagagcctgcatttcgtccacctgtatttcatacccagcaactctctaaaccattcatttcccatgcccaacgtatctttaaatatcaatacaacattccgcttatccaagatagctccaatcaattattctcaaacaaaataatagtataacaaacggaaaggctaaaaagatgataccacttcacacatattcttatcatactcacatatcttgcgcatgaaacagaaagacattatctttgcagcatgaaacaagaactgaaagaaaacggaggattaccggcacatatactctggacacttgctatcgtagctggcgtgtccgtagccaacttgtattacaatcaacccctgcttaatatcatgcggcatgaattggaagtttctgaattcaaaacgaacctcattgccatgattacacaaatcggatatgcgctgggattattgttcatcgtcccattaggagacctctatcgacgcaagaatatcatcctaacgaatttcttcctactcatattttcccttctagccattgccatggcaccgaacatctacatcatctgggcagcatcactcattaccggcatctgctccatgataccccaaatatttgtaccgattgcctcgcaattctcacgccccgaaaacaagggacggaatgtaggtgtcgtcatctcaggattactgactggaatacttgcatcacgtgttgtcagcggatttgtgggtgaagtgcttggctggcgtgaaatgtacttcatcgccgctggaatgatgttactatgcgctatcgttgtattaaaggtactaccggacatacaaccgactttccaaggcaaatattccgggctgatgaagtctcttttctcattagtaagagaatacccctctctacgaatctactcgatacgtgcaggactggcctttggctcattccttgccatgtggtcctgccttgcattcaaaatgggagaagccccgttccatgcatccagcgatgtcatcggcatactagggctctgcggcattgccggagccttaaccgcatcttttgtaggaaaatatgtaaaaaaggtaggcatacgcaatttcaactttatcggttgcggaatgattctgcttgcatgggcctcgctctttttctgcggaaacaactatgcaggtatcattaccggtgtcattcttatagacataggcatgcaatgtatccaactcagcaaccagaccagtattttcgacatctacccgtctgcctccaatcgggtaaatacgattttcatgaccacttacttcatcggcggctctttgggtaccttccttgcaggaagcagttggcagacttggggatggagtggcgtggtcggcaccggcgttattttaacaataatatcgttgtccatcaccctttacagcaagaaataacaaggatactatcatttttccaagcaaacgcaaagatttgataatttttatttgtcatgcaaaggataaggaagatattgaacagaattgttatacctttgtcgcatcaaactataaacgacagattgataatagattcgtcaaccaagcatagtcaaaaacaaccctatgaattcagcaaagaaaataccctctccactcgtttctctatttcccatcgcttttctcgtaggaatgctgttcgccaccatccatactttcggaagtgacgccttgagtggaggaagccagatttccctgcttgccaccactggtatgtgtgtctttatcggcatgactttctaccgcatcccttggaaagattatgaacttgccatcaccaacaacatttcaggtgttgccacagctatcattattctattgattatcggtgctttgagcggcacatggatgataagtggggtggtacctacccttatatattatggtatgcagattatccatccgaattttttccttgcttctacctgcattatttgtgcattggtatcagtaatgacgggaagttcatggaccactatcgccaccatcggtatcgcccttttgggcataggtaaggcacaaggttttgaagagggatggatagccggtgccatcatttcgggagcctatttcggagacaaaatttcaccgttatcggataccacggtccttgcctcatccgtaacggaaacaccgttattcagccatatccgctatatgatgatcaccaccgtcccctctctcctcatcacccttgtcatctttacagtaatgggactcacacacgaaacgaacaatacacaacagatcgcggaatttacggcagcattggacgccaaattcaacattactccctggttactggctgttcccgtgattacgggaatactgattgcccggagagtgccttccgtcatcacactctttctctccactctgctggcagggatattcgccttcatcttccaaccgggactactgaatgagatagcggaaggtgggaatatgttcaaagggataatgatgacattctatggcagtaccagtctacaaactgacagtgacatgttgacagaactgattgccacacgaggtatggcaggaatgatgaataccatctggctcatcatctgcgccatgtgtttcggtggagccatgacggcaagcggcatgctaggaagcatcacttccctattcgtccgcttcatgaagaatacagccagcatggtagcatccaccgtatgttccggattgttcctgaaccttgccacggcagaccagtacatcagcattatcctcaccggaaacatgttcagcaacgtttacgcaaagaaaggctacgaaagccggctacttagccgtaccacggaagatgccgttaccgtcacctccccgcttatcccatggaacacctgcggcatgacgcaagccaccattttgagtgtacccacactgacctaccttccctattgcttcttcaaccttatcagtccggtaatgagtatctttattgctgctatcggatataaaataattaaaaaaccggtgaacaatcctggataggcattgttcttgcaataaacttataacgaacaatttatttaaacctaaacaaaaaaagattcgattatgaaaaagtttattgcattagcagcagtagtattggtaagcatggcaacaacgaccatgtatgcacaagagagtagagctgaaaagcgcgcagaccgtaaagcccaaagagacgcagaacgtgcacgcctgaaagctgaagaacaagcacaggatgccatttcgtacgatgacgcaatggcggccttgaaagctcaccagttcgtaatggaggcagaccaagtgatgttccgcaacggacagaccgcatttgtaaactccaacaccaacttcgtattggtcaaccaaggacgtggcaccgtgcaggtagccttcaacaccgtatacccaggtcctaacggcattggcggtgtaacagtagacggaaccgtatcggacatccaaatgactaccgacaaacggggcaacgtgaattgtaacttcagcatccagggtatcggcatttccgcccagatattccttacgctgaccgatggcgggaacaacgcaaccgtaaccatcagcccgaacttcaactccaacaccatgactttgagcgggaacctggttccgctggaacaatccaacatattcaagggacgttcctggtaaaacccttatataaatatatatattcccactccgccacaaatcacactaaaaagtgtacatttgtagcggagttttttatataccaatgtcatgagagaatttatcattgcagacaatcaagatatcaccaaagcaggcatgatgttcctattgggcagacagaaagacacctccctgctgctggaagccgacaacaaggcagaactgatacagcaactacgcctgcatcccaccgccgttgtcattctggactataccctttttgatttttcgggagctgaagagctaatggtacttcacgaacgcttcaaggaagccgattggctactcttttccgacgaattgagcctaccgttcctgcgccaggtattgttcagcagcatggcattcggcgtagcgctgaaggataattccaaagaagagatactgaccgcactacaatgcgcctcacgcaaggagcgattcatctgtaatcacgtcagtaacctgctgctcgcaggcaacggttcctcctcccccactcatcctaccatcaaagatgatttactgactactgccgaacggagcatcctaaaagagatagccctggggaaaacaaccaaagaaatagctgccgaacgaaacctcagcttccatacggtaaacagccaccggaagaatatcttccggaaactgggtgtaaacaatgcgcacgaagccaccaaatatgccatgaaggcaggcatcgtagacttggtggaatattatatataaatctccccgctcccgacacacagccgggcatcagcatcatacaccactccgaactggcccggagcaatgccttgcagcttttcttccgaaacaatgcggtaaccctccgcctccttttgcaacctgcctttgacaaactccggcgtatggcgtatcttgaaagtcacctccacctcttcctgcgctcccttccagggattatccgtaatgaaatgaaaatcgtacatacggaattcatagccgtattgcaatgccgtatcacatccgcgggacacgtaaatcacattctcctccacatccttgcggacaacaaaccacggtcctccacccaaccccaatcctttacgctggccgatggtatgaaaccaatagccccgatgcttgcccaactttctacccgtttccaactccacaatatccccttccctttcgccaaggaaacggcgcacaaaatcattataatcaatctttcccagaaagcagatgccctgactgtcacgacgtctggcgctgggcaatccggcacgcagggctatgtcacgaacctcattcttcatcagtctgcccaatggaaacatcagtttggaaacttgcagataatctatctgtgccagaaagtcggtctggtctttcacggaatcggcagcggtaccgagccatgtctttccatccctcaacaccgtagtggcgtagtgcccggttgccgtgatatcgaaatccttccccacacgttgctcaaagcacccgaactttatcagcttgttgcacatcacatccggattgggagtcaagccacgtcttattttatcaatggcataagccgccacctggtcccaatactcccggtgcaggtccactacttccaacgataatccataacgccgggcaatggcagaagccatctccatatcctcttccgcagagcagtccatataatcggcatcgtccctccctattttgatataaaatagagaaggacggtaaccttgttcgcaaaggagatgtaccaccacggagctgtctacacctcccgacaataatacagcaatattcattctatcgtatactgttattcttttaaattctgtcaaatgcctgggacaagtcgtccagcaaatcatcgatatgttctgtcccgatggagaggcggaccgtgcccggtttgatgccttgttcttccaattcccgtgcactcaattgggaatgggtagtggtggcaggatggataaccagggatttcacatcagccacattggcaagcaacgagaatatctgtaaactgtcaataaacgtctgcgcttccttcacaccgccccgcacctcaaacgtaaagatagaaccgcctccattcggaaagtatttcccgtaaagcgcgtggtcaggatgctcgggcagggacgggtggttcacggcaaccactttgggatgcttcttcaagaattcaaccactttcaaggcattctccacatgacgttccacgcgaagcgacaacgtctccaatccttgcaacagaatgaaagcattgaaaggactgattgtggcaccggtatcacgcaacaatacggcacggatacggatggcataggcagcaggaccggcagcgtcgacgaaacgtactccatgataactcgggtccggttccgtcagttggggaaacttccccgaggccacccagtcgaacttgccgctatctacaataacaccacccaaggacgtaccatgccctccgatgaacttcgttgccgaatggactacaatatctgccccatgctctatgggacgaatcaagtaaggagtaccgaaggtgttatctataatcagaggaatccggtgacggtgtgctatttcagcaacggcatcaatgtcaatgatgttgcaattcggatttcccagcgtttcaatgaatactgccttggtattctcctgaatcgctttctcgaaattgtccagattgcccgggtccacaaaagtagtggtaaccccgtaggcaggcaatgtgtgggccagcagattatacgttccgccgtagatggtcttagctgccacgatatggtcgcctgcacgggtgatattctcaaaggcataagtgatggctgccgcacccgaggctacggccaatccggcaacaccgccttccagagccgccacacgtttctcgaacacatcctgggtggaattcgtcaaccgcccgtaaatattccccgggtcctgcaagccaaagcgggctgccgcatgggccgaattacgaaatacatacgaagttgtctgatagataggtacggcgcgggcatcagttgccgggtcgggttgttcttgtccaacgtgaagttgtagagtctcaaagtgcaatttctttgtttccattgtcgtttgtattttaggtgaataaaccgtttctcattcggatgttgcaaagatagagcgataagccggggcagacaatgacacagattagggaattttataccacaattgtggtagataagcaagcaattttctatctttagataagatagactgcatttcggcaaaactttttcatgcaagcatgaaagttctgcactcaatttgcactatctttgcccccatgaaagcaagaaatatactgatactcatattgggaaccctgattcttcccatttatctgacttcctgcggggtggaccgctggaaagagtatgccggacagacccagacagaccgctggattgacgataccatgcgtgtgtggtactattgggtagacgctatcccccataccaacgacctgaactattttcaagcccctttcactttctttgcctcgctcaaatccgaagaagacaaattctccaccatcgacagtctggtcagcgtcaccactacccgcagcatcccctatacggattacagctacggattccagttcactaccaaccagatagaagtagaaggagaagagaatgccattgttgcacagattctttacgttgccgacggaagcccggcctcggaaatcgggctgaaacggggtgactggattatgaagatggacgggaactttattactgaacagaattataagaaactgtatggaagtagtgccatggaacttacagtaggttattacgacgtggagaaaaatgccatcgttgcttacgacaaacccagacagatagcatcggcgcgtcccgtcaacgacaacccggtgcactataagaatgtatatacatcaggcagcaagaaaataggttatctggtctacaaccacttcagttccggccccacggacaacagtaatgaatatgacaacgacctgcgcagcgcattccaatatttcgcatcacagcaagtcaacgaattcatccttgacttgcgctacaacaacggtggattactgagttgcgcagaattgctgtgtaccatgcttgcaccttcctccgccttgggacaagagttggggtacctggaattcaacaaccgcttcaatccgcagatagtaccgttcaccctgaactccggactcatcggaaacggagcaaacctaaacctgaatactctctacgtacttaccagcagccagactgcctccgcctccgaaatggtgattaactgcctcgccccgtatatggatgttgtcatcatcggcggtactaccgtaggcaagaatgtaggttccaggaatttctccagccccgaactgatgataacgatgaatcccatcgtctgcaagatatacaattcggaagggaaatctgattatgaatccggattccaaccggcctactcgggatatgtagtgaatgagatgagcgacatgtcacgtttcctgccctttggagataccaacgaagccttattgagcactgcactcggcgccatcgacggaagcatacaaccgcccgcacaagaagatacccgttctttaagagtgaccactctcgcaaactccattgaacgtcgggcaagccatgccgtacgcatcaaataaaaagaccaataggatgaaactaaacagaagagttacaatcatcacccgattttcgggaatcatgttcagcctgctgttgctcggcggactggcagcttgcagcgatgataacaatggcaatgatacgccagaaccggagccgtcaacctaccccaccactcctttctccaaaatcgaactcaaagaagtgatagagagcgatgcgcaaccggttactgccacccacacctacctttacaacagtgcaggcaggctgaccagctacaccggcaaacagagctttacagcaggagacgaactcttcgagatagagaataccactactgtcgaatacaaggaccatcaagccgtgataaccgacgaagcaggtacagtatcaacctacacgctgaatgacaaaggttatgccaccacttgtaccagtcaggatatggcaggaaatacccgtacttacaccttctcctacctcatcaacaccgaagacaaatactatctggaaaacatcacagaaaagctggacgacggaaaagaatactcattcattacaatagactacagcaacttccgggcattgcgcatacagcaaaaggttgacacttttgagcacaacagtacggctaccacaccatcaggcaatgaaattgcaaatatctccgaaataccaagcctattcattacggacatgtatccgctttccatgcatgcggttgccatatacgggaagatattgggagaacctgcaaactatctgattacccaactcatcccggacagcaacggagaaagtgaagagaccaccacctatacttatacgttagataaccggggtatcgtcacttcctgccatgcagtcgtcaggcatataaggaacggctacgagcaggactacacacgcaccgtgaactataccatcgaataataaactacttacttcttaaagaacttgtcgaagaaaaggacgtgatagtctatggagttgttccaatacgttccggtatgtccaccgggacgggtgatgaagtcatggtctatcttccttgccagcagccggttgtgcaagtccttgttcacttcaagaaagaaatcggcctcaccgcagtcgatgattagcgccaagtctccatttacaatcttatccagctggttgaccaccgtatgcgcatcccaagatgccttgttggcagcaaactctcccaactgcttgttcatttcccaattctgggggaacggccgtatatccactcctccactcatactgcccgccgcaccgaacacatccttatgacggatagcactccacaaagcaccgtggccgcccatactcaatccactgatggcacgcgcctttctatcgggaatggtagcatagttcccgtctgtatacttcaccaattccgaggtgacaaaagtctcataacggtaggcaggattctccggactgtcccaataccaactgttcttgccgtccggacatacaaatatgatccctttctcatctgccatctgcggcaattccggcttcagttgcacccagctccgcgcattgccgccataaccgtgcaacagataaaccaccggacaagcctgcttgccgatagccttatcaggcaatacatacacaacttttacatccttattcatggctgcacttctcaccaacaccgtgtctacacgtgccgcctgcaacattacggcagacagacaccacaaaagccccaaggcaataattctttttttcat

SEQ ID NO: 650 - DNA, 14062 bp, unidentified
  source 1..14062: mol_type = unassigned DNA
atgaaagaagactggaaacccggaacaatgatttatccgctgcctgccgtattggtgagctgcggaagcactccggaggaatataacattctgactatcgcatggacggggacgatttgtacgaacccgcccatgtgctacatctccgtacgccccgaacgccactcctacgacatcatcaagcggaatatggaattcgtcatcaatctcaccacgaaagacatggcccgtgccacggactggtgtggcgtacgctccggaaaggactacaacaaattcgaggaaatgcatctgacaccggggaaaagcaccgtagtcagcgcgcctcttatcgaggaatcaccgctttgcatagaatgccgggtaaaggagattatggctctcggttcgcacgacatgtttatagcggatgtggtaaatgtacgtgccgatacccgtaatctgaaccctgaaaccggcaaactggaactggcggaaacgaatcccttggtctatgtgcacggtggatattatgagctgggagaaaagataggcaaattcggatggtcagtagagaaaaagaagtaataatgcgataaaggttttaagagatggagttgcgacgaatcttgatgggcttatatctgttggccttccccgccatgatgtggggacagactccggttgtgcccggtactgccgacgaagagcattccggacaccgcaaggaaactccggtcaatttcggtttcaaaggcggtttcacctcttccttgttccttgtatcccagttcagcgtcaacggagtgcccattgacgaagtgcagaacaattacaaaataggatatttcggttcccttttcatgcggataaacttcgaccgccacttcctgcaaccggaaatatcctacaacatcaaccggtgcaacatcaccttcgagaaacctctgcccgaagacgccgcatcaggagcccggccggaggaagcctccattacatcgtccatccacagtatagacatccccgtcatctacggatacaacttcatcaaggaggggccgtacagccttgccgtctttggaggacccaaagtgcgctatatatgggacaggaaaagtgacatcgacttcgagaatttcgaccaggtgaatatccgtgaaaggctgcgtccgctcaatctcagtttcaccgtcggcgtatccgtcaccatctcacgcgtctttttcgacttccgttacgacatggggctgcacaacatctccaagagcgtgacatacgatattccggccgacaacaacgctgcagacgaaaacacgaaaaacgaaatacgttttcaccgcagggacaatgtgctgagtttttctttcggagtgttcttttgacagtaaatttcttccttttctttcaatttattcatttatttcccgtaaatttgtgcgcttaataagagaacacagatttatcaaacttatctaataagcagaatgaaaagagatgatttaattttcgaacttatcgaaaaagaacaccaacgtcagctcaaaggcattgaactgattgcatcagagaactttgtaagtgaccaggttatgcaggcaatgggctcctgcctcaccaacaagtatgctgaaggataccccggcaagcgttactatggtggttgtgaggtagtagaccagagtgagcagattgccatcgaccgcttgaaacagattttcggcgcagaatgggccaacgtacagccgcactccggtgcacaagccaatgcagccgtattcctcgccgtgctcaatccgggcgacaaattcatgggactgaaccttgcacacggcggtcacctctcccatggctcactggtcaacacttccggtattatctatactccctgcgaatacaatctgaaccaggaaaccggacgtgtggactatgaccagatggaagaagttgccctgcgcgagaaacccaaaatgattatcggcggcggttctgcttattcccgcgaatgggactacaagcgcatgcgcgaaatcgcggacaagataggtgccatcctaatgattgacatggctcatcctgccggactgattgcagccggtgaactggataaccccgtgaaatatgcccacatcgtgacctccactacccacaagactctgcgtggtcctcgcggtggcgttatcatgatgggtaaggacttccccaacccctggggcaagaaaactccgaagggagaaatcaagatgatgtcccagttgctggattcagccgtattccccggtatccaaggtggtccgctggaacatgtcatcgcagcaaaagccgttgccttcggcgaaatcctgcaaccggaatggaaagaatatgccaagcaggtgaagaaaaacgccgctgtcctggcacaagccttgatagaccgtggcttcaccatcgtttccggcggtacggacaaccactccatgctggtagacctgcgcagcaaatatcccgatttgaccggtaaggttgccgagaaggcgttggtatctgccgacatcaccgtaaacaagaacatggttccgtttgacagccgctcggctttccagacttccggtatccgtctgggtactcctgccatcacaacccgtggtgccaaggaagacctgatgctcgaaattgccgagatgattgaaaccgttctgtccaacgtagacaacgaacaagtcatcgcagaggtacgtgcacgcgtcaatgcgaagatgaaagaatacccgctgtttgcttattaataagcaaacagaattaaaaattaaaaattaaaaattaaaggctgcgcaatgttcgctttgaactgcgcagcctttaatttttaattctaaacgcgctccgcgcgtttagctcagcccttctatatttccgtccacaatatcaatgtgttcggcttgtggtttctttggtaatcccggcatacggagaatttcaccggcgatggctacaatcatttccgcaccgttgttgactacaatatccttgatatggaattcaaagttattgaccgcaccatatatcttcggatcggcagagaaggagtactgcgtcttggcgatacagacagggtaatggctgatacccatctgctctatcagtttaataaccttgcgggaatggagactgtaagtcactacacttgctccgtagaggttgcaggctaccttttctattttacgttccacgcaatcgctctcttcgtaggtgaaggtcagcggttcggatggtttgttctcgatagtatctactaccagattggcaaggtcaacggctccctctcctcctttggcaaaggcgttgttcacggcaaaacctacctcaagcttttcttcgcaatggcggcggatagcttccacctcctcgtccgtatcactggcaaaacggttgaatgccacgatgacctgctggccgaatgaacgcaaattgcgtacatgtttgtccagattgccgaagccctctttcagtccttccatattgggttccttgatgcggtccagactgacaccgccatgcatcttcagtccttgtgcggtagcaacgattatcgtcagcttgggctgtaggccgctcttgcggcacttgatgttgtagaacttctccgcacccaggtcagctccgaaaccggcttccgtcactacataatcgccgaatgtcatggccatttttgtggcaagaatggagttgcaaccatgggcaatatttgcgaacggtcctccatgaacaaaagcagcagagccttcggtagtctgtaccaagttggggttgatagcatctttcaacagtacggtaatggcaccggctactcctaactccttcactgtgaaaggagtaccatcgaaacggaatcccagaataatattttcaatacggcgacggaggtcgtcgaggtctgttgccagacagagaatagccataatttcggaagccggggtaatatcgaagcccgactcctcagtaatgccgttggtgctcggtcccaatccggtgacaatgctccgcaaggaacggtcattcacatcaagtacgcgccgccagatgatttctttcagtccgaagccgtctgcctgatgctggtacaagtaattgtcgagcaaagcggaaatcatgttgtgtgcggaggtaatggcgtgaaagtcgcccgtaaagtgcaggtttatcttctccatgggaagcacctgggcatatcctccaccggcagcaccgcctttcatgccgaagcaaggacccagcgagggttcgcgtaaagccacaatcgctttcttgccaatcttgttcagccccaatgccagcccgatggacacggttgttttaccgatacccgctttcgtagccgtgatagccgtcaccagtatcagattgctcttcttcactttctcttcatcaatcagatgcgtaggaatcttggctatgtaacggccatagttctctacttcgtcacgcgggatatccacactttcagccacctgctttatcttcttcagctctatgctgcgggctatttcaatgtccgatttcatacagagtcttttctttaaataacaactttaatgttttgaaagttgcaaaagtacgaaagatgtggcaaagtacaaaagaataccgtattttcacctgaccacctgcatcttctatctatttgaaccgcgacgtatccactgcctcccgttgcttctccttatatccaccgaatttataggtgaacgatacgccgaattcgcggaagcatgagtaatgattcgtcacattctgcgtcttgaaacggatgcggggagaaatctgtcccgtctcaaaaatatcgttgcaatagaggttgagaatggctttgttcttggcgaagccgtagcgcagggcaatattcacattgcccgacgtaggcaggtcgtagatgccctgaatggctttactatgcacaaatccggtcaccgtcagcttcaagtcgggtttggtggagagagtaaaagtattgttcatctgggcaatgccatagcattgctttctatcgaaaggaatatcccagaaatcaccatccttttcgcgatgccacaagccgatgagggtaagacgagaattcaaccaattcttcaccttaaacggtatagaggcttgtatacctgcttgttgctgataatcaaaattgagtgtcttgtagatttcaaccagacgttcggaagattggtagagcgtctgtacggagtagtccttggtatggttgaaccaagcgctgaagatgtatttgctcttcaaaatataggtcattttaagctcatactcttgcgccggtttcagcaacggattaccatgcagctcagagtatccgccaccgatgtaagagacggcatcctgcaccgcccagtagtcgggatagtccttgtcgctgctcagagagagctgaaggatatgtcccggtgacggcatatagttcaagttgacgatgggataccagtcccactggttccagacgggagtcttgtaatgctccacagccagggaagcgtccaaagcgagtttgtcgccgaaactcttgctgaaacctgcatagatattccaggtctgttcgcggcggcgggacttcatattgcttaaggcatctgaggaggtcagttgttcgccggtttcggggtcgtaataatattggtagctgttgtcgatgctggtagtatagatggctccgtaattcaaatcccaaccttttcccagactgtgctcctgggccagaaagaatttccatcggttgatgcgttggcaatcttcggtgtagaagtcaagttcctcatcctgcatgcggctatgcagcaactggtcggacggggaacggtagtaggtcagttcggcaccggctttgaggccgaaaggggtacgatagtccagacggccgttgtgcagccagtcggtgctattgccatgagttgtggacacctgcgtgcccgtcacgcccgtccagttgtgggaggtggaatagccaccgttatagacgaaactcagctgatggtccttggcgatgttatagtccgcccctaccctgaaattatgggtatggctgcggccacggcccacctcatatgttgtcatggggtgaaccgagccgtctgccagggtgtgcacagcctctttgtcggtagtagagtagccccggccatggctgtgcgagtaaagaaaatctgctgagaatttatttttgctgaagagcaggctggcgcgttcctcaaagccttcgttatgcttctggcgatacttggcatagagttcgccttgccaggagtctgggccgcctgccgattgtttcaaggtgatattgatcagtgcgccacgcacctggtagcgtgcaggggcgttgtacatcacttccgccttctctatgcggctggcagggatgctgcgcagcaaggaatagagctgctcggtgctgagggtggttactttgccgtccaggataacggtgactccctggcctgccaactgcagcccgccattcatctcgatgacgccgggaagctctttcacggcatcgtaggcattatctacggggaggttccggataaggcggggcaggtcgtacaccagcttgccttgcgctgccttaacgatggggcgttcaccggtaatcatcacttccggcaaggtctgataaagactgtccagacgggcatcggtcgtgataaggctgtcggcgctgaggatgcggttgtcgtccgcaccggaggtggttgcagtgccgttgttctcttgtgccgaaagactgatgctcaaagcacagcatacaatagggagtaaatagaatcgtttcatgtccttctttttatttatgtttatattcttcttctgcaaatcttcgtctgcaaagtacggcagaatcagcagaaacttgtgttatcagcggcttaccaagtgttatccagtgttatcgggagtgttatttagtcttatcggatgatagggttcacaatattaatcttacctttgtatgtataaaagtaaccggaaacaaacatgaaactgccattcaaatatattgccatacttgtcatcgtctccctggccggcatcttcgcctaccaagcctactggctgacggggctctaccataccatgcacagtgaaatggaaagggacatcaccgaagccatgcgcatgagcgactataacgaaatgatgatacgcgtggataaaatgaagcaggacgacataaaccacggtgaagtcagcgtatcagccggatacagcgatgacggaaaatcatttgtccgtagcagtaccaccatctcccgtgaagattctttggacaacgctaccctgcacgaaaccttcatgcccaaaggagacagtgtttacgtgacccacccgaacgattcaacccgcgtggaagtcagtgtcaaggactcggacagctctccccaatccgcattgagtgccaaagggggactggatgtgattttgcgcgaccaaaacagtatgctggaactcgccacctacttccagcgcggactgcattcgggactggacatcatttccgaccccgacgtagtgctttatgacagcctgctgacttcattcctgcatgaccgtaacatcaatcttccccataggctgctacatcttcacaaaggcagtaaatgggactctaccattctctatatagatacattggtaaacatcggtacccccggctatgtgcctacctcaaaagccgtggaatataattattctttcgacatcaatacaagtcaaagctaccgtctcatcatggaaccggccggcacgttggtcttgcgacagatgtcgggcattctcaccacatcattcgttattctgatcgtactcgctttctccttctggttcctgatacgcaccatcctgaaacagaagacactggaagagatgaagagcgatttcaccaacaacatcacccacgaactgaaaacccccatcgccgtagcatatgccgccaacgacgctctgctcaacttcaaccaagcggaggaaaaggcccaacgcgacaaatacctgcgtatctgccaggaacagcttcagcgcctcagtggactggttgaacagatactttccatgagtatggaacgccgcaggactttccgcctgcacccggaggagtttgcaatacgtgatattctggaaacgctcatcgaacaacacaagctgaaagcggaaagctccgtccacatatcggtggacatcgaaccggaagatttgagcgtacttgccgaccgtacgcatttcagcaacatcatcagcaacctgatagacaacgccatcaaatattcgcacggagaagccgaagtgaccatccattgccgcaagatggccgtcgaagggcagaatgaacagaccgaaatctccgtcagcgaccacggtatcggtattgctcccgagaagcagaagcacatcttcgacaaattctaccgcgtacccacgggtaatctgcacgatgtgaaaggctatgggctgggattgttctatgtgaagaccatgatagagaagcatggtggcagcgtatcggtaaagagtgagttgggaaaaggaagtacctttacgataaggatatgataacattatttgttagggtactttacattacttgttaaggagctttacattacttgtaacaaaagcgacaattatggaaaagataaccgtacttctggttgaggacgaacagaccctcgccatgattatcaaggacacattggaagggcagaacttcatcatccacaccgcagcagacggtgaagagggattgcgcaagttcttcgacctccgtcccgacgtgctggtggcagacgtgatgatgccccgcatggacggctttgaaatggtgcgccgcatccggcagaccgacaaacagaccccggtactattccttaccgcccgttctgccatcaacgatgtggtggaagggtttgagctgggtgccaacgactacctgaaaaagcctttcggaatgcaggaactcattatccgcataaaggccctggtaggcaaagctttctcctttacagaggaaaagcccaaagaaactaccgtttttgaaatcggtgactaccgtttcaattccgtcactcaacgacttgcttttgcaggcagcaccccgacttcacctaacgcggatacggaagtggaactctcccaccgcgagtccgagatactgaaacgtctttgcgagaaccgtaaccaggtggtcaacacccagaatgtattgctcgacctctggggagacgacagcttcttcaactcccgcagcctgcatgtgttcatcaccaaactgcggcataaactggccggagacgagcgcatccgtatcgtcaatgtgcggggaataggatataaactaatagtaaactaaactaaaactaaactactatttatgagaaagttattattcattacttttatctgttcctcactctgcgcctatgcacagagcgagattccggaagacacaataaagaaccggcctcccgtaaagaaagagcagattcccttttctccaaaagagaacaagcgtacgggccttgatgaaagccagccccaacaaagcctgcagggcgaacagcaggaagagataaatctccatctccctccctccgactatgtggagcccctgccctggacggacatgaaaaagatacacttccagaagaacatctttgaatgggacttccagcgcttcgccgatttcctgctctcgccggaagtcgtactgacgatgtacggcagccataacacctatcctgcaatgggctccatcatgcaggctggcgcaggagtcacttattacagtcccgacggacattgggaattgagcggaggggtatatgccgcccactattccatttctaccccctcctccattgccggcgcccgatatgccaaaagggatgcccctcggggtacccaatgggacgtaggttacaatgcctccgtatcctaccgcatcaatccctacatgcgcctgcatgccttcggccagtattcgggctacgggagaagcaactcctttcatggatatatgaacccgatgtatccgcaaagcggttatggcatggtactggaactgaaagtgacggactggctcgacctcaacggaggcctggaacggagctacgaccccaccaaaatgaaatgggtgacttcgcccgtcttcgcccctaccattcgtataaagaaatagaaataatacaaagatatttccggaaatagagggaaacgagtatctttgttcagtctgcccctatgcggtggacagcaactgaaattgtgaacaaagaactatgaaacgaatcttcttctgcatcatcattttacttgcaggcatgtcatccgtcagcgcacagagcgagatgcctgccgatacggtacgtactgcagtacatggcgaagcgtctcccgaaggcatgtctccgtctgaaaaggagcttctgccggacgtgaagaattacgacggcttcctgctggatatggggctgatgaatctgtctgcccccactcttcccaaattcaccttggagataccggatgccagcaaggactatagccgcatcttccagttgaacccgaacgtgacttattcacaaggcctttcgaacatattctcactcagcaactcccggtatttcagttcaaaccccttcggactgacgggcttctggggctctactgacaacctgcaaatgggaagtttcactttgaagaacggcatgcgcatccatacgtacggcgaatatgacaaggacggctggaaagtgcccaacccttccgcactgccttgggaaaagaacaatttcaaaggggcgttcgagctgaaatcagccaacggagcctttggcatacgcatcgaggtgcagcaaggcaggcatgtgccctattgatgcccacaccatttaacaaccaaagtcaatggcaagaaagaaaatactggtgataggtgccaacggttttaccggcaggcgcatcctggatgatttgtcccgcaacttgtcttatcagacaacgggctgttccctgcacgacgacatctgtccccattcgggcaactatcgctttatccgcacggatatatgcaaccgccaggcgatggaaaagcttttccaggaagtacagccggatgttgtaatcaatacctccgccctctccgtccccgattattgcgaaacgcaccatgcagaagcggatgccgtcaacatcactgccgtagagcatctggcagaatgctgtgaggcgggaggtagccgttttatccatctttccaccgacttcgttttcggtggtgatacggaccgaccctatacggaggaggatattcccgctcccgttaattattacggctacaccaaactggaaggtgagaaacgtatcgctgccgtttgcaaggattatgccatcgtgcgtgtagtggtggtgtacggtgcctccctgcccggacagcatggcaatgtgctccaactggtggcaaacagattaaggaacaatgaggaagtgttcgtcgtgtccgaccaatggcgtacgcccaccttcgtgggagacgtgtcgcaaggagtggagaagctgataaatcacccgcaaaacggcatctaccacctctgtggcagcgagtgcctgaccattgcagacatcgcttattgggtagcggacgtattgggactgaatcgctcgctcatccgtcccgtcactacgaaggagatgaatgaaaagacgccacgtccccgtttcagcgggctgagtatagaaaaggtacgccgggaactgggatatcgaccgcatacgctggaggaaggaataaagctgatgttcggatagtaaataatgcaagttcggatggcagcagattcgactacagcaactccggctctgccagtcctttctctttgcgatacacacgtaccatctccagaatcacatctccatatttctccacccctttctttccgaaatacggaatgcgtacaagcatggccttatccgaaggaagcagattgctgatacccagaattgccttctgctgaatgacggtatatacgggcaatcctaatgcggaagcttctgcattgcgccatgccaccaagcggttgtaaagttccggatgcaacacatccgtgggtacttcaacagccgcagcatcgcgtttccgctcacgcggacgtttctctttatcagcctgcttactgcttccctgcccttctttggcagcagcacttctccctttgcctttacccttctgcgaagccgaatcgtcaatggaaagcagtgctttctgcttcaagtatcctgccacatggaaaccattctccagcacataatccagcaaatcagtcttcatgtcaaacacttcctccagctcctccatggcatcccggagcttcttcttcaactctttattatcagaagttaccgtactcgccatcaccgcatccagcggttgcaactgctcttgaaaataagtggcggcagagtgtatgcgcccctgcaaagtcgggtcggctgcatagtcctgcgcagtatcaatcaggcgggtatactggatactgaacttctgggctactttcgtcactttgtcgtgaaaacgttccatttcctccttacaggctgcgagttgcttgggaaagagcttgtacaagtgttcgtctatcagccgcacataccgccgcaaagcctgctccatgggctggaaatcgaacaagcccgacagcagttccaggaaataggtctgctgcaaggaacggaagcgtttctcgtccggctcgtttctccgtgcctccatcgtgaaggtatctactgcatggtcactgataacggcctttgcagaaagcggggcactgagcaccactccctccaatgtcttgcagcggctcagagccacataggtctgcccatgcgcaaaggaggcactggcatcaatcacggcacgttcaaacgtcagtccctggcttttgtgaatggtaatcgcccacgccagcttcaacggatactgccggaatgttccttcaatatcttctgtaatctccttggtttcctcatcaagcacgtatttggcattcgtccactcttcctcttgaagtaagaaggtagcgtcgcttcccttactgcgcacttcaattccatctgccgacacggctgtcacctctccaatcatgccattgtagtaacggtgctcaccggaggtgtcgttcttcacaaacattacctgggcaccgcgtttcagttccagtacttcatccgtgggataggaatattcgggaaactttccgtcaatcttggcacgaaaggcatacgagcgtcccggaagttgttccagctcatggtcattaatccgttgggcctgataattgtgggtcaccaggcggatgtatccttcttctttatctggtacgaaattgggaatataccggcggttcaaggcttccagcacttgcccgtcacaacggttttcgcgaatgcggttcagtaattcaagaaaagtcccatcgttctgccgatagactttctttagttctatggtgcaatattccgtctgcttcaaggcctggctggagaagaaataaggcgtgtcatagtatttacgcagcatctgccactcatcgtctttcactacgggagcaagctgctgaaggtcgccaatcatcagcagttgcacgccgccaaagggtttgttccggtcgcggaaccgcctcaagacggcatccaccgaatcgagcaagtcggcacggaccatactgatttcatcgatgaccaataaatctatactgcgtataatgttgattttctctttcccgtaacggaaacggtaagatgctttgccatccgcgctgaatgagctttcgggcacataaggagcgaaaggtacttggaaaaaggagtggatggtgacaccgcctgcattgatagcggcaattcccgtcggtgcaagtacaatcatccgtttcggactctctgccctcagttttcgcaggaaagttgtcttaccggtacctgccttgccggtcaaaaaaagatgagtgcctgtgttttcaatgaattgccatgcaagcgctatttcgggattattctccat

SEQ ID NO: 651 - DNA, 14046 bp, unidentified
  source 1..14046: mol_type = unassigned DNA
atgatttatccgctgcccgccgtattggtgagctgcggaagcactccggaggaatataacattctgactatcgcatggacggggacgatttgtacgaacccgcccatgtgctacatctccgtacgccccgaacgccactcctacgacatcatcaagcggaatatggaattcgtcatcaatctcaccacgaaagacatggcccgtgccacggactggtgtggcgtacgctccggaaaggactacaacaaattcgaggaaatgcatctgacaccggggaaaagcaccgtagtcagcgcgcctcttatcgaggaatcaccgctttgcatagaatgccgggtaaaggagattatggctctcggttcgcacgacatgtttatagcggatgtggtaaatgtacgtgccgatacccgtaatctgaaccctgaaaccggcaaactggaactggcggaaacgaatcccttggtctatgtgcacggtggatattatgagctgggagaaaagataggcaaattcggatggtcagtagagaaaaagaagtaataatgcgataaaggttttaagagatggagttgcgacgaatcttgatgggcttatatctgttggccttccccgccatgatgtggggacagactccggttgtgcccggtactgccgacgaagagcattccggacaccacaaggaaactccggtcaatttcggtttcaaaggcggtttcacctcttccttgttccttgtatcccagttcagcgtcaacggagtgcccattgacgaagtgcagaacaattacaaaataggatatttcggttcccttttcatgcggataaacttcgaccgccacttcctgcaaccggaaatatcctacaacatcaaccggtgcaacatcaccttcgagaaacctctgcccgaagacgccgcatcaggagcccggccggaggaagcctccattacatcgtccatccacagtatagacatccccgtcatctacggatacaacttcatcaaggaggggccgtacagccttgccgtctttggaggacccaaagtgcgctatatatgggacaggaaaagtgacatcgacttcgagaatttcgaccaggtgaatatccgtgaaaggctgcgtccgctcaatctcagtttcaccgtcggcgtatccgtcaccatctcacgcgtctttttcgacttccgttacgacatggggctgcacaacatctccaagagcgtgacatacgatattccggccgacaacaacgctgctgacgaaaacacgaaaaacgaaatccgttttcaccgcagggacaatgtgctgagtttttctttcggagtgttcttttgacagtaaatttcttccttttctttcaatttattcatttatttcccgtaaatttgtgcgcttaataagagaacacagatttatcaaacttatctaataagcagaatgaaaagagatgatttaattttcgaacttatcgaaaaagaacaccaacgtcagctcaaaggcattgaactgattgcatcagagaactttgtaagtgaccaggttatgcaggcaatgggctcctgcctcaccaacaagtatgctgaaggataccccggcaagcgttactatggtggttgtgaggtagtggaccagagtgagcagattgccatcgaccgcttgaaacagatcttcggcgcagaatgggccaacgtacagccgcactccggtgcacaagccaatgcagccgtattcctcgccgtgctcaatccgggcgacaaattcatgggactgaaccttgcacacggcggtcacctctcccatggttcactggtcaacacttccggtattatctatactccctgcgaatacaatctgaaccaggaaaccggacgtgtggactatgaccagatggaagaagttgccctgcgcgagaaacccaaaatgattatcggcggcggttctgcttattcccgcgaatgggactacaagcgcatgcgcgaaatcgcggacaagataggtgccatcctaatgattgacatggctcatcctgccggactgattgcagccggtgaactggataaccccgtgaaatatgcccacatcgtgacctccactacccacaagactctgcgtggtcctcgcggtggcgttatcatgatgggtaaggacttccccaacccctggggcaagaaaactccgaagggagaaatcaagatgatgtcccagttgctggattcagccgtattccccggtatccaaggtggtccgctggaacatgtcatcgcagcaaaagccgttgccttcggcgaaatcctgcaaccggaatggaaagaatatgccaagcaggtgaagaaaaacgccgctgtcctggcacaagccttgatagaccgtggcttcaccatcgtttccggcggtacggacaaccactccatgctggtagacctgcgcagcaaatatcccgatttgaccggtaaggttgccgagaaggcgttggtatctgccgacatcaccgtaaacaagaacatggttccgtttgacagccgctcggctttccagacttccggtatccgtctgggtactcctgccatcacaacccgtggtgccaaggaagacctgatgctcgaaattgccgagatgattgaaaccgttctgtccaacgtagacaacgaacaagtcatcgcagaggtacgtgcacgcgtcaatgcgaagatgaaagaatacccgctgtttgcttattaataagcaaacagaattaaaaattaagaattaaaaattaaaggctgcgcagttcaaagcgaacattgcgcagcctttaatttttaattcttaatttttaattctaaacgcgctccgcgcgtttagctcagcccttctatatttccgtccacaatatcaatgtgttcggcttgtggtttcttgggtaatcccggcatacggagaatttcaccggcgatggctacaatcatttccgcaccgttattgaccacaatatccttgatgtggaactcaaagttgttgactgcaccgtatatcttcgggtcggcagagaaggagtactgcgtcttggcaatacagacggggtaatggctgatacccatctgctctatcagtttgataactttgcgggagtggagactgtaagtcactacgcttgccccgtagaggttgcaggctaccttttctattttacgttccacgcaatcgctctcttcgtaggtgaaggtcagcggttcggatggtttgttctcgatagtatctactaccagattggcaaggtcaacggctccctctcctcctttggcaaaggcgttgttcacggcaaaacctacctcaagcttttcttcgcaatggcggcggatagcttccacctcctcgtccgtatcactggcaaaacggttgaatgccacgatgacctgctggccgaatgaacgcaaattgcgtacatgcttgtccagattgccgaagccctctttcagtccttccatattgggttccttgatgcggtccagactgacaccgccatgcatcttcagtccttgtgcggtagcaacgattatcgtcagcttgggctgtaggccgctcttgcggcacttgatgttgtagaacttctccgcacccaggtcagccccgaaaccggcttccgtcactacataatcgccaaatgtcatggccatttttgtggcaagaatggagttgcaaccatgggcaatatttgcgaacggtcctccatgaacaaaagcagcagagccttcggtagtctgtaccaagttggggttgatagcatctttcaacagtacggtaatggcaccggctactcctaactccttcactgtgaaaggagtaccatcgaaacggaatcccagaataatattttcaatacggcgacggaggtcgtcgaggtctgttgccagacagagaatagccataatttcggaagccggggtaatatcgaagcccgactcctcggtaatgccgttggtgctcggtcccaatccggtgacaatgctccgcaaggaacggtcattcacatcaagtacgcgccgccagatgatttctttcagtccgaagccatccgcctgatgctggtacaagtaattgtcgagcaaagcggaaatcatgttgtgtgcggaggtaatggcgtgaaagtcgcccgtaaagtgcaggtttatcttctccatgggcagcacctgggcatatcctccaccggcagcaccgcctttcatgccgaagcaaggacctaacgagggttcgcgtaaagccacaatcgctttcttgccaatcttgttcagccccaatgccagcccgatggacacggttgttttaccgatacccgctttcgtagccgtgatagccgtcaccagtatcagattgctcttcttcactttctcttcatcaatcagatgcgtaggaatcttggctatgtaacggccatagttctctacttcgtcacgcgggatatccacactttcagccacctgctttatcttcttcagctctatgctgcgggctatttcaatgtccgatttcatacagagtcttttctttaaataacaactttaatgttttgaaagttgcaaaagtacgaaagatgtggcaaagtacaaaagaataccgtattttcacctgaccacctgcatcttctatctatttgaaccgcgacgtatccaccgcctcccgttgcttctccttatatccaccgaatttataagtaaacgatacgccgaattcgcggaagcatgagtaatgattcgtcacattctgcgtcttgaaacggatgcggggagaaatctgtcccgtctcaaaaatatcgttgcaatagaggttgagaatggctttgttcttggcgaagccgtagcgcagggcaatattcacattgcccgacgtaggcaggtcgtagatgccctgaatggctttactatgcacaaatccggtcaccgtcagcttcaagtcgggtttggtggagagagtaaaagtattgttcatctgggcaatgccatagcattgctttctgtcgaaaggaatatcccagaaatcaccatccttttcgcgatgccacaagccgatgagggtaaggcgagaattcaaccaatccttcaccttaaacgggatagaggcttgtattcctgcttgttgctgataatcaaaattgagtgtcttgtagatttcaaccagacgttcggaggattggtagagtgtctgtacggagtagtccttggtatggttgaaccaagcgctgaagatgtatttgcttttcaaaatataggtcattttcagctcatactcttgtgccggtttcagcaacggattaccatgcagctcagagtatccgccgccgatgtaagagacggcatcctgcaccgcccagtagtcgggatagtccttgtcgctgctcagagagagctgaaggatatgtcccggtgccggcatatagttcaagttgacgatgggataccagtcccactggttccagacgggagtcttgtaatgctccacagccaaagaagcgtccaaagcaagtttgtcgccgaaacttttgctgaaacctgcatagatattccaggtctgctcgcggcggcgggacttcatattgctcaaggcatccgatgaggtcagttgtccgccggtttcggggtcataataatattggtagctgttgtcgatgctggtagtatagatggctccgtaattcaagtcccaaccttttcccagactgtgctcctgggccagaaagaatttccatcggttgatgcgttggcaatcttcggtgtagaagtcaagttcctcgtcctgcatgcggctatgcagcaactggtcggacggggaacggtagtaggtcagttcggcaccggctttgaggccaaaaggggtacgatagtccagacggccgttgtgcagccagtcggtgctattgccatgagttgtggacacctgcgtgcccgtcacgcccttccagttgtgggaggtggaatagccaccgttatagacgaaactcagctgatggttcttggcgatattatagtccgcccctacccggaagctatgggtatggctacggccacggcccacctcatctgttgtcatggggtgaaccgagccgtctgccagagtgtgcacagcctctttgtcggtagtagagtagccctggccatggctgtgcgagtaaagaaaatctgctgagaatttatttttgctgaagagcaggctggcgcgttcctcaaagccttcgttatgcttctggcgatacttggcatagagttcgccttgccaggagccggggccgcctgccgattgtttcagggtgatattgataagtgcgccacgcacctggtagcgtgcaggggcgttgtacatcacttccgccttctctatgcggctggcagggatgctgcgcagcaaggaatagagctgctctgtgctgagggtggttactttgccgtccaggataacggtgactccctgacctgccaactgcagccctccattcatctcgatgacgccgggaagctctttcacggcatcgtaggcattatctacggggaggttccggataaggcggggcaggtcgtacaccagcttgccttgcgctgcctttacgatggggcgttcaccggtaatcatcacttccggcaaggtctgataaaggctgtccagacgggcatcggtcgtaataaggctgtcggcgctgaggatgcggttgtcgtccgcaccggaggtggttgcagtgccgttgttctcttgtgccgaaagactgatgctcaaagcacagcatacaataggaagtaaatagaatcgtttcatgttcttctttttatttatgtttatattcttcttctgcaaatcttcgtctgcaaagtacggcagaatcagcagaaacttgtgttatcagcggcttaccaagtgttatccagtgttatcgggagtgttatttagtcttatcggatgatagggttcacaatattaatcttacctttgtatgtataaaagtaaccggaaacaaacatgaaactgccattcaaatatattgccatacttgtcatcgtctccctggccggcatcttcgcctaccaagcctactggctgacggggctctaccataccatgcacagtgaaatggaaagggacatcaccgaagccatgcgcatgagcgactataacgaaatgatgatacgcgtggataaaatgaagcagggcgacataaaccacggtgaagtcagcgtatcagccggatacagcgatgacggaaaatcatttgtccgtagcagtaccaccatctcccgtgaagattctttggacaacaccaccctgcacgaaaccttcatgcccaaaggagacagtgtttacgtgacccacccgaacgattcaacccgcgtggaagtcagtgtcagggactcagacagctctccccaatccgcattgagtgccaaagggggactggatgtgattttgcgcgaccaaaacagtatgctggaactcgccacctacttccagcgcggactgcattcgggactggacatcatttccgaccccgacgtactgctttatgacagcctgctgacttcattcctgcatgaccgtaacatcaatcttccccataggctgctacatcttcacaaaggcagcaaatgggactctaccattctctatatagatacattggtaaacatcggtacccccggctatgtgcctacctcaaaagccgtggaatataattattctttcgacatcaatacaaatcaaagctaccgtctcatcatggaaccggccggcacgttggtcttgcgacagatgtcgggcattctcaccacatcattcgttattctgatcgtactcgctttctccttctggttcctgatacgcaccatcctgaaacagaagacactggaagagatgaagagcgatttcaccaacaacatcacccacgaactgaaaacccccatcgccgtagcatatgccgccaacgacgctctgctcaacttcaaccaagcggaggaaaaggcccagcgcgacaaatacctgcgtatctgccaggaacagcttcagcgcctcagtggactggttgaacagatactttccatgagtatggaacgccgcaggactttccgcctgcacccggaggagtttgcaatacgtgatattctggaaacgctcatcgaacaacacaagctgaaagcggaaagctccgtccacatatcggtggacatcgaaccggaagatttgagcgtacttgccgaccgtacgcatttcagcaacatcatcagcaacctgatagacaacgccatcaaatattcgcacggagaagccgaagtgaccatccattgccgcaagatggccgtcgaagggcagaatgaacagaccgaaatctctgtcagcgaccacggtatcggtattgctcccgagaagcagaagcacatcttcgacaaattctaccgcgtacccacgggtaatctgcacgatgtgaaaggctatgggctgggattgttctatgtgaagaccatgatagagaagcatggtggcagcgtatcggtaaagagtgagttgggaaaaggaagtacctttacgataaggatatgataacattatttgttagggtactttacattacttgttaaggagctttacattacttgtaacaaaagcgacaattatggaaaagataaccgtacttctggttgaggacgaacagaccctcgccatgattatcaaggacacattggaagggcagaacttcatcatccacaccgcagcagacggtgaagagggattgcgcaagttcttcgacctccgtcccgacgtgctggtggcagacgtgatgatgccccgcatggacggctttgagatggtgcgccgcatccggcagaccgacaaacagaccccggtactgttccttaccgcccgttccgccatcaacgatgtggtggaagggtttgagctgggtgccaacgactacctgaaaaagcctttcggaatgcaggaactcattatccgcataaaggccctggtaggcaaagctttctcctttacagaggaaaagcccaaggaaaccaccgtttttgaaatcggtgactaccgtttcaattccgtcactcaacgacttgcttttgcaggcagcaccccgacttcacctaacgcggatacggaagtggaactctcccaccgcgagtccgagatactgaaacgcctttgcgagaaccgcaaccaggtggtcaacacccagaacgtattgctcgacctctggggagacgacagcttcttcaactcccgcagcctgcatgtgttcatcaccaaactgcggcataaactggccggagacgagcgcatccgtatcgtcaatgtgcggggaataggatataaactaatagtgaactaaactaaaactaaactactatttatgagaaagttattattcattacttttatctgttcctcactctgcgcctatgcacagagcgagattccggaagacacaataaagaaccggcctcccgtaaagaaagagcagattcccttttctccaaaagagaacaagcgtacgggccttgatgaaagccagccccaacaaagtctgcagggcgaacagcaggaagagataaatctccatctccctccctccgactatgtggagcccctgccctggacggacatgaagaagatacactttcagaaaaacatctttgaatgggacttccagcgtttcgccgatttcctgctctcgccggaagtcgtactgacgatgtacggcagccataacacctatcctgcaatgggctccatcatgcaggctggcgcaggagttacttattacagtcccgacggacattgggaattgagcggaggggtatatgccgcccattattccatctcccaaccttcatccattaccggtgcccagtatgccaaaagggatgccccccgaggtactcaatgggacataggctacaatgcctccgtatcctaccgcatcaatccctacatgcgcctgcatgccttcggccagtattcgggctacgggagaagcaactcctttcatggatatatgaacccgatgtatccgcaaagcggttatggcatggtactggaactgaaagtgacggactggctcgacctcaacggagggatggaacgaagatacgaccccaccaaaatgaaatgggtaaattcgcccattttcgcccctaccattcgtataaagaaatagaaataatacaaagatatttccggaaatagagggaaacgagtatctttgttcagtctgcccctatgcggcagacagcaactgaaattgtgaacaaagaactatgaaacgaatcttcttctgcatcatcattttacttgcaggcatgtcatccgtcagcgcacagagcgagatgcctgccgatacggtacgtactgcagtacgtggcgaagcgtctcccgaaggcatgtctccgtctgaaaaggagcttctgccgggcgtgaagaattacgacggcttcctgctggatatggggctgatgaatctgtccacccccactcttcccaaattcactttggagataccggatgccagcaaagactatagccgcatcttccagttgaacccgaacgtgacttattcacaaggcctttcgaacatattctcactcagcaactcccggtatttcagttcaaaccccttcggactgacgggcttctggggctctaccgacaacctgcaaatgggaagtttcactttgaagaacggcatgcgcatccatacgtacggcgaatatgacaaggacggctggaaagtgcccaacccttccgcactgccttgggaaaagaacaatttcaaaggggcgttcgagctgaaatcagccaacggagcctttggcatacgcatcgaggtacagcagggcagacacgtgccctattgatgcccatcacttaacaacagaatcaatgacaagaaagaaaatactggtgataggcgccaacggttttaccggcagacgcatcctggatgatttgtcccgcaacttgtcttaccagacaacgggctgttccctgcacgacgacatttgtccccattcgggcaactatcgctttatccgcacggatatatgcaaccgccaggcggtggaaaagcttttccaggaagtacagccggatgttgtaatcaatacctccgccctctccgtccccgattattgcgaaacgcaccatgcagaagcggatgccgtcaacattactgccgtggagcatctggcagaatgctgtgaggcgggaggcagccgttttatccatctttccaccgacttcgttttcggtggtgatacggaccgaccctatacggaggaggatattcccgctcccgttaattattacggctacaccaaactggaaggtgagaaacgtatcgctgccgtttgcagggattatgccatcgtgcgtgtagtggtggtgtacggtgccgccctgcccagacagcatggcaatgtgctccaactggtggcaaacagattaaggagcaatgaggaagtgttcgtcgtatccgaccaatggcgtacgcccaccttcgtgggagacgtgtcgcaaggagtggagaagctgataagtcatccgcaaaacggtatctatcatctctgtggcagcgagtgcctgaccattgcagacatcgcttatcgggtagcggacgtattggggctgaatcgctcgctcatccgtcccgtcactacgaaggagatgaatgaaaagacgccacgtccccgtttcagcgggctgagtatagaaaaggcaagccgggaactggggtatcagccgcgcacgctggaagaaggaataaagcagatgttcggatggtaaataatgcaggtgcggatggcagcagattcgactacagcaactccggctctgccagtcctttctgtttgcgatacacacgtaccatctccagaatcacatctccatatttctccacccctttttttccgaaatacggaatgcgtacaagcatggccttatccgaaggaagcagattgctgatgcctagaattgccttctgctgaatgacggtgtatacgggcagccctaatgcggaagcttctgcattgcgccatgctaccaagcggttgtaaagttccggatgcagcacatccgtgggtacttcaacagccgcagcatcgcgtttccgctcacgcggacgtttctctttatcagcctgcttactgcttccctgcccttctttggcagaagcacttctccctttgcctttacccttctgcgaagccgaatcatcaatggaaagcagtgctttctgcttcaagtatcctgccatatggaaaccattctccagcacataatccagcaaatcagtcttcatgtcaaacacttcctccagttcctccatggcatcccggagcttcttcttcaactctttattatcagaagttaccgtactcgccatcaccgcatccagcggttgcaactgctcttgaaaataagtggcggcagagtgtatgcgcccctgcaaagtcgggtcggctgcatagtcctgcgcagtatcaatcaggcgggtatactggatactgaacttctgggctactttcgtcactttgtcgtgaaaacgttccatttcctccttacagactgcgagttgcttgggaaagagcttgtacaagtgttcgtctatcagccgcacataccgccgcaaagcctgctccatgggctggaaatcgaacaagcccgacagcagttccaggaaataggtctgctgcaaggaacggaagcgtttctcgtccggctcgtttctccgtgcctccatcgtgaaggtatctactgcatggtcactgataacggcctttgcagaaagcggggcactgagcaccactccctccaatgtcttgcagcggctcagagccacataggtctgcccatgcgcaaaggaggcactggcatcaatcacggcacgttcaaacgtcagtccctggcttttgtgaatggtaatcgcccacgccagcttcagcggatattgccggaatgttccttcaatatcttctgtaatctccttggtttcctcatcaagcacgtatttggcattcgtccactcttcctcttgaagtaagaaggtagcgtcgcttcccttactgcgcacttcaattccatctgccgacacggctgtcacctctccaatcatgccattgtagtaacggtgctcaccggagatgtcgttcttcacaaacattacctgggcaccgcgtttcagttccagtacttcatccgtgggataggaatattcgggaaactttccgtcaatcttggcacgaaaggcatacgagcgtcccggaagttgttccagctcatggtcattaatccgttgggcctgataattgtgggtcaccaggcggatgtatccttcttctttatctggtacgaaattgggaatataccggcggttcaaggcttccagcacttgcccgtcacaacggttttcgcgaatgcggttcagtaattcaagaaaagtcccatcgttctgccgatagactttctttagttctatggtgcaatattccgtctgcttcaaggcctggctggagaagaaataaggcgtgtcatagtatttgcacagcatctgccactcatcgtctttcactacgggagacagctgctgtaagtcgccaatcatcagcagttgcacgccgccaaagggtttgttccggtcgcggaaccgcctcaagacggcatccaccgaatcgagcaagtcggcacggaccatactgatttcatcgatgaccaataaatctatgctgcgtataatgttgattttctctttcccgtaacgaaaacggtaggttgccttgccatctgcgctgaatgagctttcgggcacataaggagcgaaaggtacttggaaaaaggagtggatggtgacaccgcctgcattgatagcggcaattcccgtcggtgcaagtacaatcatccgtttcggactctccgccctcagttttcgcaggaaagttgtcttaccggtacctgccttgccggtcaaaaaaagatgagtgcctgtgttttcaatgaattgccatgcaagcgctatttcgggattattctccat

SEQ ID NO: 652 - DNA, 24547 bp, unidentified
  source 1..24547: mol_type = unassigned DNA
ccctcgagggacttgaggaggaagctaagcagtttacaggattttttgctgcacagggagcggatcagtgcggcttctgtaatccgggttatattgtaaatattgtggcgcttctgagagaaaatcctgacccgactgatgaggaaattcttgaatatctttcaggaaatctgtgccgttgtacaggatatcagagtcagctgcgctcaatcagaaatttcttaaacagtaagaaggagggcgcacctcttaatcttgaggcaggcgtctatggagaggatatcggaaaggagtggcaggatgagcacaaatcaaactaatgaaaacagcttcaaccgcgccagaagggattaccacgcggttggaaaatgtatacctaaaaaggactcgagccagcttttactcggaaagccggtatttaccgatgacatcacaccgcgtgatgcgcttgtcataaagcttcttagaagcccatatgcaaatgcaattgtcgaggatgtaaagacagatatcgctcttaaggtgccgggcatggtcgcagtatacacctgggaggatgttccgaaaaagcgtttttctatcgcaggccagacatttccggagccgtcaccatatgacagattaatccttgaccgccatgtgagaagcgtaggtgatgccgtcgctatagtggtcggagaatctgaaaaggcagtggacaaggctcttaacatgataaaagtaaagtacacggtgcttgagccggtgcttgacttcagaaagtcgctggataacaaggtgctcgtgcatcctgaggatgactggtcatccagcatagatacaggcgatgtaaagcgcaatctcattcaccacgaggaggatgagcatggaaacgtggagaaaattctgtcagagtgcgatgagataattgagcacacatatcgcataaaggcagcgcagcaggcatatatggagacctgcagggcatactgtgagatagacagatatggcagacttcactgtatcagctcgacacagatagttttccacctgcgccgaatactggcaaatgcactcgatattccaaagtctatggtgcgcgctgaaaagccgcgtatcggaggcggtttcggtgccaagcagacagcagtctgtgaggtgtatccggcatttgttacctggaagacaaagcgtccgagcaagataatctacagcagaaaagagtgtcagactatcgcgtcaccgcgtcatgagatggaagtcaccgtgcgtcttggagcgatgaaggatggtcatataagggcgatagatctttatacgctgtcaaatggtggagcatacggagagcatagcactacaacagtaggactttccggtcataaatcgcttccactttatacaggaggctgcgaggcaaccagattttcgtgcgatgttgtgtatacaaacgtgcaggcggcaggagcatacagaggctatggagccacacagggtatatttgcacttgaatcaatcgtcaatgagcttgcagaaaagctgcatatagacccggttgaacttcgtttgaaaaatattgtacgcgagggcatgtttatgccggcatattttggtgagacagcaaatgcatgtgcacttgacagatgtataatgcactgcgcggacaatttccactgggcagaaaagtatcctgtccgcgacatgggaaatggcaaggttcgtgcggcaggcatggcacttgcaatgcagggctcctgcatatccaatgtagatgtcggctcgtgtaccttaaagctttcagactgtggcacctacaatatgatgataggtgcggcagacatgggaacaggctgtgatacaatacttgcgcagatggcggctgaggtactcgactgcgagccggatgatataacagtgtttggagcggatacagatgcttctccttatgactcgggttcatatgcctcatcaaccacatacatcacaggaatggccacacagaatgcagcacttgagcttcgtgaaaatataaagaaaatcggtgcacagctgctgggctgtgctgcatcagaggtggatttcgacggtaaagaggtgtatatcataaatccggacggtgcagacaatggggcagtttccgtaagtctttccgatatagcaacaaaagcacaggtcaacaacacgataccagtagatgtcaccgccacatattcatcacctgtttcaccgccaccatacatggtaggcatggtcgagatagagcttgataaggagacaggagcagttaaaatacttgattatcaggctgtcgtggactgtggaatcccggtcaatccaaacctcgcgcgtgtacagacagagggtggcataggtcagggaatcggcatggcactttatgagaatgtcacctacaatgccggtggtaaaatcgcagaaaatgatttcatgcagtacaagataccgacacgacaggatgtgggacatatcaacgtcgaatttgagacaagctatgagccttcaggcccatttggagtcaagtcaatcggcgagatagttatcaatacaccggctcctgcgctggcacatgccatttatcgcgcaacaggcgtatggcacaggacagttccgtttaccccggagaaaatacttatgggaatggcagaccctgactggcacgaaaaggacctaagagtgaaatgattcatatcatatacatggcggctggaaacagccgccgttttggaagtaacaagctgttttatgagctggatggaaaacctatgtacaggcatctgcttgaacgtttgatagaaattaaagatagatataataaattaaaaaatgcagaatcgaataacccggtcatagatataaccgttgttacacgttaccgggaaatactggactactgctcatctatccccgattgccatgaagtcttaagtccggacagcgaaaaaggcatatcctacaccataaaagcaggaattatggcggtgcaggagcagaaaaagactggtatgcaggactactacatgtttgcagtagctgaccagccatatttaaaaagtcaaagcatgattaaattaatagacaaagtgcttgaaaataaagggaataagcgattagtattttcgcttcgctgtggaaatgctgtaggcaatccgtgtgtatttcattcatcactcatcccacagcttttatcactggagggtgataagggtggcagaagtgtggcaaagaagtatgactgtgtatatgtggatatcgcagatgaacgtgagctgatggatatagatatcttatcaaattcaaaacatactgtgacattataaaagctattatgaaagagcaatgtatcagtgcataccgaatgtatattttattcaaattcccatatactacctccaaagcatgaatgcaaatgcaaaaaagtaaccggaggacaataaagtgaaaatcacaggattgaccagaagagtagattccctcggcagaatagtcataccaaaggagcttcgcaggatgctgcatataaaagagggaagcccactggaaatatatatggatgcggacgagacgatagtgctaaagaagtattcgcaggttggaagcctgaagaatatatcacaggcatatgcacagagcctgtcaaaggtaacaggagccatggtatgtgtggcggatagggatgagataatagcggcagccggcaaaaaccataaaaattatataggcaaggctttgtcaaaagaactcgagaatattatggataagagaaaaagtgcattgtacagtaaaaaagacgataccctgatacctgtggtaaaggacgataaagctgactgtgaagcgcaggcaatagcagtaatagtgcatgatggtgatagtgcgggagccgttatactgtgtgcttacgatgaaaaagccgataagtctgagattgccgaaaagctggcgggtgcagcagcagaattcctggctgaccagcttggctagagatagtaaaaagcattgtaaaaactatttacttgactacaacagtaataaagatgtaaaatagcttgataaagggagcaattagcttccttttgtgctataaaggtataatagaaaattaagcaattattaattatctgatgtagaggcattgtagtataatagacagtacatattggatatagttgtcaattatctataaagtatgccgatatacaatggtataccgatagtttggaggtaacgtttagaaatggcaaaacagaaaaagaaaaagaagaaaaagcagcatcgcgttttctggtttttcataaagcttcagatttttctgatggtactgattcttggtggattatgcttttattactttggaggctatgcagacaaggttgcgaagcttcactcagaggcggtagagctcgtgcagaaatctgacaaaaacacatttttaccggcgcgcacgagtacactctacgatacaaacggtgatgagatatccgagacggccactaccaaaaaggctgactatgtgaagtatgaggatataccgcagaacttcgtaaactgcatggtcagtatcgaggacaagaagttctataagcacaatggtgtggacctaaaggcaatagtgcgtgccgcaaagtcaattataaaaaacaagagaattacccagggtggcagtaccatcacgatgcagctcgcccgaaatatttatctggatacgaacaagaactggcagcgaaaagtcaaggaaatgttcatagcgatggagctggaaaagaaatattccaagaacgatattatggagttctacttgaataatgtctatttcatgaacggatattatggtattcaggcagcgtgccatggctattttaactgtgagctttcggatcttgatttgtcgcagactgcttttttgtgtgcgattccgaacagcccgacatactatgacccgataaacaacaaggatcatacattgacacgtcgcaatcttatattgaaaaatctaagggaagatggcaaaatcacacagcaggaatatgaggccgctataaacgaggagataaccctcaacatgcctgagaaggatgacacggtcaagtacaattatgtggatacctatgcatattactgcgctacgagggcgctcatggagaatgagggcttcaagttcaagtattactttgactcagacgatgaagaaaaggagtatgatgcttcatatgatgagatgtattcatattgtcagaaaaagctctactcagacggttacaagatttatacatcaattgatctgactatgcagcagcagcttcaggattcaattgaccttacgcttttggactttacagacacgaccgatgatggcacatttaagctgcagagtgctgcaacctgtatagacaacgacacaggcgaggtggttgcaatagttggtggacgaagccaggatgcggtcagtcatacgctaaaccgtgctttccaaagccatcgtcagccgggaagctcaatcaagccgctcattgtgtatacaccatcatttgagcgtggtaagacaccggataccatcgtaaatgaccacaagtttgatggaggaccgtctaactcgggtgattcatattacggtgatgtgactatcaggtttgccgttcaaaagtcactgaatactgtagcatggcagctatatgatgagctcacgccaaaggtaggcttacagtatctcaaggatatgaattttaccaatattgtaaaggatgactatgtcacagcaacagcacttggaggttttacaacaggtgtatccacactggagatggcatctgcatattcaacacttgagaacgatggaatgtacaggaatccgacatgtattaagtcgattgtggattctgacaacaatatcatatatacatcatcgcagaaggataccgtcatatatacagagacagcatcacgtatgatgacagatgtcatgacagatgttatgaaatcaggaaccggacgtagcgctaatctggacaatggcatgccttgcgccggcaaaaccggaaccacaaacgataagaaggatggctggttctgtggctttaccagatactacaccacatgtgtatgggtaggctgtgatatgcctgagtcagtcaaaaagctgacaggaagctcttacccggcagaaatatggaagaactacatggatcagatacatgctgaccttacaccaatagatttcctgccatatgcccaaatatcggatgattatcaggacagccaggagacacaggatacacctgccgatgaccagacgcagaataatcctacagatcagacagtgaccacacctgatgcaggaaccacaacaccggataagaccacaacaaacccgaataagacagatgctgctggtggcaacacaggtggaaataccggagacaatacagacggaacaacaggcggaaataccggagaaaacaacggtggtaacacaggcggaaatggtggacaaaacaacggtggcaacacaggcggaaataccggagaaaacaacggtggtaacacaggcggaaataccggagaaaataatggtggcaacacaggtgggaataccggggacaacacaggtggagctaccggtggtaccaccggaggcggagcccagtagatttttctttgcagtgctgtcgggagttgtgttctttgcagcatacgcacctgtcacgataggaaacaagacgatagatgcgctcatatattcagtgacctacaatggttcataccttgctgcagagggaattatcacaatcatagtgatatcaatcccaccggttaagaaggcactcgactatgtgaagcagatggcgaacagccggtagataatctatatctaaacaattaaattatgtaaaaatgagcagaataggtagaaatacttgttctgctttttttattgtatatcattgtcccgtatcatataaaaaatgaaaaataaaaatactttgacttgacaactatttaaaatgtgatatactttcactgtcaaatgatttgatgatgaaaatatttgacatgcaaactagtgcaaatataccagcacacaaaactgaaaataaacacagaaaaaggagaacagaaatatgttggagaaaatcaaggaaatcgtagcagatcagttaggaatcgacgaggatgatatcaaattagagtcaaacttcaaggagaatcttgaggcagattcattagatcttttcgagcttgtaatggcactcgaggaggagtacggagtagaaatcccttcagaggatttagagaaaatcgcaacagtaaacgacatcattgagtatcttaagaacaaaggtgtagaggcttaaaagacatggagacaagaataacaaagcttcttggaatcaaatatccggtcattcagggtggcatggcatgggtagcaacccatgagcttgccagcgctgtgtccaatgcaggcggacttggcatcatcggagcaggcggagccccggcttcatgggtaaaggagcagatagtcgctgcaaagaaggagacagataagccgttcggagtcaacctcatgcttatgaatccggaggccgatgagatagcaaaaatcatcgccgaggaaaaggtaaaggtagtcaccaccggcgcaggaaatcctgcaaagtacatggatatgtggaaagaagcaggcgtcatcgtaatccctgtagttgcaagcgtagcactcgcaaagctcatggagagaggcggggcaagtgcagtaatcgccgagggaatggagtcaggcggacatatcggagcacagactaccatgacacttgtgccacaggttgttgatgcagtgagcatccctgttatcgcagcaggcggaattgcagacaacagaggctttaatgcggcatttgcactcggtgcggaggcagtccagatggggacacgctttgtcaccgcaaaagaatcgatagtacatgaaaactataagcagaaggtcattaaggccaaggatatagattctgaggttacaggaatgagcacaggtcatccgatcagagtactcagaaacaagatgaccagacaatatctcaagctggaaaaggaaggagctccatttgaagagctcgaaaaaatgacacttggcgcactcagaaaagccgttgtagacggagataccgtatatggcagcgtcatggcaggtcagagcgcaggcctcgtaaagaaagaggaaacctgcaaagaaatcattgaggatgtagtgggactgaacaaatagacagtattcacttttacatgtaaatttaaggataccggggcgcctgaaaagagtggcttacggtatcctgtcagaaataaggagaaaccgaaaatgggtaagagagtatttatgtttcccggacagggctcacagtatataggaatgggtaaggagttttacgatacaatgccaaatgcaaaggcagtaatcgaccttgccagtgaacagacaggcttggatattccggcattatgctttgaggaaaatgacaagctgaatattacagagtacacacagatatgtatgcttgcagttgaggcagctatatatcaggcaatcattgacaaaggtatcacacctgatgtcacagcaggcttaagccttggggaatatggtgctctcatcgcatcaggagccatgactatggcagatgcattcgcagttgtcagaaaaagaggaatttacatgcaggaggcagttcctacaggtggagccatgacagcggttttaggacttgatccgcaggtcattgaggatatctgcaaaaagacagcagatgagacaaattcagtggtatcggtagccaactataactgcccgggacagattgttatcacaggagaaaaggcagcagtagatgccgccgcagcagcatgcagcgaggcaggcgccaagagatgtgtaccgctcaaggtaagcggacctttccactcagcaatgcttaagggcgcaggcgaaaagctcgcagatgcacttgagagtgtagaaatccacgatatcaaggtgccatatatcacaaacgtcacagcagactatgtgaagtcaccggcagatgttaaggattatctgacaaagcaggtttcatcgtcagtacgctggcagcagacaatcgagcgccttatcgcagacggtgcagatgagtttgtggaaatcggaccgggacgctcactcagcggatttatgagaaagataaatagagacgtaaaagtcgtaaacatagacaaactggaggattttgaaaagtatgttaacaggtaaaaatgccctggttacaggcgcgagccgcggaattggaagacagatagctcttacacttgccgcagcacacgcctttgtaatagtaaattataatggttcaaaggaaaaggcagatgccgttgttgcagagataaaggcagcaggcggtgatgcagtttcttatcagtgcaatgtatctgattttgacgagtgccagaatatgataacagcgctcatcaaggagtacaagcacatagatatcctcgtaaacaacgcgggaatcacaagagacggtctcatcatgaagatgagcgaggcagactatgacgcagtgctcgacacaaaccttaagggtgcgttcaacacaatccgtcacatgtcacgctatttcttgaagcagaagtcaggaagaattatcaatatttcatcagtttccggaatactcggaaatgcaggacaggccaactacagcgcaagcaaggcaggagttataggactcacaaaggctgtagccagagagcttgccagccggggaatcacagcaaacgcagtggcaccgggctttgtagagacagagatgacagatgtgcttgccgatgcggcaaaggagaatcttttatcacagattccgcttggcagaccgggaaacacaaaggatatcgcaaacgcagtattatttttagcatcagatgcagcaggctacatcacaggccaggtgctgtctgttgacggaggaatggcaatatgagtagaagagtagttgtaacaggacttggagcagtaacaccaatcggaaataatgtggacgatttctgggcatcggtaaaggccggaaaaatcggatttgaccacatcacaaaatttgacacaacagattataaatgtcacattgcagcagagcttaaggattttaacccacaggattttatggacagaaaggcagcaaagagaatggagccattctcacagtacgctgtagctgcagcaaagcaggcaattgatgacagcggacttgatatcgaaaaggaagatccatacatggttggatgtgccatcggttcaggtgtcggaagtcttcaggctatggagcgcgagacacaaaagctttatgaaaagggaccaaacagagtcaatcctctgcttgttccgcttatgatctgtaacatggcagcaggaaatgtttctatccagttcggtctcaagggaaagagtatcaatgatgtaacagcctgcgctacaggaacaaacacaatcggtgaggcatacagaagcatccagtacggtgaggctgacgtgatggtagccggtggtacagagggcagtgtatgtcctatcggaatcgcaggatttacagcacttacagcgctttctacagtagatgatccgacaaagtgttcacttccgtttgacaagaacagaagcggctttgtaatgggtgagggcgcaggagtagttatccttgaagagcttgagcatgcaaaggcaagaggtgcaaagatttatgcagaggtagtcggatacggctgctcatcggatgcataccatatcacatctccgcaggaggatggcgcaggcgcagcaagagccatgaccaatgccatgagcgatgcaggtgtcacaccggcagatgtaaaatacatcaatgctcacggaacgggcacacatcacaatgatctctttgagacaagagcaatcaagcttgcgttcggtgatgaggctgcaaatcttaaaatcaattcaacaaagtctatgataggacatctgctcggagcagcgggagctgttgagtttataacatgtgtgaaggaaatccaggatggatttatacataagactgttggctatgagactcctgatgaggagattgacctcaattactgcaaggacagctatgaggagtctgttgagtatgcactgagcaattcactgggatttggtggacataatgcaagtattctgctcaaggcttataaataaatagcttctgcttttttaggggcttcgcgaatgtaggctgtgcttcccggctccactttgcggagcgcgaaacgtgtagatagtttggagtaaattgagaaaggatagatgtatatgtcagttttgaatacgcagcagattatggatattctgccgcaccgcagtccgtttcttctcattgatacggttgaggaactacagccgggcgtaaagtgtgtggctaagaagaatgtgactatgaatgagccgcattttatgggacattttccgggaaatccggtgatgccgggagtgcttattattgaggctttggcgcagaccggtgcagttgccattctttgtcaggatgagtggaagggtaagactgcatattttgcaggcatcaataatgccaagttcaagcagaaggtggttccgggagatacgctggagctgaccactgagattataaaggttaagggtcctatcggtgtgggcaaggctgttgccagggtaaacggcaaggttgcctgtatggcggagcttacatttgcaataggttaattgcataaggagacatgatgaagttattcaagaagaaagataaaaatatagaagctgaagagactttagcaaagaacgctgagagcgcaaaaacagccgcagatggcaaaaatgccggtgcagcacaggaaacaaaagaggatgtccctgagacaatcgtttgtcccaagtgtggcaagactgtgctcaaatcagttgtaaaacagcacaaatacgtctgctatgagtgtaattattatttccgtgtgcgtgctaaaaacagaatcagaatggtttccgacaaggaagcatttgagccatggtttacagagcttacaacaggaaatcctctcaatttccctgagtatgaggagaaaattgcaaagactcaggagaaaacaggactttctgagggcattgtcatcggtaagacaaagatttacggtgaggagacagtgcttggtgtaattgattcaagatttatgatgggaagcatgggtcatgtggttggtgagaaaatcacaagcgcatttgagcgtgccacagaggaaagacttccggttatattattctgctgttcaggcggtgccagaatgcaggagggtatcatttcactgatgcagatggctaagacctcagccgcagcaaagcgtcattcagaggcaggacttttatatgtgcctgtactcacagatcctacaacaggtggtgtgacagccagctttgcaatgcttggagacatcattcttgcagagccaaaggcacttatcggctttgcgggtcctcgtgttatcgagcagaccatcggacagaagctgcctgagggcttccagagggcagagttccagcttgagcacggctttgtggatatgatagttgagcgtgaggatttaaagaagactctttacaagattttacgtgctcacagacctaccactggctatgccaattttgacccgcttcactcagacgacaattacgagccgacagagcttatgaaggagcgcgaggcaaaggctaagccatttaaggtatgggacaaggtcagcgccgcaagacagattaagagacttgcatcggttgactatatggactatatctttgatgagtttatggagctgcacggagacagatatttccgcgatgacccggctatcgtaggtggaatcgcatatttagacggtcagccggtcacagttatcggtgtccacaagggaaaagaccttgaagactgcgcaaagagaaactatggtatgccatcacctgagggctaccgcaaggcactgcgcctcatgaagcaggcagagaaattcaaccgtccgatcataacctttgtcaatacatcaggagcttatcctggaatggaggcagaggaaaacggacagggtgaggcaatcgcaagaaacctttatgagatgagcggcatcaaggtgccaatcctttgtctcatgataggagaaggcggaagcggcggagctttagctctttctgtaggaaatgaagtgtggatgatggaaaatgccacatactcaattctctcgccagagggctttgcatctatcctctggaaggacggaaagcgtgcaaaggaagccgcagaggtaatgaagattacagcacacgacttaaaggagcttgatgtcgtggatgatataatacctgagtttggcggagccgacgaggatgccctttcatcaatcggaaactacatgaagggcaacatgaagaaattcttggaaaaagaaagcaaattgacaaaggaccagctcttggaggaaagatacaagcgtttccgcaagttctagtcccggaaaggaaattctatgaagatagttggaacaggaagctgcctgccacagagagtggtctcaaacgatgacctggcagccataatggacacatctgacgagtggatcagctcgcgtacaggaataagaaacagacacattgcaacgactgagacaactacctcacttgcctgtgatgcagtaaaaagtgcgctgcaggatgcgggaattgacggaagtgagatagacttgataatagcggcaagcgtatccacagacaaaatcgttccatcgctcgcatgtcagattcaggctgagataggtgcaggcagtgcagtggcatttgacataaatgccgcatgctcaggctttttattcgggcttgccacagcggatgcatattttaagaccggcaggtttcacaaggcagttgtagtgggggcagaggttctttcaaaaataatggactggaatgacagaagcacctgtgtactcttcggagacggagcaggagcagcggttgtgacagacgagggcgatgccttcaagggctttgtacagggctctgacggaaaaggcggtgaggcgcttgacggagacaaccgtcctgtagtcaatccgtttaccgacaatggaaagcagtctgcactcggtggctatgtcaccatggacggtcctgctgtatacaagtttgcggtaaagacagtgccaaaggctataaatgagctgcttgatgaaatcggctggagcgcagatgatgtggatgtctatgtgctgcatcaggccaatatccgtattattgagtcggttgccaagaggcttaagcagcctatggacaaatttccgaccaatttacagcagtgtggaaatatttctgcggcaagtgtgccgattttgcttgataaagtccgcaaagatggtatgataaagcatgaggaaaaaataattttatcaggctttggagcagggcttacatggggagcctgcgccatagagtggcaatagaaagaggtatttatgacggcagatgaaactttaaatgaattattggtgtgtctgttcaaggatttgacagagatagagggcagatgtctgataacagacgaattttctgatatttctatcaacgatatgcatataatagaggcaataggagtcgatgagccaaagcgctccggcaccgtagccaagcttatgtctatcactctgggcacgctgacaaaggcaatagatggtctcacccgcaagggatacgtgaaccgtatccgcagtgaggaggataagcgtgtggtaaagctctcactcacagacaagggaaagagtgcatactatcatcatgagcagtttcatcgtcatatgatagagcatataaaggacgatctttcggatgacgaaatgaaagttcttataacttcacttgcaaaactctcggattatttcaaggtggtatattccgatgatgaggagaatcagtaccaaaactgggataatataaatgaagataataaataaaatgaattttttttatataaaaccttcaaaaattacttgattatagcaatagatttatataaaataaacttgttgatgtaaaaaataattttgtaaaggagatataaaaatgagctatgttgatgaagtactcgaagtagtaaagaagaaaaacgcagatcagcctgagttcttacaggcagtaacagaggttcttgattctttaagacctgtaatcgaggcaaatgaggaattatacagaaagaatgcgattcttgagagaatcacagagccggatcgtcagatcatgttccgtgttccttgggtagatgacaacggacaggttcaggtaaacagaggtttccgtgtacagttcaataattccattggaccatacaagggaggtttaagacttcatccttctgtaaacctgggtattatcaagttcttaggtttcgagcaggtatttaagaattctcttacaacacttccaatcggtggtggtaaaggtggttctgatttcgatcctaagggtaaatctgacagagagatcatggcattctgccagagcttcatgacagaactttgcaaatatatcggagcagacgttgacgtaccggccggagatatcggaacaggtgcaagagagatcggcttcttatttggacagtataagagaattcgtggatcatacgaaggtgtgctgactggtaagggtcttacctatggtggatctcttgcacgtacacaggctaccggatatggtctgttatatcttactaacgcattatggaaagatcatggtatgagccttgagggaaagacagcagcagtttccggatctggtaacgttgctatctacgcaatcgagaaggcacaggagttaggtgttaaggttgtaacatgttctgattctaccggatggatttatgatccaaacggaattgatgttgctcttcttaaggaagttaaggaagttaagcgtgcccgtcttactgagtatgcagctgctaagtcaactgctgagtatcatgcaaagcagaacggtgagcacggcgtatggcagtacaaggtagaccttgctcttccatgtgctacacagaacgagttagatattgacgatgcaaagatgctcgtagcaaacggtgttacatctgttacagagggtgctaacatgcctacaactcttgaggctacaaaataccttcaggagaacggagtactcttcgtaggtggtaaagctgccaatgcaggtggtgttgctacatcagcacttgagatgagccagaactctgagagactttcatggacattcgaagaggttgacggaaagctcaagggcattatggagacaatctacgctaacatcagtgatgctgctaagagatacgatgcaacagttggtggaaagactgactatgttgcaggtgcaaatatcgcaggctttgagaaagtagttgacgctatgcttgcacagggtgtttgctaatctgtaggcacttattgaataatgactataaaacccctcccacggatagaagtctgtgggaggggttttgtaataatatttcaaagagaaaactaatttatttcttattagcaaatgctctgataccgcctgctacgaaaagtatagaggcgataataacgccggacacaagcacaatagcgtaaacattggcattcacgcagatattggaagtccagtcagaaaaattcatggactttatagtgatttgtctggtgccaaaaattaaaaactcgcatatgtcatcggcaaaagctgtccaaaccgaagctatcaaaactataattgcggattttataaatccgtttgcgtttaaatatcgtgcatcaaaaaatatgagccaggctgcaagtacaaagacaaatgctataatgcagccggccttcattccggcaacatcgtttgtatgaccacacacctcaatgattgtgaggaaaagccataaggtatcccacagcatagtgataagagcttttttgtctgataaaacaggtggaagctcaattcctctgatgacaaacggaaagagaacaattgataatccaaatatagttggaacagaccaaagcataaattcatttgaactatacattctgtcaacaaaaaagaatatcaagagcagagcaaaaacaccgcagattatgcatttggtaagttttttctgttgtgccataagtggaacaactgtcattgtagctacaagaagcatagatgctgttaccaccgcaaaggtatttaaaccaccgccatttgacaggcatactatgaatgtaatgagtattgggataagcagtaatccggctattatgactccggtcttgtaggcagcagatttttcctttttctcatgctgctttaatacactgtcggcctctttttttatcattgaatcaatagaatcgttttttagctcattgtatgtattttgacatttttcacaagtcttaaggtgtttttcaacaagccttttgcttgagggactgcatacatcgtcatagtatagtgggagtaaatcctgaactatattgcaggtttcatcggttgattgtgtaattggattattcatttctatccatcctttctttgattttcagtctggctctatggtaagttacccgtgcccagttctctgtttttccaaatatcatgcctatttgggagaatggcaattcaccaaatattctaagctgaaagacctccttgtagggctcatcaagctcgtgcagtataagatgaatctgaagagctgtatctttattttctaggctttttaccatattatcgggttgttcgagctgctcttcgtcaagctctgtaaattttgtgctttttcggcattcgtccattgccagatttcttgctatgctgcaaagccaggtctgttcgcttgatttgccggcatatgccttctttgcggtcatggccttataaaaagtattctgggtaatttcctcagcctgatgttgattttttacaattgtcattacatatgagtatacttgcaagtaataggaattgtacaatttctcataatccagaactgtcacctccttttttcataggttagacgtagaaaggattgttttgttacaaaaaattttaagattttttaatcgatgtatgattatagcataaattttatcaaaaatgaaaataatcttgacatccaaaccacaaaggtttactatggttagcgtaagctaattaaataattattcttcagggcagggtgcaattccctaccggtggtatagcccacgagccgcaaggcatgattcggtgagattccgaggccgacagtaaagtctggatgaaagaagatgtgaatatgatatatgcagagtatagatagctgggttttagattcagtttcagatatagatacagcacatatcatagttataaaagatatctactctggagtgttttgatacattccagatttttttgtctcaaaattcatttatgatgaaatgcagcttgtgcatgtttatctgagattatgatatttgaaatcattaggccctgaacgataatagttcagggcttttttatgcagaaaggaactcaaatgactgatgaacaatatatgagaagggcgattgagcttgcaaaacgtggcatgggatatacatcgccaaacccgatggtcggagctgtgatagtaaaggacggcaggataatcggagagggctggcatgagagatacggagagctgcacgcggaaagaaatgcgttaaagcattgcaaggaatcgccacggggagcggatatgtatgtgactctcgagccctgctgtcatcatggcaagcagccgccatgtgtggaggcagtgatagaagccggtataaaaagagtatatgtgggctcggatgacccgaatccgcttgtcgccggaggcggtatcaaaatccttaaagagcatgggatagaggttgtcacgcaggtgcttaaagacgagtgcgacaggctgaacgaggtattcttttactttatacagactagacgtccatacgtcgctatgaaatatgccatgacgatggacggaaagatagccacatattcaggactatcaaagtggataacaggagaaaaagcgagggaacatgtgcaaaacctgcgccacagatataaagccataatggcaggaataggaacagtgcttgcagacgatccactgcttacatgcagaatcgagggcggagtaaatccaatccgcataatatgcgatacgcaccttaagcttccactggaatcgcagatagtaaatactgcaaaggaagtgccgacgattgttgcagtcagtgagcgatatcgtgaaaccgcacagtcagaagccttgtctgaaactgaaatagacagtatagaaaaaaacaataattatcaaaaaaacagaaaaataacacggcttgaagaaaacggaatagaaattctgtatgtagctgaaaaaaacggttatattgatttaaatgacctcatgcaaaagctcggcgaaagaagtatagacagcattctgcttgagggaggcggaatactcaactggtcagcccttaagagtgggattgtgaataaggtatacgcttacattgcaccaaagcttttcggaggggcggatgcaaaaactccgatagagggaaagggaaccgactcaccggcacatgccgtgatgcttggaagcagtaaggtgacaaagcttggtgatgatttccttatcgagtgtgatgttgtgtaattgatgtaattgttactgtttcgccttggtgagaccggaaacaatttaccatgtaaattatgcaaatgagtgtgaggaaaatatagaaaaagaaaggcgatacacaatgttcacaggaatagttgaagaagttggaacaatagatacaatttcacgtggagcaaactcagcagtacttacaatcagagctgaaaaagtgctagctggaacaaaggtcggagacagcatagcggtaaacggtatctgcctcacggtcacaaggctcatgccacatgcgtttacagcggatgtcatgcacgagacgctaaaccgttcatcgcttgcaaatgcgctgagaggagcacatgtcaatttggagcgtgcgatggcggcagatggcagatttggcgggcacatagtgtcgggacatgttgacggaacaggcaggattgtggaggttaaaaaggatgacaatgccatctggtatacaatacaggccacaccacagctcatgcgctatatagtcgagaagggctccgtcacaatcgatggaataagcctcacagtcgcaaaggtggcagaggataatttctcgatatcagcgataccgcacacggtaagccagactgttctaaaggacagaaaagtgggagctgtcgtaaatctggaaacagatatcataggaaaatatgttgagaagctgttgtgtaaagggcagccggaaggaataacaagagatttcctggcaaaatacggcttttaacataaaagcacgggtatcgtgcgggtttgcgaatgtgcgtggggctgaatggttaaaaaattatgtaattgaacagcttcaaaatcataagagaaaggacataaaatatgaaattcaacacagtagaagaagcacttgatgagcttcgtgcagggaaaataatacttgtcacagatgatgaggacagagagaatgagggcgatttcatctgtgcggcagaatttgccacaacagaaaacatcaactttatggcgatgcacggcaagggtctgatatgcatgccgatgtcgcaggaatatgtaaagaagcttcgttttccgcagatggtgcaggaaaatacagacaatcatgagacagcatttacagtatcaatagaccatgtctcaacaaccacaggcatttccgcagcagagcgttcaatcaccgcaatgaaatgtgtctctgatgacgcaaagcctgaggatttcagacgtccgggccacatgtttccgcttctagcaaagaaaaacggcgtactggagagaaacggacacacagaggcaacagtcgatttatgcaggctcgcaggactaaaggaatgtggactgtgctgtgagataatgcgtgaggacggtaccatgatgcgcacaacagagctcatggagcttgcaaaaaaatgggacatcaaattcatcacaatagcgtcacttcaggaatacagaaagatacatgaaaagctcgttgaccgtgtcacagaggtaaagctgccgaccaaatacggagaattcaaggcatatggctttgtcaacagattaaacggagagcatcatgtggcacttgtaaagggcgaaatcgcagatggaagggatgtgctctgccgagtacattcagagtgtctcacaggagatgtattcggctcacagcgctgcgactgcggccagcagcttgaagcggccatgagacagatagacgaggagggtagaggaatactgctctacatgcgtcaggagggcagaggcatcggcctgataaataagctgaaggcatatgagcttcaggaacagggtatggatacactcgaagcaaatctggcactcggctttgccggagatgagcgcgagtactatatcggagcccagatattaagagagcttggagtacacagcctgcgccttctcacaaataaccctgacaaggtataccagctctcagagtttggcatggaaatcagcgagcgagtgccaatccagatgagtgccacagcgcatgacctgttttatctgaaaacaaagcagaaccgcatgggacatatactctcatactagcaaaaataaaaaaaacaaaaggagaacgaaaaatgaacgtaatcgaaggaaaaatgacacaggatggaatcaaggtaggaatcgtagtagcaagattcaatgaatttatcacatcaaagctcttaggaggagcaaaggacggactcgtaagacacgacgtgccggaggaaaacatagatgtagcatgggtgccgggagcattcgagataccactcatcgcaaagaagatggcaaaaagtggaaaatacgatgcaatcatctgcctcggagcagtaatcagaggagcaacaagccactatgattatgtgtgcaatgaggtatcaaagggaatcgcgtcagtatcactcgaatcagaaatcccggtaatgtttggtgtagtcaccaccgaaaacatcgagcaggcaatagaaagagccggaacaaaagccggaaacaaaggatatgactgtgcactcggcgcaatcgaaatgataaatctcgtcagacaaatcggataatataattatatgattaaagggtcaaaaggtatcatcgatgcatgcttgcatgtaattcgttgtataccttttgaccctcatatcattatatagaataatagcataatccccgagggtcaaatatcatcgatatttgaccctcgaatacttattatatctcaaattgtaaattactgtcacaacgtaagtggcgtaagcgccgggcatccatgcagcgcacacgcactccccccccacaaaaaagaagaaaaatttaatatctaaagaattgcacgaaaaatctgtatatagtataatgatagttcaggaaaacaaaacggaggaccatgaattttgatagatatacattgccatttattatacggagtggacgacggctcaaagtcgctcgaggaatcggtagagatgctcaagatagccaaaaagcagggcatcacaggcataatcctcacaccgcacctgcgccatggaatgtttaagcatccgcttgaaaagatagagcgacactataaaaagctgatgccatatgcaaagaagcttggaatagaattaaagctcggcacagagtatcatgtggcaaccgatatgatagatgcctttcatggtgggctgtgtcatacactggcagatacacagtatatactcacagagtattcacattccagcgaatactcgtttatatacaagatgacgcgcgaagctatatttgcaggatatataccggtgatagcacatgtagagagatatgagtgtctcagagatataagccgtatagaggatttgcaggagctgggagcgctcatacaggtcaatgcagactcagtgcttggcatagatggcagacacttcaagagatatacaaagaagcttttgaaggcaggacttgttgatgtaatagcaagcgacagccatggcacaaaggagcgcgtctgcaacatgaaaaaatgctatgagtacgtggcaaagaagttcggtgatgactatgcgcaggaaatcatgcagaccacaccggaaaatataataaacggaagataataagtgtaaatgcgggaatacataatggaaatcgcagattacgggcttacaagtctttattttacaaggaaggactttataaagtggtggatggcaccataggttgtaccgccatgatatatattatcaaacacttattgaagcatgaataaggagaacatgaaaatggagatattagacttaaacaacgatgaagacacaaaaacaaccgatgagatggagccaaaaaagccggaggaaaaaacatcacctgtcaaggaaatcttaagctgggtgttaacaatcgcatttgccattgtagcggcaatactcataaagaactatgtcattataaatgcaaatattccgtcaggctcgatggagaacaccatacagattggagatgacatatttggcttcaggcttgcatatacattttcagacccaaagagaggggatatagtcatattcaatgcaccggattcgccttctgagaaatacatcaagcgtgtaataggtctgccgggagagacagtcaccatagaggacggccaggtgtatatagacggtgaggcgcttgaggaggattatctcaagtcaaaccagagcggtgaggatccatggaacataaatgcgggaccttacgagtttaaggtgccacaggactcatatctgctgctcggtgacaacagaaatggctcatcagacgcaagagtctgggagcacacatatgtgtctaaggacgatatacttgcaaaagcaatattcagatattacccgttcaacagattcggagcggtgaaataagctgtaaatcaggatataaaataaaaatagaggtaaagtaaatgccaaagacagaaacagacattgaaaaacgaaataaatatggcatgttgtgcggtatagtcggtatatttttaaacctcatactctttgccggcaagctatttgcaggaatgtttagcggtgcaatctcaatcactgcggatgcattcaacaacctgtcagatgcaggctcatcaatcatcacgatagcaggcttcaagatggcggcacagagagccgacgaggagcacccatacggacatgcgaggatggagtatgtggctacactggcagttgcagcaatcatactcatcatgggctttgagctgttcagggattcctttggcaaaatcataaagccgcaggaca

SEQ ID NO: 653 - DNA, 7434 bp, unidentified
  source 1..7434: mol_type = unassigned DNA
atgtctctttccgaagaagcaatcactcttcagcgtgctgcgcacgaactgatgtatttgggtatggacggcagtcccgtctatagcgatgacttgtcacggcggaacggtgaggtctaccgtcttaccatggctttataccggtcgggtgtaaaaggcactaccatcgaagagcaggcaaatgtctgtcttgcccttcttatgggttacagcgcctcttttgtggaccatggcgaaaagcagcagcatgtccaggaagtgctggactgttgttgggatgtgctcgacgcccttcccgcttccttactgaagctccgtctgcttaccgcctgctacggtgaagtgttcgacgagtctttggccgacgaaggccgttccatcatcgcctcctgggattccttatcacttactcccgaacagcaggaagcggttgatgaatttcagaatgtgacagacaatccctatccatgggaatatatcgatgaataaaacttttcatataatgcttaacaataaatccgtattgattaccggaggaacgggttccttcggaaagaagtttgtggaaaccattctccgtgattatccgcaagtaaagaaaattattatttactcccgcgatgagctgaagcaatttgagctgaaacagaaatatcccggtcataagtatccgcaactacgtttctttatcggtgatgtccgtgacctcgaacgcctgacgcgggcttgcgaaggagtggacgtgattatccatgcagccgccatcaagcaggtggataccgctgaatacaatcccgaagagtgcatcaaaaccaatgtacacggtgcgcagaatgtgataaaggctgctcttgccaccggtgtacagcatgtggtggccctttctactgacaaggcttgtgcccccattaatctttatggcgccaccaagctcacttccgacaagctgtttactgccgccaacaatatcagcggttccaaggacatcaggttctccgtagtccgttatggcaatgtgatgggttcccgcggttccgtaatccctttctttatcaacaagcgtgacaacggggcgaaggaacttcccataaccgatatgcgcatgacccgtttcaacatttcactggaagccggtgtcgctttggtcatgtatgccatcggacatcacctgggtggtgaaatctttattcctaagattccttcctatcatatccaggacgtggctaccgccattgcacccaatctgccgcaggtggaagtgggcatccgtccgggagagaaactgcacgaggagatgattactgtaaccgatgctcttgatacaatcgatttgggcagatattatgtcattcttccttccgtatctttcaagcacagtcgcgaagagttcatcagacatcacaatgcagtacccgttcccgacggtttccactacagcagtgacaacaatacggagtgggagacagtagagactatgcgcgagaatatcaagaaatacgttgaccctaatttcgaggtgaaatgataagcaagcctattccatacggtcgtcagcatatcacagatgaggacatccgggcagtcatcgataccctgaaaagcgattacctgacacaaggtcccaaaatcagggaatttgaaacgaaatttgccgaatatgtaggtgcacaatatgccgtagcggtgaacaatgctacttcggggcttcatcttgcagctaccgcactgaatgtaaagccgggtgacaaggtgattgtcactcccatgacctttgctgccagtgccaactgcattcgctattgtggcggcgaggtggtattctgtgatattgacaaggatacttacctcatggatatccgtaaactcgaagccatgcttaaagcttctcctcgcggtacttacaaaggtattgttccggttgattttgcaggctatcctttggatctggaagagttcagaaagcttgccgacgagtacggtttgtggattatcgaggatgcctgccatgctcccggcggctatttcatggacagtaaaggcaagaaacaacattgtggtaacggttgttttgccgactgtgccgtattctctttccatcccgtgaaacatatcgctacgggtgagggaggcatggtgaccaccaacagcaaggagctctatgacaagctttgtctttaccgtacgcatggcattacgaaagaccctgccttattgcacgagcatcatggtggctggtattacgagatgcaggagttagggtataattaccgtctgactgattttcaggctgccttgggtatttctcagctggagcgtgcgaaagcaggtcttgaacgtcgtcatgaaatcgtaagacgctataatgaagcgttttccggaatagatggtatcaagactccgttcaatactgccgatgtctatcatgcttatcacctttatatcattcaagtagctgaccgcttgggtctttataattatctgcacgagaacaatgtctatgcgcaggttcattatgctccgcttcatctgatgccttactatcagcagtggggcaataggaaaggcgatttacctatagtagaagagtattacgaacattgtctgagtcttccgatgtatcccacgctgacggacgaggaacaggagtatgtgattgaaaaggttatagaatttgtagcgaaatgaaaaatatagcaatcattcctgcacgtggcggcagtaaacgtattccgcgtaagaatatcaagccctttatgggtaaacctatcattgcatattccatagaggcagctttacaaagcggtctttttgaggaggtgatggtttctaccgatgatgaggagattgccggaatagcttgtaagtatggtgccaaagttccttttatgcggagtgccgagatgtcaaatgaatatgccggtactgatgatgtaattcttgaagtactgaggaagtataaagagcaaggcagggagtttgaaacggtttgttgcatttactcaacggctccttttgtcactcccgaaagactccgggaagcatacggaaaaatgaattcggagatagattccgttttcacttgtgtggcttattcctatcctatacagcgcagccttcacatcgtggatggaaaaattagtatggtttatcccgaatacaaaaatgcacgttcccaagatttagaaccgatttatcacgatgccggtcagttctatttctctcgcactgctccctttgtggagagccggactttttggggtgagaatacagccgggttggtactttccgaacttgaagtgcaggaccttgatacacagactgactgggcattggcagagatgaagtatgagttgcttcataaatgatgtaatgcagaaaatctatctccgtgccgatgcaagtgctgccatcggctacggtcactttattcgtactctggctttggccgatatgctgaaggacgattttgattgtaccttctttacttgccatcctaccccttatcaggtgagtgagatggagaaggtatgtcctttcatccccttacaggaagaatcacattatgatgagttcctttcccttttgcaaggtgacgaaattgtggtacttgacaactatttctttactactgattaccagcgtgccatcaagcaaaaaggttgctgtctggtgtgtgtggatgatatgcacgacaagcactatgtggctgatcttatagtcaatcagggattgggttacacgcgtgatgactattcgtgtgaaccatatactcaatttgcctttgggcttcaattttcattgttgaggaggcctttcttcaatgttgcgctgcagaataaacggaacaattattcaggaggtttatatgtattggtggcttttggtggttctgatttcttgaatttgacgtatcagaccattcatgcaattaaagccaaagacaatgtgaagaagataacggcaattgtcggtgattcgtatgcagccgagaatatggttgatgaccccaaagtaacctatcagaagaatttgtctgccggttccattgcagacttgtttagtactgtagatgtcgccatattgcctgcctctacgatgatgaatgaggcattggcctgtggaactcctgttataggagggtattatgttgataatcaggagcacgactattatatgtttttgcgtgaagggctgattcagggggcgggtgattataccgatgccgctgcctttactcttgttgctgagaatttggataagatggccattcgtaaaagacatgccatcactccggatattcccaaacggtttgtcaatttgtttaaaagtctgttgatatgcaagtaacttcacaaagagcttcggccatattgtataattatctgtctggcaaccattttgataaaccgttcttattgccggcaaatgtgtgtcctgtagtgcccctgtcgtttatgaaagcaggtgtcggttttgagtttatagacatagatgaaagccatgccatgtcaaccgagaaatgtttgacagctatagaggcgggaaaatattccggtcttgtatttgtgcatgcctacgggaaaaagtatgacaacaaagaattttaccgggcagtgaaaagtctcgatccaaatctttgtatcattgatgattgttgcttgtgcattcccgaattggcagattccttgcctgaaaatgtggatctctgcctttacagtaccggatatgccaaattcatagaactttcctatggtggctatgcaagttttagggggggggtacgaagttgttgattatcagtatgatagcattagtgaacaaaagcattcggtatatataaggaaatgtctcctggagaatgtcagatatatgcttccggctgactatccttggctggacgcctcaaatttacaaatgaccgatgaggaatattttgacatcattgaaagaaagctcccaaaagtgattgcggaaaaagagaaaataaacaagatatacaggaatctgcttcctgaatcgattcagatgggagatgatttccagaactggaggttcatgattgtcatcgagaaccggcagaaggttcttgacgcaatattcaaggccggtctgtttgccgggactaatttcccttcggtttcatacatgttcaaaggtgtttcttctcctgttgcggaagtggaggcgaagcatatcgtcaatttgtttaatgatttccggttcagtgaagcacaggcaagaaagatctgtgatgtgataaattcggttatatgaataaaagattattgatactgggcgcaggtgaaatgcaggttcctgtcatccgaaaggcgaacgatatgggattgcataccatagtcgcagatatggatgcgaatgctccgggaatggggtacgcctcggaaccggttcttgtcagcacgatggataaggaaggtgttttggaatgtgccaaacgtcactctgttgacggcatacttactacaagtgacgcgcctgtaaatgtggtttcctatgtcggggaacagctggggcttccgtccatgtccactgaggtcgcaaaaatctgtacaaacaaatacttgcagagggaaatgtttgcggccaacgggattgatgtaccatttttcatgctttgtgataaagatacggacttgggcacattgcaagattatccatatattgtcaaaccggtagattcctctgcaagccgcggagtaaaaaaggttacaaatcataaagaacttgtacttgctttttccgaagctctcggttattcccgtaccggaaaggccattgtcgagggctttataacaggccgtgaattcagtgttgaaacatatacgcaaaacaataaaactaccgttgtcactattacggagaaactttgtatcggtgaggcagaaggcttctttgttgaagatacgcacattgaaccggcgcgtataacgaaacaggagtgggagctggtttcggagaccgtatcaaaagcactttgcctgattggacttaataattgcccctcgcatacagaaataaagctgaatgaatcgggcgcttatatcatagaaattgcttgtcggcttggaggagattatataacctctgatttggttccattgtcaaccgggatagatatgctgagaaatctggtgaactgttctcttggtttgcccgttgatgtccttcgcaaacatgaaaaatgctcagcggtacagttccttaatccgctcaactatcagcgttgtgtggattttctaagctcttcccggtcatcggctgtttttcggtctgaaataagaccttattctgaaaaaaaaataaaaaactctttagaccgtttagggtatatcatacttcagactgatagtatggaagagcttgaaagtattctaaggacgattaaatagtaaagacatgagagataagtgtatgattgtggctgagatgtctgccaaccataacggtaagaaagaaacagccattgaaaccgtcagggctgcaaaacgtgccggagccgatgccgtcaagttgcagacctatcgggctgataccattacgcttcgctgtgacaagcctgattttataattaatgaaggctctatatgggacgggcaatatttttatgatttgtatgaacaggcttatactccttgggagtggcatgaagagttgttccatgtggccaaggaagaaggactgatctgtttttcttctccttttgataagacagccgtcgatatgcttgaggctttggactgtcccgtttataagatagcttctttcgaaattacggatattccattgatagaatacgcggcttcgaagcataagccgatggtacttgctacaggcatagccaccgaagaagatattcaattggctgttgaagcttgccgcagaatgggaaataatgatattacggttcttaagtgtacctcttcttatccggctccagttgaggaagccaatctttgtatgattcgtgatttggcagaacgtttccaggtaaaaagtggactttccgaccataccctggggagtgtctctcccattgtggcggttactcaaggtgcgagtatgatagaaaagcactttattttgaatcgttccatcggtggtccggattgttctttttctatggaagagaaagattttgcccaaatggtaaaagatgtgcgcatggctgagttatctttggggaaaacgacttacgaattgacggagaaaatgagaggtagccgttccgcatcacgttctctctatgtggccgaggatatgaaggccggagaagtgattacggagcggaacgttcgctccgtccgtccgggcttcggcctgcaccccaaatatctgaaagatatattgggaaagaacgtgaaccgggatttggagaaagggacgaggtttgcattggagtacgtgaatggttag

SEQ ID NO: 654 - DNA, 7627 bp, unidentified
  source 1..7627: mol_type = unassigned DNA
atggaactgatttacacaaatgatttatgcaccggatgcaacaaatgcgtgcggggctgtcctgtacttacggcaaatattgcaacgcaggaaggttatgtaacggtagacccggacaaatgtattgcatgtggggaatgctttgatgtctgcccacatgaagcgagagactattatgatgatacggaccgcttctttgaagaccttgcatcgggaaagaaaatttccgtgatactggcaccggcatttctggcaaattatcccaaagaataccagcgtgtgctgggatatttaaagagtaagggagtcaaccatatctgcagtgtatcgttcggtgcggatatcacaacctggggatatctgaaatacattacggaacacaaatttttcgggggcatttcccagccgtgtccggcagtagtcacctatgtggaaaaatatataccggagctgattccgcgtctgatgccggtacacagtccgatgatgtgtactgctatttatatgaaaaaatacatgcaggtcacagatgaaatcgcttttatcagcccgtgtattgccaaaaaattagagattaccgatccaaattgcggcggatatgtttcttataatgtaacttttgaaaagatgatgaagtatatcggaaacgattatgaaggatgtgaaccatataccgatgaactggaatatggactggggtctttgtatccgatgcctggtggattgagggagaatgtagaacattttcttggaaaagagcaggtagtgcgtcaggtagaaggcgagcatgaggcatatgaatatctgcgttcctatgcaaaacgcattcagcagaataaagaacttccgtttatggtagatatcttaaattgcgcgaagggctgtctctacggaactgccacagatcctaaacggggaacggatgatgtcatgctgacaatcgcaaaactgcggaacagcaaaaccagtgcaaaacaggagaaggcacactttggcaggaagagcaaaagcaggagtccgtgggcagatacactgacaccggaggaacgtctgaaaaacttcatggacgcttttggaaagctggacatcaacgattttatgcgcagctacaccaatcgcgcagtacatattgaggaaccgtccgaacaggagaagaaccgcctgtttacagaaatgaaaaaagatacctacgaggaacagcacagggactgcgaatcctgtggatattcaagctgcaccaacatggtacgtgccatccacaatggagtcaacgtaaaagaaaactgtgtgcactatgtgcggggcatggcagaggaagaggcaaaaaagattgcagaacttcgcgatcaggagcggacggaacaggaaatccgccagcagaagattacagatatcacagaccggtttattaccctgagtgataacattgcagaattgaatacggcaaatgaggagtctgcaaatgaagcgactaatcttgcgcagtatattcaggatatttcccgcctgtgcgatgaactgaatgaatccatccgcattatgtcggatttcatcagtgtatataaaaagagcaatgaagatatttctgccattgcaggacagacaaatctgctttcgctcaatgcctccattgaggcggcgcgtgccggcgagaacggaagaggctttgcagtggtagcggaggaaatccgtacactgtctgattccacgaaggatcttctgacacagaacgaccagaaagccgaggcaattctcccaaagattacacagagtatggattccatcaaagatctggtagaaagcatgaataccatgacacagaaagtgtcaacgattgccgcaaacacggaagaaatttcttcccagacgacctatgtacagaatatgacagaagaaatgcgggatgaggtgaaagaactgtagatgaaaaaggatgcgtattacacatccggacaatttgcaaaaaaagcacatgtgacacttcgcgcgatccggtattatgataaacagaatattttaaagccaagtgcacggactgccgcaggagcgcggctgtatacggatgcagatctggcaaaactccagcagatccttttattaaaatatctgggattttcgctggaagatatccgggagatgacacttgctgcggcagaccagcagtatcttctcgaatccatgcggatacagaagaagctgctgcggcagaaaatggacgaaatgcaggcgatggatgaggcaattgaccgcaccatagaagccatccagacggaacaggcgattgactggaacagtatgctggatctgatccatctgacggcagtggaacgaagcctgaaaaaccagtaccagaatgcggcaaatatttccgctcggattcgcctgcacagggagtattccgtcaatccgcaggggtggtttccgtggattatgcagcagtgtaatctgcagccggggatgcggattctggagctcggctgtggaaatggagcactctggaccgaaaacagggaacaactgcctgcggatctttgggtcgttctctcggataaatcagaaggaatgctaaaggatgcccggcgtgcactgagagaggacagccgcttttcctataaaaaatttgactgcgaaaaaattccttacgaggaggaaatgtttgatcttgtgatcgcggatcatgtgctgttttactgtgaagatatcccgcaggtgcttgcagaatgtcggagagtcttaaaaaatgagggacggtttctatgcagtacctacggaaagcagcatatgcgggaaattaccgatctggtgcagcagtttcataaagaaatcgttttatcagcggaggtgctgtatgagcggttcgggcttgaaaacggagaaaacctgttagcaccgtattttccggaaattcagatgcgaagatacgaggatgcgattgaaatagcggaagcagaaccgctgatttcctatattctttcctgtcacggaaatcagaaccagctgcttttgaaccagtacaaagagttccgggaatttgtttctgcccgcgtggcagatggatttcatatcacaaaagatgccggaatcttcctgtgcagaaaatagtttgaaaatctataaaaaagacttgaaggtgacctagcgtcaccttttataatgcaatcaaatagaaaaattggaaactcacacaggaggaaaagtacatgactattattgtaacgggtggtgccggtttcatcggcagcaactttatcttctatatgttaaaagaacatccacaggatcgcatcgtatgtctggattccctgacctatgcgggcaatctgtccacgcttacaccggtgatggatcagccgaattttcgtttcgtaaaactcgatatctgcgaccgtccgggagtatataccctttttgaggaagaaaaaccggatgtgatcgtcaattttgcagcggagtcccatgtggaccgctccattgagaatccggaagtctttttgcagaccaatattatcggtacgtctgtgctgatggacgcatgcagaaagtatggtatttcacggtatcatcaggtatccacggatgaggtgtacggagatctgccgctggatcgcccggatctgttctttcatgaagatacgccgatccacacctccagtccttacagcacttcgaaggcatctgcggatctgcttgttatggcatatcatagaacgtacggcctgccggtgacgatcagccgttgttccaacaactacggcccgtatcagtttccagaaaaactcattccgcttatgatcgcaaatgcgctggcagacaagccacttccggtatacggagagggactcaatgtgcgcgactggctgtatgtcgaggatcactgtaaggcgattgatctgatcctgcgcaacggaaccgtcggagaagtctacaacatcggcggacacaacgagatgaaaaatatcgatatcgtgaaactcatctgtgaatatcttggcaagccggagagtctgatcgagcatgtgcaggacagaaaaggacacgatatgcgctatgccatcgatccgaccaagatccacaacgagctgggctggctgccggagacgatgtttaaagatggtatccgcctgaccatccagtggtatctggatcataaggaatggtgggagaacatcgtaaacggggaataccagaattattacaaagaaatgtacggaaagaaaggcttataaatatgaaagtattcgtgacaggcgttgccggacagctgggacatgatgtggtaaacgaactgacaaagcgcggacatcaggcagtcggttcggatattgcaccggcactggagactaccgtaaaatatgtgccgcttgacattaccgatgccacagcggtagaacagactatccaaaacgtgcacccggatgccatcgtgcattgcgccgcatggaccgctgtggatgcagcagaggacgaagaaaatcaggcaaaagtcagagccatcaacgtagatggaacgaaacatattgcggacgcagcgaaaaaagcagatgccaaaatggtctatatcagcaccgactatgtgtttgacggacagggcgagactccgtgggagccggactgcaaagcatacgcaccgcttaacgtatacggacagacgaaacttggcggggaactggcagtagcacagacactcgggaagtatttcatcgtgcgtatcgcatgggtgtttggattaaacggaaaaaattttattaagaccatgttaaaagtggcaaaaaatcacccgcaggtgcgcgtggtaaatgaccagatcggcacaccaacctatacttacgatctggcaagactgcttgttgacatgatggaaaccgaaaaatatggttattaccacgtaacaaacgagggtggttacatatcctggtacgatttcacaaaagaaatttaccggcaggcagggatttctaccgaagtgcagcccgtgacaaccgcggaatacggtctgtcaaaggcagcgcgtccgtttaacagcagactggaaaaaaagaaactgaaagaaaatggatttacaccgcttccaacctggcaggacgcactggggcggtatctgcaggaattaaagagacagggggaactttaagatgaagggaattatattggcaggcggcgcaggaacacggctgtatccgctgacgatggtaaccagtaaacaattgcttccggtatatgacaaaccgatgatttattatccgctgtctacactgatgctggcaggcatccgtgatattttagttatttccacgcgggaagataccccgagatttgaagcacttctgggggatggaaatcagttcgggcttcatctgtcctacaaagtgcaaccgtccccggacggtctcgcacaggcatttttacttggagaggaatttatcggagaggatgcctgtgccatggtacttggtgacaacattttctacggaaacggattcggaaaaattctgcgcaatgccgcaaaggatgcacaagagggacaggcaaccgtctttggctattatgtcaacgatccggagcgtttcggggtcgtggatttcgatgcgaacggaaaagccgtatccattgaggaaaaaccggcacagcctaagagcaactatgccgtgaccggactgtatttctatccggcaggcgtgagcgcgatggcaaaacaggtaaagccgtctgcccgcggcgaactggagattacgacgttaaacgacatgtatctgcagcagaaaaacctaaatgtacagctgctcggccgtggctttgcatggctggataccggaacgatggacagcctgctggatgcagcggcttttgtacagatgattgagcaccggcagggtgtgaccatttccgcaccggaagaaattgcatatatcaatcagtggatcacaaaagaaaaactgatggactctgccgcacgctacggaaagagcccgtatggagagcatttaaaagcagtcgcagaaggcagagtgaaatattaaaatcagcgtaactattctgagggggttctgaatagttataaatcagcatgaaagaggaaaaaacagtgggacagataacagtggaaaaaaatgtcggcggtatcgaagggctgtgtgtgattacaccggccgtacacggggatgcccgcggatatttcatggagacatacaatgaacgggaaatgaaagaagccggatttgacatccagtttgtacaggataaccagtccatgtccgtcaaaggcgtacttcgcggactacatttccagatcaactatccgcagtgcaaactcgtccgtgccgtgcgcggaagcgtatttgatgtggcagtggatcttcgcgaaggttccgtaacctatggaaaatggtacggagtggaactttccgaggaaaacaaaaagcagtttctgattccggaaggctttgcgcatggcttccttgtcctgtccgacgaggcagagttctgttacaaagtcaatgacttctggcatccgaacgacgagggcggcctggcatggaatgacccggcaatcggtatccggtggccggatgtgcagggggagtatcagggaaccccatcggcggaaggatattgtatggcagatgggacaccgctgacactttcggagaaagaccaggagtggccggggctggagaaaaaatagaatatggtgataagaaaaagtgatgatgtatgagaaaaaaagaatatatcatcactttttcttattaaaacagaattggattgactaccgatgatgacggagatagtatgaaaatatacttttgagataaaattgtaaaaaacaaacaaacttattaattctacatattattaatggggaataggaatgacaatgtttagaagagaaaagaaaaataattgggctttgatcaatcgtgtaaaatatgacggcccttgtgatggttcgccctggctgatctataaatatccggaagaggactttgtatatggttcacagttagttgtgaatcagggacaggaagccttattttttaagggcggaaaggcattggatttattcggaccgggaacgcatacgcttaatacagggaatttgccacttttgaacaaacttgtaaatctgccgttcggtggagatactccgtttacggcagaaatttattatgtgaataaaacttcgaaattaaatatgaactgggggacacagaacccgtttccggtagaagatccgaaatacgggattttgttatccatccggtcgcacggtacatatggattgcgtatcgatgatacaagaaggtttgttgcggaagtggtaggtgtagttccgttgggggcaaccgtaacttatgaatttgtcgcagcatattttagtggacttcttgtatcgaaaattaaaaatgtcatttctgcatatatgatccgcagaaaaatttcgtttttggaggttaccggatatttggacgaaatatccgaagattgcaaaaacgcggtgaaagatgagtttgaacgatttggtgcggaagtcataaatttttatgtggaaaccatcataccgccaaagagtgactatgaaaaactcagagaatacaaagaaaaatgccttatgggaaaattggaatga

SEQ ID NO: 655 - DNA, 31008 bp, unidentified
  source 1..31008: mol_type = unassigned DNA
atatttgcatattatttatatggataagaattataactctagtgagtcttctgcatctacccacatctgtaaattaccctcaagatataatcttgcatattccaaaggctcatccacagccaatgaagtaagcgcacattctgatccgtatgtggtttttagatttttttcagctttccagcaatcaatgcgaagcatatatccggcacttgtgtaaacatcaatactatcgtgatttatgttgtattctgcataaattgttctcatcgtatcttatctccattttcttttgataatcagttatagagttaaatatcgaaaacatttcaatcagttcaccatgtcgttattgttatactgtgttatgaaattttctttcccttattttttcccatattaaggttcatgaaaaccaatgtgagaatataacacaagggaaagagtaagggaaagctcacttgctacaaacttagtattttcaagggtttgcgaagaatttgataattaaatataacagttattaaatttcctaaaatatgtgaaatatcaactgtaatttagataatttatttatattaaaattcttgttttctattatttctataattttccaaatatgagcatcatctgaatatctatttgacatccttcttcctaatgcattaatacgagtttttaagcgatcacatatttttactgtattttgatacgaagcaaatctaaattgttcagaacatattctaatctcttcccgccaatcgcttctttcttttgttatatactctaacccatttgatctattcgcagaatataaacttattaatccagaaataatagcagaaagaactgcagacccaaaaatcatttcaacactcatataaacctacctaatctatatagttttttcctcatgataattagaataaaatgttagtagctagccacaaaaaggcaactacataatttgggcaccacaaaatcagagaacaatctaacaaatgtattctccccaatcttcttattgatttttatggttaaatatttacaaattttcatagcattagcttttttacttgctaacagtattttccatgtattcagtccacaatcatgcaccaaactttgaccttctaaataagttcaaactatatgcaaaaactaaaatattgtaaattatatatcagcaactgcatcacgcacccatttgccgacatccgcaaagccttctttttcattgcaattttccactgaatgaattggatagatttcatccaaactttttgagcctatcttatattgcgataagaaatccttatcatattgtccagacgaaatgtctatcaaaacaaatttattgttttcctctatactcttttttatctctatgccaacccatctactttttgtcattcctttactcaagatcagtatagttacggaagtactttttatttttctgtcaatccattgttggatcttacgcttatctgctatcttaccagactccttaaccggatttattcccggttcatcatccaataccgataagattaatcttgactgctgatttgctccagcgaaatgaaaactaacaaaaacatttatctgattatatacatcataacctgatgtgtcatcatttgaaaaagcatctttcatcaatgtctttttcaaattttgttctttcttatgtttttcgctttcaatcatcgacataatatcatcaatcaattgcatgatattgatattctctttatttaacctatcaataaaaggtttatgtttgttttctctatatacttcattataaatatatcttgatgttaaccctgtagcccctaccggaataatgtttttgatttcttctactgctatctcatattcaagatatgtaccgtctttatctaattcatcctttttactattattatcctcatataatgtctttccaaatagaaaaatgactgttccacagtcccggatcaactttcttcgtacttcatcttttttatctctttcctgttgttcgactgatatcagcggttgaattgttaaatgcttagaaacataatcagctcctcctctctgacttcctcccatataggcaccagaaacaatatagttgcctataccaaccccaaagccattcacaatatcatatccatcatctataattctcttcgcaagttgcataataaaccattctccattcttgaatttagaattacgtggttttctattaaaatagcctctataactatgcggactctttggatccaatgcacctgatatgaacactttattcaaagtatacttatctcttatatagctgagcattgctgtaatctgcgtgaagtcatcaaccagaatcgtatgaattccataacctttcatacttctgattttcaaatcctgcagctttttgtcctgttcaaactcaatttttttctgccttgtaagatttcctttctcgtcaagataatcttcataacttacacttctcataaagcaataatgtgttggtggtgaatatttctcaaatgtatgacgcactatacttataaaacgatccagattaggatcagcaaatccaaacccaataaataaaaccgtttttgttatcaattccatgaccagaccttttgaaaacactgatcgatatacatcatataattcataatcagttttagatataactgctctatccggaaaatttttatcaccatgcatcttatatacaacagcatctcttcctggagtataatttttgtattgaatctgttcatatattacatccacagtctttccattcctaagaagagtatcctctatgattgaatcataatttgtcgtccaatatgtatcgataggcagactcgccaaaatctccatattgtcatttttggttggaacttttgaaaactcattaagtatagcccgattcaatccttctctggtacattcattctcatagtactgtgcaatcattgtaagatcagtatttatattcaaaccaagataatcactcataggctttatcaactgtttccaattaacataacctgatgatgcagataaacctgctcctgcaaaaatacttaatctaccatttcttaatgcctgtactatgttatctaaattttttattttttgatcagcctcaaattcaagccgatcttgttccaataattttctaatatcagacatataatatatttcactttcatctaaaataaacataatgaatatattcctaatcattatgttctactaaattcattatatgacagttatgcaaaaaaatctataaaaatacgattctcatatattctttatgttctcataagttttatcttatgaaaatcagattaaaagtaagcgtacattttcaattttgtgaatacttcactaccagtatttttattcatgccgccggaacagaaacgatattcatctcgatttttacaacttcctgatgagactgttcataagttgacaactgatttttctctggaatatctccgcagctattcttgcggagacgtttcactcagttgtaaaaggtgcctggatttatgtcattatttaaacaccactgattatcagacaatctgcttttccgacattccatgatcaagcggtattgttgttcaatcagtactcttggtatcttccttaatatgctcaaaccaatccaagatactacccgattccttataatctgctattttatctccaatcccatatatcctccaaccatatttttcattcttttttacaaaattcaatatccaaatatctggtatttgatgtggctgttctacaacaaaagcattttcaacattttgaaagattttcaaataagcaatatcatgtctatcattatattgaaccctgctgcttaaaccaatatttttcttctctataacaaaattatgcaaatcggaaaaatctccccaatcacttcttacccatgggaatactaatttttctaatgtttcaaccgaataatcttctttatatgcttcttgaagaaatcttgaacctcttagataaatttctatatcttcatcagacatatcttgaaatataccttttatttcggtatcttccaaatctcttccatataagttcttccaatacggtgaattttttatatcatgtttttcattcgttgaatctcccataaaaattacagatgcacttgtttcctcttgctgactatacttatttttcattttatcaactattgaattatatgtatcaacaactattccttccaaaacagtaatatattcctttacagccataagatacacatttttatttgtcttgagcaatctttctattttatctggatccgcatgtagatataaaccatacatcacatcctctatagctttataaagattaagactcgtcccgtcagacagaattacttccatataataattattaagcttctcaaacttttctctaagaatattaatattttctcccacttctggatacatcttatcaatggcatcaaatacattactcaaatatacatcttccctgttataatcatatttcctaagaatcattaatttagtctgtaacataacataaaaagcttctgtattttcttcactcacttcctgattcttataaaaatcataaaatctgatatattcttgtacagtatattcaaatctcttcaaaatctgttcttcatctattttctttacgctgttattcttccccatccgtgctttcctcttctttaatagcccagctttcatctaagaaattaggtatatcttctggttttacagctttatatcctattccaaacatattatcagcacttaaatgaccaaatctaggaagtccatttgcttcctgacttaatttttcaatcatcttattattctttatttcctcttctattttcttagaaaaatagacattttctgtatgctcaaaaatcaaataatttatgtactgtaataccttttcttgtgaagaagaatttatttggtgtcgtaactgcctataaagcttatctcttttatgataaaatgccaatacaacactctcatcttctaatggaaacactgctatatgcatatattgcattctgacagattcatcaaaattatatatctcattgagtatatttccctccatatcatatggtaatacaatagcactttgagttgctattggcactttatatggtaagactttccaaaacaaaatctggtatccacctgctttattattcttcgctatatcttgatgaaataagacttcctctttatattctttttgatccaaattttttattttagacaattcatctggattctcatatgttccaaattctcgctgtaccacctgaattaattcttgttcattcgcacgtttatttaactgtaacagcatattttttactgcaatttctgcaagaattttatctgttggcggttgtattatattatctggattttcataatcctgaaagaatttcgcatcgcattccctacaaatataattaaatgtgccagatttatttacacctccatccaaatctactacccctatatcaaatcccattgccaatgatgcatgtaaaacttttcccctatctgcaatcggacgtaaacacatttgtggaacagaatgagaattacaaaaactactttgttcttttccacacaatatacattttgggggttttgctttttttcgtgcttcagaaagcattttattcactttttttctaacttctataatatctgtaccttctggaatattatcaaataaactcataattaccaccctaacattctacattccttaagtttctataagttgatggtaacatagacaaattaattcatcaatagaatttcaaaactattaactctaacaatattgtatttctatttgatataacatttgagcaagtaatcctgtgtttatacctacggcataagcaactgaggaaatagtagccccggctataacctgtgcaacaagttcatatttttcctctggagtccattttctattttggctgtggtgttttaaacaatcaggagatgttacttcttccaaatggtgccatttaacaatcatgtcatgaaaattctttaggtttgtgatgtctgctggtggttcaatccatttcccttgcctgtatagttcgactgcctttcgtttgaattcgtaactgtaacgcataaaaatacccctttcactggatgtccagtaaaaggggtacatatcagttcagtttgtccacacggcatttttttgtcttaggttcttgtttatttcagtttttcgaggatctcgtccgcactcatcccgcttgccagcaacttcttcagcacaacctctgcttcagccttctttgcttcttcgcttccagggatgccacttctttttcggccttcttcagagcagtcttcttctctttcagtgtattcttctgctcctcaatcgctttctggatggatgcgatttccgtattcagagacgcaatagtctcctgcttctccacaatcttggatgcgtagtcgttattagttttgggacggtttttactgcctttcgttctgggcctagtgataacctctttccttttattgtggtttaagtataacactgtgtttgagtgctggcaatatactattattgttcactattatctaccaacaaggaaaccgccttattgtagacctgtattccaatcttactttcaaccaaaccgcataaaacgccaattacaagtgcaggcttgatatctgtaaaagccttggaaatatctacatttccaatttttacatctataagaccaacattcattaatagtgcaaaaatcaacgaagcaactgcaatataaatcagacggataactggcgtcattttgtctttttccaacgaagcaagatcctcaaattctatttcaaattttcttgcaccaaatgaaacccatgttcctgttaaggcaccaattataatacataatactgaaatacatcctatccatcttgtaaaatagaaacatattcctagcactatacttgctattgcgccaataattaaggcatctatccctaaatatttcatatagtggttcttgatacgttttccttctacaagaactatttcatctttcaacttcattaatgcaaattctgctgtttctgtctgtgccggatttgccacaagtccaacctgagacaaggaaagtagcttatcaaaatactttttcttagtttgtttatccgtgttttctaatgctttaatgatattgcaggcagattctgcttttacatacagttcttgttgatcctttggaataacactatccatagttgaattaacttggaaactgatatcaaattcctcttctgcattttcacatacaagaaagtgtccttccattataacggtctcccacaggttttacacacatctcccgacatatgtaaggaaaatccgattgtatcaattactttacttaacgactgaagttccatcaataaatgaagttcgtcctctgttttattttctttttctattagctgagcttttagttttcttaattctctataatccatcatagctccctcccacaagtagggcacactctcgttgacattgaaaggctatgcttcagaaatacgggtgtattatcgagagcctcaagttcagcttggattttttctcgatcaattcttatatttgattctcctgcctggaggtcatttaaaagtttttttaactctggcgataacatatgttcatcttctttcaatttaacataaaaatctatcacatcttcgccgatcataagatcgttgcctactgctcaccacggagaggtgtgtgatattattacgagcagcgtagggagctaccgctcccattatatcacaagtctgaaaacaaatcagccttgtacacaccatccgccaacattttcttgaagctgttttttacggctgcgacatcctcatgataggtcatgccataccaagtgtcattggtcttcaggacctttacggacatctttccctgctccagcagctcaccgatgaagattgggatcagatactcggctttctgaggattacccggtacttctttctcgaaaaactccttgaaaccattttccagcacatccagaaaatcaggagtcaagccccacatattcatggaaaccagagaatttacatcaacagccacagcgtctgcctctgctccatctgcagtctttacgatgttcttggtttccacaacctcagtcaagtttccattctcatccatcttacagataccgcgagtcacaccgccgttatcggacagagtgttcttcaaaacgaaaccagccatacaagacttgccgccattcacaagatattcatggacagccttaaagccttccttgccatagtaatcatctgcattgattacaatgaacggggtcttgattaccttcttggctacaagcacggcctgtccggttccccacggctttgtacggccttccggaagttctcccggaatatcgttgatatcctggaaagcatagtcaacagttacattatgagaagagcaaatggaggcaatgcgatcaccgatgacttctttgaactccttctcgatatccttacggatgataaataccacatgattgaaaccagcctcaatcgcatcatggatcgagtagtccatgatgatatggtttgcatcatcgactggctccaactgttttattcctgttccaaatcggctaccgattccggcggccatgataagtaatgttgtgttcatattttttctttcctatttttttaattaactaacatattatatatatactgattagaacgatttctcaatgtatttaatgtgtgttccacctgtatataatcaatttttctgttaccattggtttctccataattcctattgctcaaaccacaccaatttaaaatattatcaattctatcgtctttttttattttaccagtttgatccattgctcctactcgataaaactcttttttaaaaataatggaaaacgcaatcccatgaaaagaattggaacatacacattctgcattttcaatcagatttaaaaaagcgtctggtgccacatcccacatgacttttattccatattttttagcctttattgcactatatcccgtaaagggagttacaattttgcaccctcccaacctctcagctactcttactgtctgttttaacgcatcttcatcatagttgatcgtataaaggaatatatacttttcttttaagatacgctctttatcgtatagtcccgaataatcttcttttgtaagtaaaaatgcaggatccaaaacggtctcaatgcttctttttgtatgcttttcaagaaattctcttgtatcaatttctcttactgaaacattctcaaatgtctccatagcactacaaattctatcacaatcaacttcatttaaatgtgaaccacagcttacagcatatgtagacttcttggaaatacccggaagaaaaaatgcctctgaaaaatctcttgcagtcgtgttccaaatctgatcacttccagctataactaaatcatagttaccagcaatttttatcgcttcctctgttgtagtacaacgcttcgtcatttttaaatatttttcacgcatttctgagaaagccaaaaatctcttagataacgctttataatgccagaacgatattaaatttcttaatatatcctttttagaatgaatttttctaaaaatagcatattgctgttgctgtgattctggttgaaaatcaataatctcattttcaacgttatcaaaatgagttgttatatatttttgtagtgcataggcttgaagaaatgagccgttattattaggcgcatgaaatgttatagttgctgttttcatattatttaacgccattaactatggcattctctcctttcattttattaaaaccgattcattacactttcaggcaacaatttacacagatgaaataacaatttccccatatgccatttcagcatatagaatgggagtgctttcactgctacaaccggcggatagttttttaccgccttctggacatcaggattattaagatactcgacataaacagcataattttcttttgaagatgcttttgaattatgggaaagcctcaaggcaagctgaaccgctgagaaaatcaaagttccctgccaaaattcatttgtattgactccgccttttattgccatcgaatcaatttgtttacgagcatcaattaatttgattttatttcttgtcattaaaatcggatttccattactcgtaacattagcacttccttctcgaatcgtcagataataaagggtacgttcctgaactccaattgattcagcaaagagcaaataggtattgataaatttagtatcttctcccaaagagagagaagcatcaaattgaaggttgttcttttttatcgtttcaacatccaacatgattctccaaagtgccgtatgctcttttccagcgcgcaaacctctttttccttttaaccactcatttacatcctcgtatgaatgtcccagaaaagaaggaatcacctcttttgcaatctgatcgtcccggaaacttccatgtaactcaaagacatgttcattttccttttttcctaacactttatctgcatatccatacagtacagcatccacgctctgagcaattgcaaaattcacacagctctcgatcaaatcattttcaaatgtatcatccgagtcaaagaaaaatagtttttttcctttaacccttttaaggccattgtttctggctatagaaacaccttggttcttttgataatagtactctacgcgatgatcttctctctgatactctttaattatctctgccgtaccatcgcatgagccatcatcaacaaagataacctgcagatttcgatacgtttgtgcctttaatgattcaatcattggttttatatatttttctgtattatacgctggtattacaatggataccaaatcacctttctctaacatctacttcctccagcactttacttatgcagcaattgtttgattttctgtctggtttcttttggcaaaactcttctaacaatacttttcgctttctgtttcggaatacggcaccaaaagtaaaattcaaccgcaccatatccccattttctatacatatccagtacattttttcttgctttcgtaagtttcaccggatgtaccagctgcgtatttcgctttgctgctttttcaaaggttgattcgtaataatcaaattgctcttttatttcatcaaaaaaaacaattcccttatcgctattaattaagctaacggaaataccatttttttcgctcagccggcctccattctgttctaatgtctctggatgttcctcttcaattccccagtaatcaccaatcgtaatgtcgcccgttcgttttccatttgtgtatttacaatgataacaattttctctcaacgcaatagaattaataaacatatcaaaataagacgaatctgaactagcagtcctataatattcagtacttccatccacttgaatgtactttgcggttaaattgtatccccaacccgaagatttatcccgaaatttaaattcactgatctctccaccaatttttttctgtgtgtagtggatgtaatcattaaaaaattgttcacttggaacgccatgacaaataacatctaccgtcagcagattcgggtaatctttcctaagatacgattttaaagcatccacctgacaaggagtgcctgaaaatagaacgaaaatatcattctttaatttcttctggacatctttaaaaatatttcctaaagaactctgtacatactttgaaccttgcaaatggtagagttccttttttgtctcgcagcagacatgtcgaatatgcagttcatgttcttcatgctgcataaccgctccatatacacatccaccttgttccagcacctgcactgccattgttgcaaacaaaccacccgaagcagatttttttacaaggtcattattcttacttgcaatcgcatatactctctgtggctgttttctggttggttcattttgaaatgcacatacctttttacaggcaccgcactcgacacatttttctgtatcaattttagggtatacaaatccgtattcatctttttccatgtggattgcagtcttcggacatatattcatacacgccccacagccacaacaatccttcttttccgcaaataattctatcattttttatatccttatttctgctgaatcctttgaacaagtttctcaatatggaacattcttgcaattaaagaaactgcatctgagaattctggtattttaaacaacattaaaacaattacagcatttgatatcaatacacacaccgctgcttttacaataaaacctacccagccttctcccgggatgaggccaatcaccagatttgtgatcagtgttgctattactgccgtcaacaaataataaccaagtcttacaatataatctttagcacttcttttaaaaatcagtttaaagatattcgatgtgatccacggagcactaataataaccatactaacaattgttgaaagaacgattccataaagtccaagaaattttactatcaatagattcaggcctaaatttgttattccagaaagaagcggcctgaatctatcttcatgccaaataccgcctgcatccttatagacactagccatcataatatactcatatacccaaaaataaacacacaaaagaattactaatggatacggcagtagtaagtcttttcccatccaaagtttcatgaaaggctgaaacaatccagagaaacaactgacacaaaatgctgtaatccaacatgctaaaaacgtaaaaattcggtaatcgtgatagttcttttcagtatcatacacgatcatactatttccaacgcctgcggtaatagacgaataaataattgcaacaaaacccatgaccgcattaatgatataatagtaattctgatatattgcaagtgcttccaaccccagaaaagctgaaataaccactgtatctgccgaacttacaatcgtgaagcccaattttgaagtaaacaaatctttgattttctggttgatttcttttacgctttctttcggaagttttccttctgcctgatattgtggatacagcttatttgacacgattgcagtcaaaatattattgaatatctgtgacagcaacagcacacacacatagtaataataattatgaaatgcaaaaagcgttccaatctgcagaatatacttgcatgtatctgtaacaatcgtcaccttgctgacaacatcctgacgctgatgagcctgtaagatactattcttgtacgcaaagagccagtatgtgaatactgttgccattaagttcaacagatacagtacataaatattaatgccatccggaacatcgccagcaatcagtttcggaataaacggaagcagcaccatgcctgcggcaaacacaaccaatccgattgcgcgataataaactttatacagcctcattaacgcacaaatcgtttttgaatcttcttgtgcaataggcttatacatagaaaacaccattgcgcttcctacacctaactccgccaaatttaatacctgaagaattgaggtaaacaagctatttagtccaagatattttacccctaattcatacataataattgtgcgcatggcaaatggcagcacaagttgatatattttcaagataactccaaatattatgttgcgtgtagcatttctgcttcggttcatttccattctctctagtctcccaaacgattagtcttcaatcgctttcgttatgtcctttatcgcattttctgcaagttccagtcttttgccagttacaaccgtataatcaatctctttctgaaaatcaagattttgtatgtcttcctctttaatatatctttcaagaattccaagctcacctaatatgttacgaatacgttcatcatctacatattctccgttaatatagtcattaacagaaaagaattttttctcgaaaattatagaaaaagctgtaccatgaaaagaatctgaaaggacaagatccgaattcatgacaaaactcagaaaatcttccggacgattcttatcccggataattctaatgcccgattcctttaattttgcaatctgagtcgctgatctacacacaagaaccgtataaaccggcttctctaacaacttcgacaccttttgtgctgttcgaattgtagactcctgataatttgcgcagtacataaaaatatatggcttttctacaatacgcttagaggcaatcgcagcaaatacttctttcgtttggagcaaactgggatccggctgcactttaacttgcttgtctgtgttcagaaagtgtgaaatcttttttgctccgctgtgttcccgaatcgatatataatcaaaatccagtatgtttttacggagttgatcatcacatacatcttcgttatatgtcgcagtattcacgcttgcagcatatgcaattttcttatacgattgttttcccggcaaaaagaaaattgggtcgcaatctttggccgtcacattccaaatttgatcactaccacatatcacagcaccatagtattttgaaaactcttgtggagatgaagcccgtgtaaacttgcaggcactcaatgggagatgttcctctcgaaatttctcgaatccttttttctgcttccacagaatatcaaaaacagacaatctgcgaatattagcagcaacattatgaacactcgtatttttttcaaagatccgatactgtatactatatgatgccggctcataatctataatttcaacagcatagcctcttttgctcaacaaatcgctcagcgcaaaagcctgaagtactgatccatagttaattgatttatgaaatgtcagtattcctatctttttcacacaatcacactcactttcacctttcatttttatacaaggcaatatgcgatcatcattcccttaaattttgttggaaagtcagatttcaatacatattctttcacatattgtcgacatatttttttcgttttttcctttatatacttatcctctaatgttccccttttcaatgagccatttcttatggccttggttgcatctcgacggataaaaattgctttttctaccagcaatttcttcgcaatctccaaattcactttatcgttattatccagtaatacacaaacaattttttcgagcgcatcaagttgtgtcaccttcttcattgaaaatgcagcgcttgtcaatccattcggctgaacatcataattgtacaacttcttaggaactacaacacaattttgaatcccactcgcatattggatcacaaacaagaggtcttcacaaataaagatatcctttttaaatctaattttgtcagtttcaattatcttgcgcaaaaacagtttattccacagatatcctccaatctccggatttgtcaagaactggaatattgctttttgtttattcagataaacaacctcattattattacaattcgatgtataatagcatgcacataactgaaatgaaacgccgttcataaacgttaccattatctctagtgcattttccgtaagccaatcatccgcatcacaaaaagcaacccatttcccttttgcatgctccaaagcataatttcttgcttgtgccgggccagaattttcaattaagtagccctctattctactatcttctctacacttctgctgtataatttcttgtgtagcatcttttgaaccatcatttacaataataagctgccaatttttataagtttgtttctgaatggattcaattgctcttgtgattgttttttcggcattgaaggccggcataataatcgaaatactgtcagtagatagcatcttcatctcgcctctcttctttggcattggttgcacaatttataagtgccaaaaacacataaaagaagacaccaaatgtaatttctatgatgcctgccacaataagggcaaagagccaaaattcacaccattcaactacatccttatttcttttatatcgatttcgtgtagctatgtagcatagtaataccaatgtcgctgcaccaagcatgccaaactgcactataatatgtagcattccattttgtgcattactatacaaacgttcttttactattaatgtgttatatccatacccaagccaatatttttgggttataatgctcatcagaatttcataaattctaacacgtgcattcattgttgcagtttcattgatagcgagcagtagcgcattaactcgtggaatactaagtatcgctgtcatacccagtggtaaagcacctgataatacaatcgatattgcaatactcagtggtttttctaatatcttacggattggaatcactagcattaaaataagaacagtcaagtagcagactacacctgttgtacagtataaatatccactaaaaactatacccaccacacaaaaggcaactactttaacctttgcttttacagtattctgaatttcctctatatgaataatgccccaagagcaaaacattaccagaaaataataagtcagtaaaaatttatttcctacaaaataaggttcataccaacctgcatctacccttccagctaaaattacagtagccattgttggaatgaaatatacatacgaacatctcaaaaagacttttgctactttgtttatcccactagcttccgtcacaattaacggaataataaaaatagctagcacactaaatggatgcaagaagtcgttcattattgcagaaatcccccatattccatagttatgaactgaggaaatcaatgtaatacctgcgtaaatccaaataaaccatgttttttttagaaggtccgaattaaaatgacttataatataaatcatacataaaatcgaacagaagaaccgcattcgcaatgctgtttgatatccgaatgagtatatcggaacaattacaatccacaaggaaatcaatgcgagtgtacttatagttattttcattccatgattttcattcattattttcttctccccgcattgtatagcctatacgctttcttataaatctccgcatatccacttatcaaccaatatccaaattttcgctgaattgatatggattcggcccctttccacaatgttttatttttacaaaaaatctcttctatctgcttgcatacttcatttgcaattttagagtttgccttaacagccaaattataattatatgcaagctgtttaaatagatgcttatacattttgtctttatctttttctgaaatatttgcgactgatatgaacttacaatccatatctattactttagcaatatcttttttgggaataatcttattttctcccataatactatctgtgcgaattctgtaattatatcttccatctaaagaaaaaaccaccttattcgccatcaaaaaagacctcggtgtgttctcaacatcctcgtaaatcagtcctttggcaaatgggcagctttttgcaatatcacttttaattaacttgccccatgcaaaccatatctctctttcgaaggcaaattccaacatttcaatgccagttccctccactattttattggtgagaagatctggaacatttttattgttggtccgcttacatgtacatgcaacaatttccgcattgtgagttactgcacaagataccatccattcaatcgtgtcatcatctaagtaatcatcactgtctacatagagtatgtattctcctgatgccttagctagccccgcatttcttgcatcggacaaaccgccattttttttatggataacagttattctatcatcttgattcttccacgcatcgcacattatcgggcacgaatccggagacccatcatctaccaaaataatttccaagttttgatatgtctgatttactatactacttacgcactcattcagatattcttggacattatatatcggtataacaacactgactttatgtatctctttcatctaattgccctccattatctctctactctaaaagtgtttttagcttacacgtggctgcctctatagaataatttcttaaaaagaagtcataattttcggggcaaaatccatttccaaaatcaagattatttattgcttttgcaaattcttcttcattattacaaacaacaatgctttttccaagtaagtttccggctaattctttataaccaatcaagctttcatctgttcctataaatatctttccataggatagagcttccgctgttttcactttcattcctgccccctcaaaaatagggccaacaacaacatctgcatcttcatagtaaggtgacaaatcttctactcgaccaagaaccttcacattactattgttactaaattcctccttcaataagtccattcggttaccaaccaatgtaacttcataattaattttaataagaggtgtcacatttttaataaaccatctgaacccgtttacatttggataatagtatcctcctacaaacaaaatattacatttatctgaatcaattctactgctcagttttggtgttggcaaaataatgggcaacaacatttctggagatttatgataatatttttgaaagagcttttcttcccgtttgtttaatacaatattgacatctgcatatcgggcagtttttctttcattactaactaacgatatctgaaccggtatggacttaggattctttttcgcccactcaactgcaagatatctttttatatcatgatagaatgatgcaactttgactttaggacagtatttctttatgatcctaattgcatttccataaatcgagtcatctaagaagaataactctacattttctctattaatcgtttctataatttcagaaataatttccgaattaatttttcctgtattaccttttaataaatttataagtcttataggtagtttatttacgactttttttacctgaatatctttttgatctgcgacctcttctgttccgaccagtgcaaaaactatcacattttctttaccgaacgcttggtacaaggccttaacatgcgttctggccaagctttgtgctccacttgcacttccaaacaaaaaatttgctacacacagtacctttttcatttgaatctccactactatcttttctttaacaccgctgggttcccataagcgacacaattatctgggacatccttagtaacaacacttccagcaccaatcactacattgtttcctattttaattccaccaataacggtggcatttgcgcaaattgaaacattatctccaattgtaggcgtaatctcacttcttgaaccattgcctttatttccaatagtaaccccttgataaaccgacaaattttttcctgccttatataaattcacaactgttccatgtccatgataaatagtgagcccccccccgatttgtccgtatatttccaagtcttgcttgattggatataaaatctgaaatatcaaagacagacctttatttttgtcatgaatcctataatacacaatgtttctaaagcacttatttctcagtaagttcttatttaaactgctcaaacttatatccgcagagcctatgtaccaaagatttcttttcaaatcttcttcaattatttcatttattttcaaggccaaacaaattagcaataccggaatggttctaatatagtttataagataaaatcccctcatcatgttcctctctcatttcaattaattatattctctgcttataaaaatccaaaacattagcttgaaatacactaaaatcaaatttttccttgtatgttatgtaagcatgctctcccatttctaatcgctctttttcattttgcgccaattctattaccttttccgcaatttcctgtgcgctacgtggtgcaatcaaaaaaccgttattcccattttcaattatttcttttgttccgtctaccgccgttccaattacaggtctatgaactgagaaagcttcaatcggtgttaacggaagaccttcccacagcgaacttagtacaatataatccatttgggcaatgatgttttgaatatcagagcgatatcctaaaaaaacaatattgtcttgattatattcttcttcaacttttcgcttcaaagactgttcatcttcgccctgtccaacaacaacatacttcaacttatctattgattcgtgcacctttttatatgaatcaataaaatattccatacctttttgttcggaaagtcgccctatatttccaactataatatagccatcttcttttaactttttcaaataagcatccggtttaatagattccatataaggtttgacagcattatgtattactgccactttatcttttgacagatggtagtaatcaaccaaattagtctttacttcttcaccacatgctataacactagcatttttgtatgcaaatcttgtaagtccattcttatcggtaaatgtattatgagccgtggcaaaaaatttcaagcgactattctgctttttcaacaatgcagtgtaaaatgccgccattctatgatgcacatgaataattgtaatttcttctttttttacaattttttttacttggctcagtgttgaaaaaattgtttttaaatcttttttctctatatccggtatcgtgtagtgtttaatccccatagtttgtaagcgtttttcatttactccaccacatgagcaaaccacaactttattcactactggatttaatatttcacaaagctgtaatactacattttcagttccaccaagtcccattgttcttgtaaacaataaaacattttgattctgtagtgtttccatgactcgctccaatctaatacattattttctatacttaatcgctagaccaagaatctttcgatcatccaccaagtaacgttttgccatccgtttgggatcttgagtaatcctaaatagccactccaacccatgatttgccatccagcgtggagccctcttaatatttccggcctcaaaatcgaaactagcccctagcccaaaagaaatgggaactccaagctctgcacaatgatgatacataaacttttcttgcttcggacatcccaaaccaacaatcaaaatatgtggggttgcctcttttatcatggatttaattttatccatttccacagggtctttttcaaagccgaatggaggagagtatgtaccaacgacctgtaggcccttaaatctattcataagattttctgccgcttttgctgccacgccctctgccgcacccaaaaagaacatcttatatcctttttcagcagccatctcgcaaagaagaggaaacaaatcagatccagatatcttctccttaatcggtgtgccgtaccagttagcaatccacagcagaggtttaccatctgtcagaattaacgatgcattcttgtatactgcctgcagttccttatttgtttcaagctgcacaatatgatccacattaggtgtcaccacatatgcgctttttttttcctgaatcagctgatcaatggcccgcaatgtttcctgcattgtcaggttatcaatctccgtattcataaatttcattcttgccatttattcatcctcaccactgactgatttagcaccgaaccttaatcagctctgcatctccaacaacaagacacctgcccaacccagctggtaaaaacagcgtttcacccttgctgaatcgcatcggtctctgttccgcatccatcgtctgcacttcaccatatccatccaggcacattaacacctgaaaagatgcatccataacagagaatgcaaaacctttcgttacttgtattctttctgtttcaaaatatttacaacggcaaagtagttcacgagagcagccagaatagtatttcactattctcggtttctggctcacatctggtgcaactttcatgttcataacctgcacagccttgtcaaaatgcagctcacgttttttaccattcttatctacgcggtcatagtcatagactcgataagtcacattagaactttcctgaatctcagccaccagtatgcccttaccaataccatgtacagttccagctggaacaaaataggtgtctcccttgtggactggaactttttgcaagtgtttatccagtgttcctgtttcaatcgctttccggagaatttcttccgttacctcatgctggaaaccataaatcaggctggctccttcgtcagcatcaatgacataccacatctccgtcttgccgttgtcgccttcatgctctcttgcatagtcatcactaggatgaacctgaacggacaagtctttctttgcatcaataaacttaaccaaaactggaagttcaccattttcaacttttgtaccgaggtactccggatgtgctttcagcacgtcggcaagtgtgttccctttatatgtaccatttgccacataacttggaccgtccggatgaaccgaacactcccaagtttctgctaatggtgttaaatcaatttttttaccatattcttcccgaagtcgagtaccaccccacaaataatctttacccgtcggaattaatttcatgatttccattactctgtctcccactgttttttattccttcggaaatttaatcttatctgcaacgctgatttcttctccaagctgtacttcaatcatatccagtgccgtaatagcctccactgtatgcttgcaacctgccgcaatagtaattacatcaccagtgcgaagtacctgctccatgccgtcaacgattgccttacctttaccagaaactacagtccatacttcctcacggtagttatgcatatggtaagtcatatgctcgccagctctcatggaaaccttgactgtcatagagccaggctgaatatcaataactgtataagtaccccaagacttctcagcatacattgcctctgtttcgattttttccacataaggcttcatataaccgctgcgttctttatcagcgattaagataccatcaccactggcggcaacaatcatatccttgcaacccatgcagagaatcgggatattcagctcattcaccacattagtattctcacaagtttcgtccagaatgaccttacccttggtcttatccgccatgacctctgccatcatgttccaagtgccgacatccttccaatcaccgctgtaacggagaacctgaatgctggactctttctcgaccacagcatagtcaaagctaatcttagtcagggtatcatatttattgaacagatcacgataatcttcaaagtcgatcatgctgtgtgctttgtccagcaaatagcccagcttgaacgcaaagatacctgcattccacagcgcactctgagccagatatttcttagcgttttccacatccggcttttccttgaattccttaaccttgctaacgttttcgccgctttcaggaataatgtaaccgtacttctcactaggataggtcggctcaatacccatcagagtcagatttgcaccgccctgctctgccaattcttgtagggtcttaacggcttcgtaataggtattatctacataagggtcaaccgggcaaacaacaacagcttcattttcggcaacgcccatctcatcgtgcaggtatgctgcagccagtgcaatggctgggaaagtatcgcggcggcaaggttctacgcatatggatgctttctcacccagctggtttttgatagcacttgcctgcgatttactcgttgcaatggtgatttttgcgtcagcatctaccgtagtaatctgacgatagacacgctgcaccatagactcatactcgtcatcattcttgaacagcttgatgaactgtttactgcgcacgtcattagaaagaggccagagacgcttacctgaaccaccagaaagtaaaataatattcatttgttttctcctctactctttacttcaagtactcttcggcacttttacgaatttctgcttccaccttttcagcagtttccttattctctgcgctgacagagatataggtcttgagctttggctcggtaccggaaggacgcaccacaatggagcagttatcttccagaagaaacttgagtacatcggacttcggcagctcatccagacctggtgcgtagtccaacagtttaacaactttcttaccgccaaactccttgatatcgccacggaatgcctgcatgatgctctgcatcttagcaaaaccagcactgccatcgaactcatagctatgtagcgtgttcaagcagtagccataggtcttgtacagttcgtccaacttgtctaacaagctgatgccttgagtagcatagtagctgaacatctcacagatcatgtaggcaccgtctacgccgtccttatcgcggacgtaggagccggtcagatagccatagctttcttcaaaaccgaacacatagctgtccgccttgccctgctgttccagtttgccgatttgctcaccgatgaacttgaagccggtcagcacgttgatggtgcgcagaccataatgagtcgcaatctgttcacccatatccatcgtgacaatggtcttgaccatgactgggtctgcgggcatcttgccgtgcttcacacgctggctgcaaatgtagtccaacagtaacattccggtctggttaccggtcagcagctcgtattcccctgccttgttcttgacagcgatacccacacggtcgcagtcagggtcggttgccagcagcaggtcggcattgcacttcttggcatactccatgcccagtgccatagcttccttgatttccgggttgggatatgggcaggtcgggaagttgccatccggctgctcctgctccttgacaacagtgatattggtgtaacccatttcttttaaggtacgggtcacaggtttcaagccggtgccgttcagcggactatacacgatggccacgttcttgttgacttcttcgccaaagagaacagactggctcttgacttgctccacgaaggccgtgtagacctcgtccggaatgtaccggatgatgccgtttgacattcccgcttcaaagtcactgttcttgacatctgcaaaaatatccagcttttcgatctcagccagaatctcagcagcggcctcagtggtgatctggcaaccatccgcaccatagactttataaccgttgtatttgctgggattgtgagatgcggtcaccatgacaccggcagaggtgtgcagataacgggttgcaaaagacacggtcggaaccggcatcagagcaggccaaatattgaccttaacgccattggccgcgaacacgcccgtagccacctttgcaaacacatcgctcttgatgcggctgtcatagccgatggccacagacggctctgcaaagttctttttcagatagtcagccaggccctgagaagccttcgccacggtgtagacattcattcggttcgtgcctgcaccaattacgccacgcagaccaccggtgccaaaagcaagatcacgataaaaagcatcctcaatttttgtatcatccagcgttttcagttcagcggcgacatctgcatccgcagttgcattcatcagccatcgctcgtattcttttttaatatccataattcatttattcctccggtcctcatcgggcatatcctctaattttctatgtacacatccatatggatggtatttccctctaatttccactgtgtgataaccacactcggctaagtgttttcttatgctgtcgtatccaactaccccagcaatcatgtttctacttcataaaacatccgttgagtacactcgtccctatttctctataaccgaattgatgctttatacagtcgaaccccgtataccctgcaatgacgttttttctaagtgttggattgttgagtcgaaccctgtcggtgcatgtgttttattaaaactgtatatatcacctggccaaattctcactattcattgttcgttatgaacaaatcattcactctcactgcacaaaacatgtatttatcatcaccatccaggctctactcaacagctgttttatgaggtagaaatcatctgtttttctctatttttcatgactcaacaaaccgttatgatgtaggtgtcattagcaggtcagatagtgtactcaacagcagtttcagacgttaatgataaactcatagatttttgttgttttatcctgtttttcgccatttctatgattcttctgaaaaagatgtgtcaattttgtgccacaggggtcaaaagttcagcgttctgtatagatttttggcattttcagttcatatagctgtgaaatatagccaatttcagcaactcaattagtgtgcaaaacaggttcttttcgacgatgctacgtcaatacggtttgttgagtagacatttttctgctctttccactgcacaacaaacttgtccacaatggggtaaaccatctttcctgtcattgtcggtttatcaattcgatcaaaaacctcgatgtagaccaactttgcgcccatcattttaccaatataaaaaaacgggaccgcaactgctgcaccacaggaaataatcaaatctggcttttccttgtgtaacacattccatgcaatcttggtattcttaataagagcctttaaactccggtttgtcggataataacaaggatacattttctcaccttcaagcagacttcttgcatcctctttatcaaatgtaacccaaaaatgattcttatctttccaaaacggctttaacatatataaatgtgtcagatgtcctcctgacgaaccaactaaacatactttcatgtcctctgttctccttcatcccaagattttttatgtacacatccgtatggataggacttcccaatgcgattgttttctatattgctccatcactttgcataatacttactacagtcttaaaaataatcctcaaatcattcttaacactccactcgctaatatacttagtatcaagcttcaccacttcctcaaagtccgtgatattgctcctgccactcacctgccatagcccggtcagtccgggtctaaaagacattctggctctatggtgtggttcatacttttcccactcatcgagtgtcggtggtctggtgcctaccaggctcatatctcccactagtatattgaagaattgtgggaattcatccagacttgttttcctgatgaactgtccaattccggttttcttctttccgtttggcagcaccttattgcctatgattctaggatcgaagtccatcttgaacatcattccgtcgcccactttattctgtgccgcaagctccttcttccgctcctcggcatccatatacatgctgcggaatttatacatcttgaactttctgccgtttctgccgactctctcctgtgcgaagaatatcggtcccggcgatgctatgtatatcgccggtcccacaaatatcatgatgataagtgtgaacaggcagcccaccagtcctccgactatatccatgcccctctttaccagaagtgcgctgggatttgcatagttctcgcttgatgtaactactgtgtagtcgcctatcttttctatctgcttgtagccaccctgggctgtaccgttttttgctattcctgtatgtactgcaattcccatctccaggaatatatctgccattttttcaggatattcatcctcgctgcaaggcggaatgagtacctcatccacccattcatcgcacgcatagtctactatgccatcgtgattcgcaactatcggtatgccgcatatagtctcacccttcatgtctgtatccagtgaagctgctactatctttgtatagcctatacagcttttctccactgtgcacagtgtatctcgaagtattgcatcaggtgctatgacaaacagtgatttcttagatgctccaaagtcctttttcttaaggaagctcttgagcgctagtcttgctgcatatgttattgtcacatagattggaaacatgatataaaatgataatcgcgagtatatatcagccatctgtgtggtgaacagaaatagcgctgtcaccataaatacaagcactgcatgcttgcaggtcgatataaattcatccagatatccgcgtttcatgacattcttgaatgaatctgccattatctccacaaagaaatctatcaaaagaaatgctacacacagtatacggtagtccttgtccacatatgggttattaaagccgaagcgtatcacatatgaaattaaaaacgcaataacaatgcatgcgatatctataagcataaagtctatatgctttgtccatcctctgcctttctttctgtacattctttctaaattctccttatagtatctttaactcccctatacccactccgagggaggtacctttgtaccccccccccgaatatttttaatctgttttgttttttgtaagtttattcggattagcgtatcttttgttgtatccaattgggttttccaatgacctattttcaccttttttttattcattgtcaatgaatattaggttttatttacaatttttgacatattcgccaatctgtatagtattatcagctcaatattatacattatttatatgtcattctgcttatttttcctcaaacagcctctgcttcctctctatcatctcatcaatccttgcgatatactgccctacatccttgacattctcgcatctgtcgatgcggtgtgtgccatcaggattcggtacggaccagacacgcttggtgcttgctcctgctccgcacgccacgatcgtttgcttttcctccattatcaatatgttgtatacgccggccttgccctttgccgcatagcctacgttttccatgttgcctgccatgcccttctgtctgtagagatagtacggctcaagccccatctgcttacagtaggctgcgcagagatccatatgctcctgagtgttgaccatctgcatatcactgtagcggtccttgaagatggtaagtcttgcagctcgctttactgcaagtgaatggatagtgacgttgtcaggcgccagctccttcaccagctccattgtgtgccttacatcatcgagtgtctcctcaggaagtcccatgatgagatccatgtttatgttgtcaaagcccagctcacgcgcgagcttgaagctatttatcgtatcgtctaccgtgtggtgtcttcctattatatcaagtgtctgctgcttcatggtctgcggatttactgatatacggctgatgccgtttttctttagtgccagaagcttttctctcgtgatggagtccggtctgcctgcctccacggtaaattccaggcagtcctttaaatcaaagctgcatttgatttttctgataagcctgtcaagctgggcagggcttagtgtggtcggtgtgccgcctcctatgtagatggagtttagctttttgtggtagaatttctgcgccgtgtagtctatctccttctcgagtgcgtcgaggtaatcgtccacgcggtttttccacacacccagcgggtatgaggtaaacgagcagtatgcgcaggtgctcgggcagaaaggtatgcctatgtacaggctgtagccgttgtcatagtccaccttatcgagcagtgccttctcgcgctttgctatgcctattgagaggtcgattttctcatcgcttgcgaggtaggtttccttcagatagtcgtaggtttccttatcgctcatgccgtcctctatgcatttcatggctatcttggtcggtctgatgcctgagagtgtgccccacggaaggctctttcctgtgcccttttctatcatggaatacagggcaagcttgaggcggtttttggtctccttgcggtctgcgctgtctacggatatttttgtgcagatactttttccggctctattcagcgtccactccactgcaatttcatcgcccacatagtctatcttaaatacctgtgaggcatccgcaaattcctttacgccatcatctgtcatctcgtggtgtgtgcaggctaagtttttcccctccaccttatcaggtgagcagctatagtacatctgcacgtcctcctgtgggaaaaactccttgagcagtgagtgcacatcatattcaaaatccggtttattaaatactactactatcataagtaagggttatacatcctctcgttttctatggttgttgtgtcgttgtgacccgggtacacctctgtacgctcaggcagtgtcatgattttttccttcactgtgcgcacgaggtctgacatgctgccgcccttgaaatccgtacgtccgattgagccgcaaaacagtgagtctcctgtaaagatcacgtcctcatacgggaaataatagcagcagccgcccggtgtatgccccggtgtgtgaagcactactatgtgaaagcctgcgatgtcaagctcctgcttatccttcaaaaatacatccgcataaaaggtctttgactgccccatcatgtagctgacattaagctgcgggtcatcgagtgtggctttgtctgcctcatggatatgtatcttgatgccgtagcggtctgcgagcggctttgcatccgtggcatggtcaaagtgtccgtgtgtgagcagtattgctactggatttgcgcctgattcatccactttttttgcgagctgattagcacacgcgccagggtctattattatcatttcctttgtctttatattggtgacaaagtagcagttggtctgcaccggtcccactacgaagtggtctatcttcatatttaccatatgagtgtactccttgtctgttatatgttatgcttcacgcaagaaccaccgggatt

SEQ ID NO: 656 - DNA, 20546 bp, unidentified
  source 1..20546: mol_type = unassigned DNA
gcctcattttcgggcagcaatgccttaggctctaccagtaccggtgcatatacggtgttgaatttgtgtacgatctctctggtctgttcgatcatgggcagctggtcaccacctacgggaacggtggtcgccttgaaagcggtaatatcggaagcctggctgatgggataggtaaaaaatcccacagggatgctggcttcgaagttacgcatctgaatctcactctttacggtcgggtttctctgtaatctggctacggttaccaaatccatgtaatagaaggttagctcgcacaattcggagatctgagactgaatgaagatcgttgccttgctgggatccagtccgcaggacatgtagtccagcgccacttcaataatattctggcgcaccttctcgggattctcgatattatccgtcagtgcctgtgcatctgcgatcatgataaaagtcttcttatattcaccggaattctgcagctctacacgtcttctcagggagcctacataatgtcccacatgtaatcttccggtgggtctgtcacctgtcaaaataattttgtccatttcgtcctctcaatccgccgtctatgcggctatacgtcattgcttctatcataccatctttttgcatagaagcaaatgatttttctacagaattaacgctttgtgtgcaagccccctcgcattcattctgctgttctatggctgaactattgcaagcagcttatccagaattttatgtgccacctgttccttgctcatcagttccagactctcctcggaattctttgtgatcagtgtcacaatattggtgtccgtaccaaagcccgctcctgcgctcttcaaactgttggcacagatcatgtcacagtgcttgctctccagcttcttccgggaattctccagcacattttccgtctccatggaaaatccacacaaaatctgtcccggtctcttgttttccccaagggccttcaaaatatccttcgtccgcaccagagggatcgacatgtctccgtcttttttcttaatcttattgtctgctgtcactgccggggtgtagtctgccacggctgctgccttgatgacaaaatcatagtcctgcgctctggacacgattgcatcgtacatctcttctgccgtctgtaccggcaccacatttacaaacaaaggcggctccacatccgtatgggctgccaccaccgtcacttctgcgccgcggtgcattgcagctctcgccagggcataacccatttttccactggagtgattcgtgataaaacgcaccgggtcaatgggttctctggtggcacctgcggagatcagcacctttttgcccgccagatccttctcgcaggcgatctccttcaccacggcttcgaacagtacggactcctccggcattctgccgtcaccgatatcgccgttggccagcattcccgtggccggagtgatgatctcatagccgaaatgctttaatttttcgatattatcctgcacgatggggttgtgatacatattatgattcatggcaggggacacaatcttcttgcagggacatgccatgatcgtagtagtcaacatatcatctgcgatgccgtttgcaatcttgccgatcacattggcagaagccggtgccaccagaaccacatccgcccgctttgccagtgccacatgttccacactgtactggaaattgcggtcaaaggtgtccaccagacatttatgtcccgtcagactttcaaaagtaatggggttaatgaactgcgtggcattctgtgtcatcagcacttccacatcacagtgctgttttaacagcatccgcgctacattggccattttatatgcagcaatacttcccgagattgccagaactacggtctttcccttcagcatagtcgtctccttttgcctgatttatcaaaaatacttcaaaactgtactcctaaaataccataagtgcatattttatgcaaatatcacttttctttttgtccgggatatgatataaacagtaggagtgtcccgaatcaccggggcagcttgtattgtatctcccagagggagaatggtaacaaggaggaaaatttcatatgaacaaacaaagtaagacaatgcgactcacgttgatgggattgtttgctgcggtacttttgctgatggcttataccccgctcgggtacctgaacatcggccccctggcaatcaccctcaatgtcatccccgttgcactggctgcgatcacactgggccctgtaggcggagccgccatgggagctgttttcggattgaccagctttttgcaatgcatcggcgtgggaggcaccagcgccatgggagcaatgctttttggcatcaaccctgtgctggccttcatccagcgtttcatccccagacttctggacggatttctgttgggatatgtcttccgttacagccgcaaagccgtaggagacagaatcgcctgcatgatcaccggattttgcagcgcatttttcaacaccgcatttttcatgtcccttttagtactgctgttcggcaatacttcctatgtgcagggactgatgggtggtaaaaacgcgattttattcatctgctcttttgtaggtgtgaatgcggtcttcgagatgtgtgcatccacgttcctgaccggagcggtagggctggcactgatcaaggcaaaagtcattcctgtatatcagaaagcagagtctgcagcataacaggagtatacccgtggtactgacaatcgacatcggaaatactacgatcggcatcgggggatttcagggaaataagctgctctttattgagaagatatcgtcccgccgtcccctgtctgatgccggatatagaaaaaaactgaatatgattttagacaaacacggtctgtccgccgaagcctttgagggatctgtgatctcctcggttgtgccttcggtgacagccgttttttcctctgctctggaagcttttctggggcagaagcctctgcttcttacccatgaactggatcttggctatgagatctgtacggaatttccggaaaaggtgggctgcgaccgcctggcagatatcgccggagccatttcccgctatcctctgccactgatcaccattgatctgggcaccgccacgacatttaacgtgttggatgagaaccgtcgctttttaggcggcctgatccttcccggcgttggaaccgcccacagggcacttttaggcaggaccgcccagctcccgaaaggggacattcatatgcccgcccacaccatcggtgcgaatacgcaggaatgcatcaccgggggaatgctcttgggcaacgcctgtgccatcgacggactgatccgccgtatccagacagagttagggcaaaaagcaacggtcgttgccaccggagggtacgcaacgaccgtcattccacattgtgaaacgaagatccatatcgatcagaatcttcttatgaaaggtctgagatccatctacgagaataatacctctactggatcaccagattagagtagcccatcaggctctcatccacagcatgtgcggcttctctgccttcacggatcgcccacaccaccagggactgtcctctgtgcatatcaccggtgacgaatacattttccacactggtctggtatttgccgggggcagtttttacgttggtgcgttcatttaattccaccccgaaagcatcggtaatatatttctgacttcccaaaaatcctgctgcgatcagtacgatctccgcatccaggatctgctcacttccggcgatctcctgcatcttcatgcgtccggtagccggatccttttcccaggacagcttcacgatcttcacggctttcaggttgccgttcttatccttgataaattccttaaccgtagattcatagattctcggatcatgtccgtagactgcaatggcttcttcctgaccgtaatcggtcttgcagaccttcggccattcgggccagggattgttctctgctctcttgtccggagccttgggcatcatctcgatctgggttacagacttggcaccgtgacggatggaagttcccacacagtcattaccggtatcaccaccgccgatgatgaccacgttcttacccttggtctccacatatttcttatcttcaaagttcgaatccagcaggctcttggtattggctttcagaaaatccaccgcgaaatagattcccctggcatctctgcctggcgcattgatgtctctgggattggaagcaccacaggccagtacgacacggtcaaaatcatgtaacagcttggatgccttgatgtccttaccgatatccgtaccggtgacaaaggtgatgccctcttccttcatgatggctatcttacgatcaatgatctgtttttccagcttcatgttagggatgccgtacattaacagtcctcccacacggtcggagcgctcaaatactgtgacctgatgtcctctctggttcagcagatccgccgctgccagtccggaaggaccgctgccgatgactgccacctttttgccggtacgcaccacagggggcttggctgccgcataaccctcgctgtaggcgttttcaataattgcatattcgttctccttggtggagaccggatccccattcaatccacaggtacatgccgcctcacacagagccggacatactctggacgtgaattcggggaaattgttggtcttcttcaggcggttgtaagcctgttgccagttgccggtatataccagatcgttccactccggcaccagattgtgcaggggacatccgctggccataccgcagatcatcatgcccgactggcagaacggcacaccgcattccatacatctggcaccctgtaagcgctgcttttccttcggcagatgctcatggaattcgttaaaatgctgtattctcttcttaggatcctcagccacgctgacttcccttttatattccataaatcccgttggttttcccatgactctctccattctgcagacgcttcggcgtcggaagaatcgcgaactaaatttcatatttagttctgcgataaactaatttgtggcgcccgcggcacaaattagtcgtgtgaaaagcaatctatcaagattacttttcacactggcctcctactttctggtgttggcatagaatgcttcgatctgtgcctgctctgcgctcagtcctttttcctccatctggacgatggtctttaagactctctcataatcatgagggatgatcttcttgaacttgggcagatactctccaaagttgtccagcacttccttacccttggcggaattggtcagtgccacatgctcctggatcatggatttcaactccagcacatcatatttggatgtgatctcgctggaggataccatttccttattcagacgcttgtacagatcgttgccttcatccagtacataagcgataccgccgctcataccggctgcaaagtttttaccggtgggtcctaagactaccacacgtccgccggtcatgtattcacaaccgtgatcacccacaccttcgactaccgcaatggcaccggagttacgcacgcagaaacgttcgcctgccacaccgttgatgaatgctttaccggaggtcgcaccgtacagtgccacgttaccgatgatgatgttttcctccgccttgaacctgctgccctggggaggatataccaccagcttaccaccggataagcccttgccaaagtagtcgttgctgtcgcctaccagttccagagtcaggcccttggggataaaggctccgaaggactgtccgccggcacccttgcacagtacatggtaggtatcctcttccacatcatcgcccaattttctggtgatctcacttccgaggatcgtaccgaaggcacgatcggtgttgctgacgtctacttcgatgctgcgcttctgtcctgcgtcgatggcttttcctaactgctttaacagcaccttctcatccagtgtcttctctaactggaagtcatagacctgcctgggatcaaaggtcaccttctgcttgctgccctcgtaaggattgcttaaaatctgggtcagatccacttcctcctgacgatcggtcagatgctcttttctcttcagcagatcagttctgcccaccagttcatctacggtacgcacgcccagtgctgccatgtattcccgcagctcctgtgcgataaatttcataaagttttccacatattccggcttaccgcggaagtttttccgcagctccgggttctgggtagccacgcctaccgggcaggtatccagattacatactctcatcatgacacagcccatggtcacaaggggtgcagtggcaaaaccgaactcctcggcacctaaaatggctgcgatggctacgtctctgccgctcatcagcttaccgtcggtctcgatgcggactttattacgcagaccgttcatgatcagggtctgatgggtctctgccagtcccagctcccagggaagtccggcattgtggatggagtttctcggtgccgcaccggtaccgccgtcatagccggataccaggatgacctgggctcccgccttggctacaccggctgcgaccgttcccacaccggcttcggataccagttttacagagattcttgcctgggtgttggcatttttcagatcatagatcagctgcgccagatcctcaatggaataaatgtcgtgatgagggggcggagagatcagggacacaccgggtgtggagtgtctggtcttggcgatccagggatatacctttcctccgggcagatgtccgccctcaccgggttttgctccctgtgccatcttgatctgaatctcctgtgcgcttaccaggtaacggctggtaacaccaaaacgtccactggctacctgcttgattgcggaacaacggttcagtccgtccggtccgacggtcagacgatccaggtcctcaccgccttcaccggaattgctcttgccgtgcagatggttcatggcgatggccatggtctcatgggcttctttggaaatggaaccgtaggacatggcaccggtcttgaatctggtcacaatggactctaccggctctacttcctcaataggcacaccctttttcggataattgaagtccatcagtcctctgagattcttgatggaatcttcgtcgtttaccatggcagtgtactgcttgaacatctggtaatcaccgcgtctggtggattcctgtaacatatggatggtagcgggattgtacagatgctcgtcaccgccgctgcgcatcttgtgatgtccggggctgtttaaggtcagatcgtttttcagtcccagaggatcaaatgcctgagagtgcaggtcgtctacctgctgctcaatatcttttaaggtaatacctcccacacgacatacggtgttggagaaatacttactgatcacttccggtgcaataccgatagcctcgaagatctgggaaccctgataggactggatggtgctgatacccatcttggatgcgatcttgacgatgccgtggaggacagcattgttgtaatcatccactgctgcatagtaatccttatccagcatattgctctcgatcagttccttgatggtatcctgtgccagataagggttgatggcgcaggcaccgtaacctaacagcgtagcaaaatggtgtacctctctgggttcgccggattccaggatcagtgcgactctggttctcttcttggtgcgtaccagatactggttcagggcggatacggccagcagggaaggaatgggcacatggttctcatccacgcctctgtcggacaggatcaggatgttcacgccgtctctgtaagctctgtccacttccacgaacagtctgtcaatggcacgctctaagctggtgttcttgtaatatacgataggtacgacttctactttgaatccgtctaccttcatgttcttgatcttcaacagatccgtgttggtcaagatcgggttgttgaccttcagaacattacaattcttcggggtctcctccagaatgttgccctcggtaccgatgtatacggtggtggaagtcacgatctcctcacggatcgcatcgatgggcgggttggttacctgtgcaaacagctgcttgaaataatgaaacagcgggtggttcgtcttgcttaagacgggaagcggcgtatccacacccatggcggcaatcgcttcactgccgttctttgccataggcagaatgctctgtttcatctcatcgtaggtataaccgaaagctttctgcatccgctgacgctcttcgtaggtgtactcagggacacgctggttcgggatgtgaatactcttcaattctgtcaggttgttgtccagccattcaccataaggctgtctggaagcatatttttccttgatttcctcatcgtcaatgactctgccctgtacggtatcgaccaagagcatcttgccgggacgaagtctttcctttaacttgatcttcgtgggatcaacaggaaggacacctacctcggaagacaggatcagggtatcatcgtcagtgatcagataacgggaaggacgcaggccgtttctgtccagtaccgcacccatgatatctccgtcggagaacaggatggatgcggggccgtcccagggctccatcatggtagcgtaatactggtagaaatctctcttggtctgggacatggccttgttgttcgcccagggctcggggatagcgatcatgaccgcaagaggcagttccatgccgctcattaccaggaattccagcgtgttgtccagcatagcggagtcggaaccggtcttgctgatagcaggcagtactttgtgcagctggcctttcagatgctcggattccatgttctcctccctggccagcatcttgtcggcattgccgcggatagtgttaatctcaccgttgtgtaccatcagacggttcggatgggcacgttcccagctgggattggtattggtggagaaacgggagtgtaccatggcaatggcggattcgtaatcttcactctgcaaatctgcgaagaaggtacgcagctgacctaccaggaacattcctttatatacgatcgttctgctggaaagagaaactacataggtatcatcggaagactgctcgaagacacgtcttgcaatataaagtctgcggtcaaagggaagtcctttttccacatcggcaggctttttcacgaatccctgcatgatatagggcatgcactctacggccttatgtcccagcacattggggaaggtaggcacttcacgccagccgaggaattccattccttctttttccacaatgatctcgaacatcttcttggcttgattgcggcgcagctcttcctgcgggaagaagaacatgccgacaccgtattctctctctccgccgatgtccatgcccagagctctggtcactctggcaaaaaatttgtgggggatctgggtcagaataccgacaccgtcaccggtcttgccttccgcatccttaccggctctgtgctccagattctctacgatcttcagcgcattctctacggtcgcgcggctcttctctccgtgaatattgacacaggctccgataccgcagttatcatgctcaaattcttcccgatataacggtgccttgggcagctcctgttttacatcaaacatatagttctcctttccggttttctatttctctcttcttaatctgtctgttcctattcagaacctcattcgcaagactgtgctttcagcactttcctgcaactaaaaaaggtcgcaatgagactctttcgagcgcctcattgcgaccttttctgtactatacacctatttttctcatttgtaaatatagatttttccttgaattgtcagataatttgtcaattcagttgttcacacggctattgtctgttaattgtgttaattttcttttttaagccatgcttttagcacaactctttggggattttccctatttttcctgtctccgaccatacactttgcttgtcagtccctgatagattgcagagaaatgtctgctttctgccattgcggtccggagaggtgccagggtcagtgccatcacagcgcggtagcggaacagttctacgggtttcatgtattttgccgtgatctccttatgctctgcggcactgcgtttcaggttctcctttgtctcggagtagccgccgccttcgtaggaagatacggtaagccccagatactgcatgggagccttcgcccggtaatagcaccacagaaaatgttcataatctgcgcggatcttgtattttggttcgtagggcttctgtcggcacaggtctgcggcatagaagcaggactgatggcagggaatgttgcggtaacagacaaagccggtgattcggggcggggatgatatcttcgtgtccgttttcgcgctgtaggtatctccgtagtagatgccttgcagtttcatagggtgctgttccatgaattgtgcggtgtgtgccagaacttccttgtcatagaagaggtcaccgcagtttaagaacagaatgtaatctccggtcacatgagagaccgcctggttcatagcctcgtagatgctgtgatccggttcctggtagagatggatccgcccgtcagtgcgcatggactctatggatccgtcacggctgccaccgtccttgacgatgacttcgaagtctggacaggtctgggccaggatactgtcaagggtctgattcagtttggtgccggggttcaggcatactacgataatgctgaatttcatatgttgctccttttaagatgtaatatctccgcagtcgagaacagggtaaggaacgcggcacgttctcactctgcgcagagcgtaacggtacataagtgaccaaagtacggtcactaagtgccgacgtctgcttacggcctgcttatccttaccctgttttcggctgctgggttatgaagtccagttcaatacagtttatgaatgcggtcagaactggtaactaatgtgttttgttatctcattaaaatatatttttctgtttgtgcaaagtgatcaaggatacaactgccactgccaggaaaatcacgcatacaggccagctgacgaagccggtgacggcgatggcggtataggagaggcagtaggcgaggacattggatgccacatggacaaagactgccattttgaactctccaaagtattcgtaagcatatgccatcaggcagccgatgaggaagccgtatacgccctggacgtaattcatgtgataaacgccgaaaatcagggcagacagggctatggcgagtttgatatccatgaatctgcggagatatccgtagataactccgcggaacagaagctcctctgctattggggagatgaagccgaatacaaggattcctacgataaagtgtgcggaatattgctgggctgcaacttcggtataggcttcggatttgttggtcacaccaagaagttcaaacaggaggttgaaaccgataacggcaccgatggtggctaccaccagcaaggcatattttgccttaccttcttttttcagatggcttaaatgcatatcctctttgttcttcgtgatcagaagctttgccgtggaccataccgccagtgctccgccgatgaagcccagtgccgctatgatactggacacatctccggaatagccgttataggcgccggtctcatcccgcaggatcagcagatctaccagtccaccggaagcaccagactgtgccagctgatacaacagtgccagcagcgcatactgcaccgcattgcgcaccaggataaacatcagaaacgaatacaccatggtccagattctctggtacatgggatttttctttttattgtcgggattgctgttcaccagttcctcgctgccgcgaagcagaaatttttccagttcttccacggattgtacgatgtagtccgcttttgcttcctttaactcttccttgcttccgtagccataagtcacgcccacgctctccacgcccaacgctctggctccttccacatcaaactttctgtcaccgatcatgtagacctgatccggctctatgggattctccttgaacagctgatgcagggtctcctgcaccacctgatccttcgtctctctggtgccgtccagctcactgcctacaaccacggcaaaatattttttcagatcaaaatgctccagtatgcgttctacatagatctggggtttgctggaagccagtgccagaaaatagcccttggattgcaggttcttcagcatctccggaataccggcataaacttcattttcaaaaatacccgtattctgaaaacgctctctgtattttgccacggcctcctccgcctgctcagcggtaaaaccgtagaattccataaagctgtcccgtaagggcggtccgataaaaggctccagcttgtccagatcaggttcctcaataccgaaagagtgcagcgcatactgcacgcaggtcgtaattccaattttgggatctgtcagtgtaccgtccagatcaaacagcagatattttttcattcttataattcctttttttgtatctgttccaagccctgtaactatcgcaaaatattcattgaataccgggatccgcaagaatattctgtaattgttatgaggctctgaatagttaccctttctttctatagcttgtggggtccgcaaggcattagaagctgcggatcttgtccccgtcatcctcagtgtttttcagtgccttgatctctacgtcatagcccacattggcattgacctgcacatggaccacatcacccacttttttgccaagcagtgccttgcccagaggagattcgttgctgatcagaccttccagtgagttcccgcgaacggtggtcacgatcttgtaatcctcctgggtgccgtcgtcgatgaattccacggtaacagtgttgttgatgcccacctcatccacggcggagttctcggagatcacctttgcggtcttgatcattctctccagataacgaatccggctctcgttctgattcttgtattttttcgctgcataatattcaaaattctcactgagatctccgtgggctctggcttccttcacgtcctccagtgccttgggacgcaccaccagcttacgatactcgatctcatcttccattttcttaatgtcagtgggggttaattcatcgtacataatttctccattcctatctgttcaattacttatatcatttattgacagtttttctcccggttcggcacatgctgattttctaccaacagccgtccttctttttcttcggcgaccgaccttcttttccttcagcagacgcctttcttttcttctgacggccgacctttttccttccggcagccaaccttcttttcttgcagaggatgaccggtcgcagtctctatgctgtcccggtgtgcccagcattctacaactgcattgcgtagattaccgccagagacagaatgatctgaataatggcaaaacggaatacggtctgtgtattggaccagtcccacaccttacgcacatgatcatgcaagggagtacgcacatttttcaaaatatgaatcttcaggaagcggagcagggaaaccttaagcagtcccaaacctccgtccagaatcagcaccagagccagcggaataaacaaaaacggacagccgctctttaaaatagcgatgctgatgaacagtcccatggcccgggaacccgcatctcccatcatcagcttactgggtgttgcattgtaccacagataacccagaatgcatacggcaaacagcaggatcaggaaagaataggtctcattgacgtccttcatacggtccacgatatagatggacatgatcgtaatgatcgacagggttccggaaagtccgtccacaccgtcggagcagttggtcacattcacagatgtccataccaggatcaccgtgagaatggcgaataccacaggcggcagggtgaactttacatgaaacagtgccagctccaccacgttggaattatatttcaggaacgtgatggctaccagtgccgccacgcacagatctaagaagccttttttgtactcaccccagggagtcttggaagcatcgtccagaaatcccgtcatcatgcataccacgatcagcagcagatagatcaccagctctgcgcttaaaggggaaaacagcagaacggatgccacaaatgccatgacaaaaataattccggcacctctgggtttccccgcagacaattttccgtcatgggcaaattctcttcctgcatccttgggcagatacggacttaatttcgccgttgccagtaccgtcgctccaaaagcaaaaaggattccaaaaaaagcaaggagagaactgcttccctccggcaagatcatctgtaacatactatccctcgtttccacatgagatactcacttttgtactctcatgctgtattttctgataaattccgtaactgttcacaggggcattcgagaaatgaacacctcagaacagtcacaaaatattttaacacaaatatcccggaatctcaaataatttccacaacagttcagttctgaacatatctgggcgcagaaatcatgcttgcatgattttgcggacaaatatgtgcatgagctaagcgccaatctatgagcaaaggtagtcacgaagtgacataaaagcgtgttaacgcgactcccgtgaacggcgcggctgaactgttacgtttgacagtttccccacggtggactactatattcttatgaacactttctgaaaaatagccataaaaggagaaatactctatgatgatccataagatcgaaccgcataaatattacccggaattccgaagccaggatcctaaaccttccgattatctgctgttatttgacggagaaaaggtctatctgccctcccatacagaaaacagtgatgtaacggatacttccgccggtgccggcatctcggagcatcctcaagtatatcttcctacttttgaagaagtccatggactcttgggaatccgtcagcctatggaacgtttttttctggactgtgaatatctcttttccattgatgaccgagcattcttccgcaagacgacggaggatgccggtgctctcatgctcccggaagaagacctctacgcttccggtgtgttccgtaattttgagccggaatatctggcatttgccggaatcactgccacccagatcaatcgttttcgtctggaccggaaattctgcggccgctgcggacatcccacaattcacagcaccacagagcgggcctgcatctgcccggagtgcggccagattgaatatcccaagatctctcccgctgtcattatcgccatcgtggataccgagcgggacaagatcctgctgacccgttacgccggcggttcctatcgtcactgggcactggtggccggcttcgtggaagtcggtgagaccttcaaaggtgctgcccgccgggaaatcatggaagaagtcggtttaaaggtcagcgatctggtctattacaaatcccagccctggtccttcagtgattccgccatgatcggcttcttcgcgaagctggagggggatccttctattactttgcaggaatcggagcttggcgaggctgcctggttctccagagaggatgtcccggatctgccctccactatcagtgtcggtcaagaaatgatcacattattcaagaatggcggggatccgttctgccagagataattgatacatttgaaagtttttcacttctattccatgatataccttgactttgtacccccgtggtttcatgccccgggggcttatttagtttcttttcctctctgcgccccgctctctcgatctccccggggcttaaccagcatgctccttatatctacgccccatgtacgcaaaaatctgccttcgacaataacattgtcatgaggcagactcctttctatacttattctcttcactgtttcttcacccagagcatcgtagctgtcatcgcttctcattatctcaataagcggcacttcttcgctaccttcactaacagatatcccttcgggaagctgcgaagctcctgctccgtgatgccccgcatcaatatcagcatgacaaaatagactacagcagcaattacgatcgcaggaatgacagagatccgcatggacttcgtcactatatacaggccctcgtagattgcccaggctgccgctcccataaacgcggaggcgaacgccggaatgacgaaagtctttacgatctcctgccggtagcctaccgctcttcttaccgcccactggttcagcacacacatcataccggaatacagcgtattggcgatggcaatgctgtacagatccagtcttgtgaacatcagaagcagcactgctgccaccgtctgcaccaccagcgagatccccgcattgatgatcggggtattgactttgccaagtccctgcaaaatcgaactgttcagagtcgacagtgcataaaagataaccgacagtgacaatgtcattaaaagagctgccgccagattcagttcctctgccgtcttatttgtgaacagcagactgatcaccggcttcgccagtacaaaaagtcccacagcgcagggaatcgagatcaccatggtagtcttcactgccagtccgatcttctctctggctcccttcacatcccgggctgccatcagctgtgccacagaagggatcatggcagaagccatagcagatgcaaaggctatgggaatattggacattgtcagggactgtccggagaaaataccatatttttcataaatagataccgtatccagattacgaagggacggataccatttggtgtagatactgttgttgaccgtactgcttaagttatatacagctgtactcaaaataaacggtgtcaccaccagtgtgatcgtcttgaatatctgtccgtaggaatccacatgttcatgcctgtcacgctgcactctgcgcaggatcattccacgattcagagcatagactcccgccataaaaagcagcgccactaatacgccgacaccggtacccagtgcacttcccacggcaccgtaggttgctctcatcacctgccctgcctgatccgccggaacctccatcgttcccataaacatttggatcagaaggtatgccgcgcctacgctgactaccgcattggcgatctgctccaggatctgcgatacggaggtctgcgccatgctcttatgtgcctgaaaataccctcgtaaaactcccaggataccatagacgaagatcgtcggtgcaaaggtgcgcagtactgtgaccgctgctccggacacgaataatcccgctccgaaaaacagaaaaaggctggctataccgccaaccaccagtacatagatcatggctccgtggaacagtctgtgggcgttacggtattccttctctcccagcttctgtgcgatagctttggaaattgccgagggaatactataagaggagatcaacagaatgatcgtataatagttatacgctgactggtaataaccaagtcccagattcccgatgacactctgtaaagggcccctgtaaaggagccctatgattctgctgatgattccggctgccgccagaattcccgcctgcatgataaaattgttcttggaactgttcttatctgccatatgttatcttaccttatttcagttctttatccgatcagccagtcatacatctcctggtattttccggcggataccttccaggaataatctgtggccatggcacgatccacgatcttattccactctctcttcctgtcgtaataaatatgctccgcataacggatcgtattcagcatctcatgtgcattgtaattcgtaaagctgaagcctgtaccggtgctctcatactcattatagggctgtacggtatccttcagtccgccggtctctctgacgatgggtacggtaccgtaacgcagtgcgatcaactgactcaggccgcagggttcgaacagagacggcatcaggtaagcgtcacaagccgcatagattttatgggacagtgcatctgaataataaatattggcagacaccttgtctccatacttccagtcgaaatgacggaacatattttcgtaacgttcctcaccggtgcccagtaccacgaactggatatcatcctgacacagttcatccatgacataagcgatcagatccagccccttctggtctgtcagtctggataccagaccgatcatcattttcttatcatctacgcgaagtccaagctcttcctgcagggcacgcttattcttcaccttttccttgcggaaattcactgcattataggcttttacgatatttttgtccgtctccggattgaactctccatagtcgatgccgtttacaataccacgcaggtcatgacttctcgcacgcagcaatccgtccagaccctcaccgtaaaacggagtcttgatctcctccgcataggtatcacttacggtggtcactgcatctgcgaatacgataccgccctttaacagatttgcatccttataagcctccagcttgtcagaggtaaaataatactccggcaatccggtaatgctctgtaccgtcttcacatcccattttccctggaacttcagattatgtatggtgatcacagacttcatgttgcggtagaaatctccgccatggaaacgctccttcaggtataccgggatcagacctgtctgccagtcatggcaatggatcagatccggctggaaattcaaaagcggtaatgccgacagcactgccttgcagaaatatgcatacttctcgatctcatatctgggatcatccccataaggcttgaaaccaccgaaataactctcattatcaatgaaataataatgcaccccggcttcctctgcctccagaacacctacatacacattctgccagttgaaatccatgtagaaatgtgtcacatacctgagcttatccttcatctcctgcttcatacaggtatacttcgggataaacactcttacatcaaaatactccttgtcaatatacttcggcaaagatcctacgacatccgcaagtcctccggtcttgataaaaggtacgccttccgatgcggcaaaaagaatttttttcatgtaaaccctccacatatgctacggcttgtattcaaaatatagattgattataccatgtttacgattcatagaaaagagggcagcgataatttacaaatcttttagagtctgcggttttgcctcagtttctgtaagaaagtcgaatcctgtcagcgatcagcgcgataaattccgaattggtaggtttgcctttgcccgtgtcgatcgtgtaaccgaacatggcatccagggtctccatgcgccctctgctccaggcaacctcaatggcatggcggatagcgcgctccacgcggctgggtgtggtctggaaccgcttggcgatggtcggatacaggatctttgtgatagaactgatcattgccggatcctctaccgacatcatgatagcttcccgcagatactgataccctttgatatgtgccggcactccgatctcatggatcatatccgtgacatccttttccaggtcatggatgacttcctgggtctgttcctttttttctgtcgcttttactgtgctgtctttggcgtttttcgtagaaggaaccgtgatcataatttggaattccttgttggcattcatcagatcccccaggattttgtatactttttcattatcctttgtagttgtaatgtttaatttttccattaaactacctccatgactacaaaactacttttttcacgtaccgttctattataaataaatatgcgtcgtagcttcaagcagaacccgtcgcaagatttttccaaatttcgcaaaaaaaggcgcccggaatgaaccggacgccaataagagggaaaatgtataagtagaaaaactacgagtaaagcaaattaaattaatgatgctctgccagggtgtgaagtgcttccttgatggctgtcttcacggtctcatcctgttctgcattcagtctgtgcagtagataggtcttggcatattcggtgccgatgcttcctaacgcttttgctgcttcgacacggatcttcgtatccggattgtcgatcatgtgggcaatgctgttgacactgtcttcatccttgatccggctcaacgcttccagtgcggctaccaccaccgtgtcatcggaagaactcagatatttgatgatcttgtcggattttcctttctcctgtaatttttgaatcttacttaaatcatgttgttccataaacacgcgcctctttctttctgccagcgcgggggcggtaaaatcgtctccgggtcatcactatatgtcgcctgtggtgattggcttctcttgataatgttatgataacaccttatctgtcagaaaacaattatagcaaaatgaaggatttctaaaaattctataacctg

SEQ ID NO: 657 - DNA, 8135 bp, unidentified
  source 1..8135: mol_type = unassigned DNA
  misc_difference 3835: note = a, c, g, or t
  misc_difference 3836: note = a, c, g, or t
  misc_difference 3837: note = a, c, g, or t
  misc_difference 3838: note = a, c, g, or t
  misc_difference 3839: note = a, c, g, or t
  misc_difference 3840: note = a, c, g, or t
  misc_difference 3841: note = a, c, g, or t
  misc_difference 3842: note = a, c, g, or t
  misc_difference 3843: note = a, c, g, or t
  misc_difference 3844: note = a, c, g, or t
  misc_difference 3845: note = a, c, g, or t
  misc_difference 3846: note = a, c, g, or t
  misc_difference 3847: note = a, c, g, or t
  misc_difference 3848: note = a, c, g, or t
  misc_difference 3849: note = a, c, g, or t
  misc_difference 3850: note = a, c, g, or t
  misc_difference 3851: note = a, c, g, or t
  misc_difference 3852: note = a, c, g, or t
  misc_difference 3853: note = a, c, g, or t
  misc_difference 3854: note = a, c, g, or t
  misc_difference 3855: note = a, c, g, or t
  misc_difference 3856: note = a, c, g, or t
  misc_difference 3857: note = a, c, g, or t
  misc_difference 3858: note = a, c, g, or t
  misc_difference 3859: note = a, c, g, or t
  misc_difference 3860: note = a, c, g, or t
  misc_difference 3861: note = a, c, g, or t
  misc_difference 3862: note = a, c, g, or t
  misc_difference 3863: note = a, c, g, or t
  misc_difference 3864: note = a, c, g, or t
  misc_difference 3865: note = a, c, g, or t
  misc_difference 3866: note = a, c, g, or t
  misc_difference 3867: note = a, c, g, or t
  misc_difference 3868: note = a, c, g, or t
  misc_difference 3869: note = a, c, g, or t
  misc_difference 3870: note = a, c, g, or t
  misc_difference 3871: note = a, c, g, or t
  misc_difference 3872: note = a, c, g, or t
  misc_difference 3873: note = a, c, g, or t
  misc_difference 3874: note = a, c, g, or t
  misc_difference 3875: note = a, c, g, or t
  misc_difference 3876: note = a, c, g, or t
  misc_difference 3877: note = a, c, g, or t
  misc_difference 3878: note = a, c, g, or t
  misc_difference 3879: note = a, c, g, or t
  misc_difference 3880: note = a, c, g, or t
  misc_difference 3881: note = a, c, g, or t
  misc_difference 3882: note = a, c, g, or t
  misc_difference 3883: note = a, c, g, or t
  misc_difference 3884: note = a, c, g, or t
  misc_difference 3885: note = a, c, g, or t
  misc_difference 3886: note = a, c, g, or t
  misc_difference 3887: note = a, c, g, or t
  misc_difference 3888: note = a, c, g, or t
  misc_difference 3889: note = a, c, g, or t
  misc_difference 3890: note = a, c, g, or t
  misc_difference 3891: note = a, c, g, or t
  misc_difference 3892: note = a, c, g, or t
  misc_difference 3893: note = a, c, g, or t
  misc_difference 3894: note = a, c, g, or t
  misc_difference 3895: note = a, c, g, or t
  misc_difference 3896: note = a, c, g, or t
  misc_difference 3897: note = a, c, g, or t
  misc_difference 3898: note = a, c, g, or t
  misc_difference 3899: note = a, c, g, or t
  misc_difference 3900: note = a, c, g, or t
  misc_difference 3901: note = a, c, g, or t
  misc_difference 3902: note = a, c, g, or t
  misc_difference 3903: note = a, c, g, or t
  misc_difference 3904: note = a, c, g, or t
  misc_difference 3905: note = a, c, g, or t
  misc_difference 3906: note = a, c, g, or t
  misc_difference 3907: note = a, c, g, or t
  misc_difference 3908: note = a, c, g, or t
  misc_difference 3909: note = a, c, g, or t
  misc_difference 3910: note = a, c, g, or t
  misc_difference 3911: note = a, c, g, or t
  misc_difference 3912: note = a, c, g, or t
  misc_difference 3913: note = a, c, g, or t
  misc_difference 3914: note = a, c, g, or t
  misc_difference 3915: note = a, c, g, or t
  misc_difference 3916: note = a, c, g, or t
  misc_difference 3917: note = a, c, g, or t
  misc_difference 3918: note = a, c, g, or t
  misc_difference 3919: note = a, c, g, or t
  misc_difference 3920: note = a, c, g, or t
  misc_difference 3921: note = a, c, g, or t
  misc_difference 3922: note = a, c, g, or t
  misc_difference 3923: note = a, c, g, or t
  misc_difference 3924: note = a, c, g, or t
  misc_difference 3925: note = a, c, g, or t
  misc_difference 3926: note = a, c, g, or t
  misc_difference 3927: note = a, c, g, or t
  misc_difference 3928: note = a, c, g, or t
  misc_difference 3929: note = a, c, g, or t
  misc_difference 3930: note = a, c, g, or t
  misc_difference 3931: note = a, c, g, or t
  misc_difference 3932: note = a, c, g, or t
  misc_difference 3933: note = a, c, g, or t
  misc_difference 3934: note = a, c, g, or t
atgatcagagtaggaatcatcggagcaaccggttatgccggaggagaactggtaaggatcctgttaaaccacaaggatgccaaaatcgtatggtacggttcccgaagctatatagataagaagtattatcaggtataccagaacatgttccagctagtggaggatatctgcaaggatgacaatctggaagaactggcgaagcaggtagatgtgatctttaccgcaacccctcagggatttctggcgggccttttgacagaggagattctctctcaggtgaagatcgtggatctgtctgctgattaccggatcaaggatgtggccacctatgaaaaatggtacggcatcgaacacaaatctcctcagttcattgaggaagcagtatacggactctgcgagatcaatcgtgacaagatcacggagaagaccagattggtagccaaccccggctgctacaccacctgttcgatcctgacggcctatcccatggtcaaggaaggcatgattgatgtgaacaccctgatcgtggatgccaagtccggtacctccggtgcaggaagaggcgccaaggtgcccaacctgttctgcgaagtgaacgagaacatgaaagcctacggcgtggcaagccacagacatacccccgagatcgaggagcagttaggctatgcgggcaactgccaggtgaccattaattttaccccgcacctcgtacccatgaacagaggaattctggcaaccgagtatgcaacactgaagagaaaaccggacggtacacttcctacctatgaggaagtaaaagctgtctatgataaatattatgcaaacgagaaattcgtccgtgtgttggataagggcagctgccccgagaccaagtgggtggaaggcagcaactatgtggacatcaattttgtcattgatgagcgtaccggccgtatcattatgatgggtgcactggataacctcgtaaagggtgccgcaggacaggcggtacagaacatgaacctgctgttcgggcttcctgagagcgaaggcctggagctggttccctgcttcccttaaagcagatacggaaaggattagaaaggataaaatacatacatgaacaaacagtttacgatcaaacccatgaccatagaagattatgacggtctgcatgccctctggatgactattcacggtttcggtatccggagcatcgatgattccagagaaggtgtggaacgttttatcaaccggaatcccggcaccagtgtggtagccatcggggaggatggagccgtagtgggcggcatcctctgcggccatgacggacgacgaggctgtctgtaccatgtatgtgtcagagaagattaccgaagacttggcattggcaaagccatggtcgtccactgcatgaatgctctaaaagcggaacatatcaacaaggtcagcctgatcgcttttacccagaatgacatcggaaacgctttctggaaatgcattggatggacaaagcgggaagacttgaactactacgactttactttgaatgaagagaacattacggcgtttaataaatagatgccaggattgtggaagtgcgtagcacgaagcaatccgtaggcatcaaagtcgggggcttttgacccagacatcataaataaaacggaagcgaaaggagattattccaacatgaaacagatccagggcggtgtgaccgcagcaaaaggctttgaggcagcaggtgtggaggctgccattaaatatcagaatcgtaaggatatggcactgatcgtaagtaaggcaccttgtaccgtagctggtacatttacctccaatgtggtaaaggcggctcctgtactgtgggataagcagatcgtggaacattctgcatttgcacaggcagtggtagtcaattcgggaatcgccaatgcctgcaccggcaaacaggggctggactgctgtgaagcagaagcaaaatgtgccggagaactgttgggcgtgcccaccgatgccgtactggttgcatccaccggtgtcatcggtatgcagattcccgtagacaagatcaccgctggcatcgagaaactggtggcagccaaggcagatactctggaggctggctccgatgcagcccatgccattatgaccaccgataccatttccaaagagatcgccatcgagacacagatcggtggcaagactgtgactctgggcggtatgtgcaagggttccggtatgatccatccgaatatgtgcacgatgttaggttttgtaaccacagatgtgaaaatttccaaggagatgctgcagaagtgcgtcagcgcagatgtagtggattccttcaacatgatctccgtggatggagatacttccaccaatgatacactgctggtgctggccaacggcatggctggcaacgaggagattaccgcagagggcgaggattacgacaacttctgcaaggcactgcatgagatcaccacattcctggcaaagaaaatggcaggagatggcgaaggcgccacagcactgttcgagaccaaagtaataaacgcagtcagcaaggaagatgccagaactctggcaaaatccgtgatctgttcttctctgaccaaggcagctatcttcggacatgatgccaactggggacgtatcctctgtgcactgggttattccggagccaaattcgacccggaaaatgtggatctgtattttgagagcaagagcggcaagattcatatcttcggtaatggtgtggcatgtgattacagcgaggaagaggccacgaagatcctctccgatccggaagtcaccgcactggtggatatgcatatgggtgaggcagaagctaccgcatggggctgtgatttaagctatgattatgtgaagatcaatgcggactatcgttcctaaaaaagaacgaccggaaagataaatgacaggcggatcacggtatctgcggaaatgaggataaaaatggaaaaagatatggaacaggtaatgaaaaaagcagaggtgctgatcgaggcgcttccttacatacagaaattcaaccgtaagatcatcgtggtaaaatacggcggcagcgccatgagcaatgaggaactgcagaaaaacgtcatcaaggacgtaacgctgttgaaactggtaggtttcaagcccatcatcgttcacggcggcggtaaggagatcagccgctgggtcggcaaggtcggaaaagaggcaaagttcgtcaacggtctgcgtgtcaccgatgaggagaccatggagatcgcggaaatggtactgaacaaggtaaataagagccttgtgaccatggtggaagagctgggcgtgaaagcagtaggtgtcagcggtaaagacggcggcctgcttcaggtagagaaaaaatattccgacggtcaggacatcgggtatgtgggtgagatcaccggcgtgaatccggatattctctttgacatgctggagaaggattacctgcccatcatcgctcccattggactggacaaggattatcacacctacaatatcaatgcggatgatgcggcctgcgctatcgcaaaagcagtacatgcggagaaactggcatttctgacggatatcgagggattgtacaaggacatcaatgacaagtccacatttatttccagattgacagcttccgaggcagagggactgatccacgacggttacatcggcggtggtatgctgccgaagctgaacaactgtacttctgcgatccgcaacggtgtaaaccgtgtgcatattctggatggacgtctggcacactgcctgttgttggagatcttcaccaatcagggtatcggaactgcgatcgtatccgatgaggagnnnnnnnnnnnnnnnnnnnnnnnnnnnnnnnnnnnnnnnnnnnnnnnnnnnnnnnnnnnnnnnnnnnnnnnnnnnnnnnnnnnnnnnnnnnnnnnnnnnngttggagatcttcaccaatcagggtatcggaactgcgatcgtatccgatgaggagtgaaaaaagtgtgcagaataagcctggcagcttattccgcacccggctatttgtgccgcaggcgtcacaaagtagccattatcgcaaaaccaaattagaaatttggtttgcgtttccttgacgaaaagaacgtctgcggaatggagaggaaaaatgagcgacaccatgaaagaatatattgcagaggcggaaaaagacctgctgcatacctataaccgttatcagatcgttctggataagggcgaaggcgtacatctgtatgacaccgatgggaaaaaatatctggatttcgtagcgggaatcgctgtatttgccctgggctatcagaacaaggcatacaacgatgcgctgaaagcacagatcgacaaggtgatccacacctccaattattattacaacgtgcctgccatcgaggcggctcgtaagatcaaaaaagtatccggcatggatcgtgtctttttcaccaattccggtgcggaagcagtggaaggtgccattaaggctgccagaaaatatgcgtatctgaaggatggctgtaccgaccatgagatcattgccatgaatcactccttccacggcagaaccatgggagctttgtcagtaacgggcaaccccaagtatcgtgaggcgttccagcccatgatcggacatatcaaatttgcagaactgaatgatttccagagtgtgctggatcaggtgacagacaagacctgtgccatcattatggagactgtacagggcgagggcggactgcgtcccgctaatgaagaattcttaaaacaggttcgtgatctgtgcgatgagcgggatatcctgctgattctggatgagatccagtgcggcatgggacgtaccggttacatgtatgcatggcagcgtttcggcgtgaagccggacatcatgacttctgccaaggcactgggctgcggtgtaccggtaggtgcatttatgatgacggagaaagtagcacagcattctctgacagcgggagatcacggaaccacctacggcggtaaccccttagcctgcgcagcagtggaaaaagtgcttgatttattcgaagaggaccatataatagaacatgtgagagaggtggctccctatctggaacagcgtctgaacgaactggcagacaagtatgactgtatcaaagaacgccgtggtgtgggactgatgcagggactggtatttgaccatccggtaggagacattattaacagagcattggagaagggattaattctgatcaatgccggtgcggacattatccgcttcgtaccgcctctcgtgattacccgggaaaatgtggacgaaatgattgctattttggacacctgtatcgaataagaggtttaggtgaatttatgtttttgaaaaaaagaattatcgctacagcagctgtgatcgccatggctgctgcagctgtttacggaagtacgcaggagatgagtcagacacaggagagcggaagcggactgcagctgtttcgaggaaaggagacaatctattgctggtattccgatgaggcattgtccggttatatcaatgcggcagcagtatccttcggagaacagaacagtggagtccgtgtgattcccgtacttacttctgacagtgaatatctggaagctatcaatcaggagaccctgcattccgatcagataccggatatctacctgttgagcagcgactctctggaaaaggcttatctggcaggactggcatcgaaagtgcctgacactgtgggaatctgcaatacagaccattttccccaggcggctctgtctgcggtaacctatgatcagaagctgatcggttacccggtttattttgataccagtgcgttggtatataatgaagattatcttcgaacctgggcaacccagcaggcggagaaggaactggcgggaagcagtgagaatgatgaacccataggggaaggagaagagatcatcgaggaagattctcttccggaagaccagaccacggaacaggtgacagcggatgaggcagcggtaaatgcgctggcagagcagtatttcgcggaagcacttccctccacagtggatgatctgctgaatattgcagatacctttgatgcaccggaaggtgtggaaggtgtcatgaaatgggacgtgaacaatattttctacaactactggatcgtaggcaactacatgatcgtaggcggtgatcccggggatgacagaaatgatattgatatcaataatccggagaccattcagtgtctggaagtgtacaaggcactgaaccagttcttctttattgaatccgatacggtgacttatgattctgtgatccaggactttatcgatggcaagaccatgttcaccatcggaaccacggatgtggtcaaacggctggaagaggcaaaagcggacggcagccttgcatttaattacggaattgcccgtatgccggatgtcagcgccgaactgcagagcagatctttgtctgttacgggagcggcagtcatcaacggctattcggaacacaaggaactggcggactgcttcgcagcgtatctggcagaaggatatgcggacggcctgtatgaacgctccggcaaaatgccggcaagtcttcaggcggcagagaatgcagacaacggtgcgcttatgatctttgccgatgagtatgcggacagtgtgtcattgccgaagatgctagagacgggaaatttctggatgcagttggaagtactgttttccaaggtatggaacggtgacgacgtgactactctggtacagcagctggacgagaccatagccggacaggtaggtggtacagagaactaaaaccgttacaataaaatatgaatgaacgaaccggtcacaggatagactactactaaaaagaaaaggtggtagaatcctatgatcggttttttgattgctttagtttccggtgcgctgatgagcatccagggagtgttcaacacccaggtgacgaaatccaccggcatctggaccgccagtgcatttgtgcagtttacagcattgctggtatgtctgggggcatggctgtgtacggagcggacttcattcttgaagatagcgcaggtggagcccagatatatgcttttgggaggggccatcggagcctttatcacctacactgtgatccgcagtatggatgccctgggaccggccaaagcggtaatgcttattgtggtcgctcagcttgctgtagcatatattatcgaactgttcggatggttcggtgtggagaagcagccctgggagtggcggaaagccatcggcatggccgtggcgattgtgggtattgtgattttcaagtggaaatgatccagagctatccgcgtagcggcaattttacgaaggggttctgaatcgttaccacaaatgcgaaaacggcttgtaaattccgtgcgattccagtacaatgaaagttaacagcatagagaggcaatcccctgaaattttgtgaagaaatcaggaaaatggaaaggggactatgatgttttcgataaggttttttaaaacaaaatatgcaggtttgatcggaatgtttttcagtctggtgatgttcatgaccggctgtcagaggaaggatgaggccattgtgctgattccatccggagaagatgtggcggaatttccctcactggaagcggtggaacaggcagcggagcctgcaggcagcagcgtgacagtgcaggaaccggcaaaggctgaaccgcagatgatatatgtctatgtctgcggcgcagtgcgggatcccggagtcgtggaagtgccggagggcagcagagcggaggaagccttgcgactggtcggaggtatgacagcggaggcggatcctttttatgtgaatctggcagaaacggtgacggatggtcagaagctgtattttccaacgttggaggaagcggagactctggaagccgaggtaaaagcgacggcggagggacttgtgaatatcaacacggcatctgcggaggaattgtgtgcgctgccggggatcggagcttcccgggcagcagatattgtgcgctaccgggagcaaaacggagcctttcagacgaaggaagacattatgaaggtatccgggatcaaacagaacgcgtatgacaaattgtgtgataagatcacggtacaatga

SEQ ID NO: 658 - DNA, 29562 bp, unidentified
  source 1..29562: mol_type = unassigned DNA
  misc_difference 20061: note = a, c, g, or t
  misc_difference 20062: note = a, c, g, or t
  misc_difference 20063: note = a, c, g, or t
  misc_difference 20064: note = a, c, g, or t
  misc_difference 20065: note = a, c, g, or t
  misc_difference 20066: note = a, c, g, or t
  misc_difference 20067: note = a, c, g, or t
  misc_difference 20068: note = a, c, g, or t
  misc_difference 20069: note = a, c, g, or t
  misc_difference 20070: note = a, c, g, or t
cagccgctttttttatttccggctctgcaggcgtttctttatcatttctattaatacgcaaactccccacgttgcgacgaagcagagaatcaaaatcagcagattgtcccgatttgtatttcctatcttctcctgcagccatactgcaatataccgcacaacaaaataatgtatcaaatagaattcaaatgaaaccgtacccagtatcagaaatggtttccatgcaaaaactttagaaagaatgccgccatcatacgaataaacaaatatcagcagcataaaaacaagaatcttttccaaataagtattccacacaggatttcgaagcgtttcaaaataagaccacaccgctaaaacaattgcagcaatttccaaaacggtcatacccgttattcggataccgcttctgtctggcttctccctgtgaaataccatcctgagatttgcgagaaaaaccccgatacaaaaaacgacaatgtcaacaggaagcgaacgcatcacatattctctggcggcgcctgcttccagatatctggcggaataaagtcccattccgatatacagaagtatcagcgcaagaagaatcatggcattcttccctttctgctcccgcaccgacgaagccagcatgataatcaccggcgtaatcagatatatcaaaaacaatgccgacataaaccagccaacgccattgagtgaaacatacaatttgctgtttggaatcagcatttgaagcatcggaatacttattacatatctccacagcagttcctttaccgtatctgccaccggatttttaatcatctcagccaccagacataatgtctgcattacgatataggtcggatacaccttttttatccgtttccagataaaacttttatatgtatccttattcagggccgcaagtttttcactatatcccagattcagacaaaatccggataacaaaaagaaaaatgtcacgccatatacgccattgttcatataatgataaaagaactccgtcgccctgtcatttgtcataatgaatccgcaatgtgcaaggaatacggttgaaatcatgaaaaatctccacgcctcaaatgatttaactcttattttcatcgcaattcctcctgtccttccttacgttccggaaacagcgtccttcttcggcggcaaaaatccctttattatttttcccgcttcgcgctctactattttttcaaatgcaatcgcaatacagattatcaaaatcaatcctgcaaacaaaacaattccctcatataatgaataattgtgtttcttaaatcccgccagatataaattcgtacacacatgatgcagcagaaaaatttcatacgaatattttccaatcacttttatcagttcgatatgcgacaaatcgattcgttcaaaaaggaataccagacagacaaataatgcccagccaaataacgtgatatccataatcggatacttaaagttatcaataacgccgcaggcaatcaaaaccgcaagacaaagcaaaaacagctttttgtctgttttcctgctctgcatccaccttgcccacaacataccaaacagaaaatcacaaccacgaataatcagattccgggttaaaccaacctgaaacggattaaaaactgccacaagcacatagagaatcaatccaatcacagcagtcaaaaccggctgttttttgacgccaatccgcagcagcggaaacgccagataaaatagaatgatacagccaagaaaccattcgccaatcagataataattttttccaagatatccgaaatatccatccatacccaataccgacagcaaaaatttccacgtcggcactgcttccgtactttcaaaccaaaactgctttctcctgataaacagataaatgaaaaccagtgcatacgaacaccagaacgtcggatagattccgaaaaatctctttttaaaatactgcttcatctttatcgtttcaccataattgtaatacagggatacgcctgagataataaaaaatagggaaacacccagcgttccaaaagaaccattggcatattcactttttatcagatacggatggccttgtatgttgatacccgctgcaagaagcgacatattaaaatgcgacattacaatcaagcacaccgctaaaaaccgtataacatccaggtattttaatcgttcttttccatttgtcattttttcatcctcatcgtaactgtttctattatgctttggtacttgaaacgatatgctgcataacattccttcaacattatgcagcatatcatttctaacgtgtacttcaaacattttatatctttacaaaatcttcacctcgcaggcaatccattttgcataagacagtctattccgcttactttacagtttatcaaatacttctactatatcttttactctgtcgcggaacgtatgcgctttcagaactatctgctgtcctgctttcgcctttttctcccgttcctcatcatgcgtcatataatagtctatcttttctttcaaatcctctctgtcatgatatgtgacgacgtttccttcaaacaaggcgtcaatttccgggatttcatcgctgattacaaaagctccgaccgcaagcgcatcaaaaatacgatttgatataattccgttttcccgcatatcatcccagtggtcgtttaataatatcttcgcgtcgtgatatgcctgtccgaccttgccattatccaaatagttgtctacaacataatcatataccggaaattcttcccagtttcttccataaacagaaagtttataatcggttggaagcaaatccttcagaatcggacggaatatttttctggaatttcctataaaaagcaattcatattccttttccgctttttcgtcatagaccatcacttcatcatccacgcattgcaataacacgcccgatggcacttcaagctgtggtccgatttcccggcacatcttttccgatgcaaaaaatacataatcatatgtgttatattcttcgagcgaaatatcttccggatgtgaaatattccacataatatattttctgccatccagcaccggctggtaataaggcttcgttccgcgaagaacaatcacatactttgcagtactcttatcataccatctgtcgcgcggaaggatattcacctgatatccgagtttttcaaattctgttttcatacccaccgcaaaatgctggtcgccccagaattttttcgtttcattatccggcatcgcgccgcagatatcgatttccttctcattgacagcgtcgtccatataaccttccagaatctctttcagacggtttgcccgcgcatcataagtatgatgttccagaacaaacgctttcaatttctcaaccagttcctgtctttcttcctcatgctcgagatagtaagtcagcttctgattgaattcctctttgctgtcaaaggatggcagcaaaccttcaaacgtttcttccgcaccaattactccatttgtcaaaaccaaatcaccggctgcaagcgcatcaaacaccctgctgttgactgcaccaaatgcctttgttacatgatttgcgtcgtcaatcactatctttgtattttcataaatcttcggcatatcggaataaacgacaaatccctgtgcgttgtccttaaatttgtcaatcttttcccagtttgctccataaatcttgcagtcatatggtatttctgccggattcagataatcaataatatcccgcttgacattccagtaacttccggtaaatgcatagtcagacgtgaaccgttcctgttcttcttctgtcagcttcagcggttcttcccggacaaatcggtcggcatttgttgcaatcgggaacagaatcgctttcttattgctgtgttcctctacatattgacacgcagttttactcgacgcaaataccatatcaaacgcatcaaaatattctttctcacaccagcgttcaaaccagtttcttgcccacgcaatcgtgataatatcattcttgcagttataaatctgtgaaatatcatatgcatccagaagtgaaatcaacacgtcaacttccggtccgacatcataccagtccttcttgccgaagcggctcagatatttcacctgataaccgagttttttaatggaagcggcaaattccatcgctgtaaagaaatcgcctgctgtcgtatccgattttgcttccgttacgacaagtcctatcgtcagttttctctttacaaataactgcgttccattcagcttatcattgtaaagtttctctgccagataccgctgccatttgcctttaaatacattcatattgtgcagtctgcgaatccggacgtcccttgcgacatccttgctctgcgttccaaattcataatgataaacaaggcaggtcggacaataatagttcttatatcctgccgcataaaatttcaggcagaggtcaacgtcctcatatccgtaaatatatttttcatcatatccgccaactgcttcgaaaacttctttttttacaagcataactgcggctgttacgcaggcgcgctcctgtacgtcatagctgatatccgtatccagtgttccatttcccatattgtatggctgaataaaatatgctttctcccgcatcacatccttaaaacgaattccgctgtgctgaaccgtatacgattttccggaatttgttacgccttccggtatctgcggatatatcagctttgcaccgactgctcccggattttctgaatcatgcatcgcaaataacaactcgtccagccaaccgtcagtcacttccgtatcattatttaaaaacagcagaaaatcgccctttgcataccgggcgcccagattatttgctgcggaaaacgacatgttttcttcgtttttaattatcgtaatatcaaaagtatctttccatgactccagatacgcaaccgaatcatccgtcgatgcattatcaacgcaaatcagttcaaaattcttataaaattctctttccttaagggaaggcattaaaacctgcagattgcgcataccatcccgatttagcataataatagaaacaaacggtttttctttctccagataatcaatcttatccagataggtaagattcatttcccttgctttctccccgcaaagcgcaaggaacatctgctccgtttttctgtcattataccgttcgcgaagtctggcaatatcggctgcgacacaaccttttgcagactgttcttttaaattttttacgctggtattcaactttttgacttcattatccagtgattttttttctgtcctgattttcttgatttccttcgaatatgtctggttctttttctttaacgatgcaacctgctttttcaaatctgcattctgtttttttaacgtcttaatatttgtaagcgcagctctccattttttaagaaatccacgaacccccggtaattttgcaataaagttttttatcccctgcttcaaatcaacttcctccgccttcatgtaaaaatatcgaatatttttgtaggctcaaaatcaagcctgcgtatgtttttataagccagttatcggattttttcttttttatctttcattttttttaatttttataatttttcataacatttttacataaaatgttattacctgaattataatatcacattcctacagaaaaatacacaaattttttatgctttctgcctattatgttcctgatacattttatgcatttttcaaaatctttataaatttattgcctgaaaaagttcgtccttatcatcctgctctatcgacagatatctttttgtaacttcaatattcgagtgattgtatatattcatcaataatgcaggcggcgttccgcatttccacgcatgatagccaaaggtttttcttagcgaatggcagcttatatttccgtctattccatttaattccgcagcctgttttatgatattgtatgcgcggttccggctgatgtggctgtgcctgtcgtttcccgaataaaaaatatattcgtccggagaaacgcccttacactgcttccttagtaatgtaaaagcagatttgcagctgtcatttattgcaatacaattgttcttgcccgttttctgctccgtcacatatatatgcagacgatagttatttttctcaaaatcccagacgtctatccactttagctgcagcaaatcgcttatccgaagcgctgtgttaattcccacgacaaacatcgtataatcccggtagtcctgcatctgcaaaaagtagttcttcattccttcaatgtcttcttttcttcttatgggtgatgtaaccattctaaaacctcctgctttaaaacctttcccggcacataaatgtaccctgctcatttaaaaagtaattcacataacattttatgtaaaaatgttatctctttatataatacatcggtccttttacgaacctgtacaggaggaaaacagcgtaatggagaaaccgttttttaaacagaaaggcaccaaatgaggaggattcaaatatgtgtaaagtgtcaattgtaataccagtatataatgtagagaagtatattgaggaatgtttggtttcggcactgaatcagacactaaaggacattgaaattatatgtgtagacgatgcatcaacagatgcatcgttagaaatactgcaatcctatgcggaaaaagactcaagaataaaactgatttcatataaggaaaataagagcgcatcacaggcaagaaaagatggcgttttccttgcaaatggagaatatattatgttcatggatggagatgattttctccaatcagacgcatgtgaaaaattatatgattttataaaagagaaaaacgttgatatggtccagttcggaaccaatatcataaatatgaatcatatgaatgaacaacgaatccaaaatttagaaacgttcttacagccgcaccttgaattattgcggaataaggaagtgtttgaaggctgcttttctgaaaaaaaataccgttttacaatatggaataaaatatatgaagcaggctattgcaaaaaagcctttacccatgtcaaagacggaaattttccaaaagcacaggatttgtatgctttttttgtattgtgcttttttgcagaatcctactgcggcatcgaagacaaatactataattaccgatttggagcaggaattaccggcaattcttccatatctttaaaacagcttgaaagatactgcacttccgtttatgtcgcagatgctatcagccagtttacccgggagcaggctgcgttttatcaatatgatgccattgttaaagaaatacgggactctttattaacggactgcataaatcaatggtttttttacacatccgatgaaattgctgcacagggatttgatatccttgcaaaatactggaatacaacggaaatcgtttctgcactttgcagaaaacattataccgaccgcgcagtgattgccgataaaatctatggcgcggatgccctcaaaatcaaaaagaaagaaattcatacaatcggcatattttattatcgtatgtccattggcggcgttcaaagagtcatctctattttaattccgatttttatggaattaggatataaagttgttctatttacggacgaaattgatgaagaaaacgaatatacaatacctgctgaagtcgaacgaattcttttgccaaattcgttaaaaataaagccggcggaatatgaaacaagagcattggaattcgaaaaatatttaaaacaatataatatcgacgtaatgtgctatcaggcggcatcttcgccaaaacttctgtttgacgtgatactgatgaaaatgaacaatattccggttattgcgacttctcatgaagttccattccagaatatgctcacaatgaatgtcgaaatgacaagacgtccgtccgtatttaagctattagaccgtttaaccgtattatcaactacggatgagctgtactggaaaaatcttggcattaacgcagtctatgttccaaatccgataacagaaactattgtcaaacgggatttgtctgtcattgaaaaaaacacgattttatggattgggcgcttggattcaagaaccaagcgatgcctggatgttgttgacattatgaaatacgttgccgcagaaataccagacgctaagcttctgatggtcggaaatgaagttactccaagcattaaacaggacctgatgatgaaaattgaaaaacttggcgttgaaaataatgtcattttgtgcggtcatacgacagatgttgattcgtattacagacgtgcggaaattcatctgctgacttcaatatcagaaactttccctatgacaatagttgaaagtaaacaatatggcataccgctcgtattatatgaattaccttttgttgaagtttgcagagataacagaggatttctatccgttcctcagggggacaaaaagaaagccgcccaatgtatcgttcaaatattgagggacgacacattgaaatcaaaactgcaaaaggatgcgcaggatagtattatctctttcgtttcaaaatacgatttgaaaaaaatgtggagcgaactctttttgaatctatatcaggaagaacagacggttccggacgcaggtatcaatttgctgttaaaatcaatgctgcagcattttgcttatggcgcagccattgttaataatgaaaaagccgcattaaaaaaagaggtaacaaaaaagcaaaagaaattgtcgtcgatacggaaaaaattatcagctattaagaaaagccattcctatcgtatcggcagaggcatcacctttctgccaagaaaattgaaagcggcagttcatgcgataaaaagccgcggttaaaaaacattaatttttaatttatttttaatttaaagccggataagcttgtcttttccgttgtaatcattgctcaaaaagtatatactatacccatctattaaaaaaggaagggatgctttatgtccatgaacaacaaaaaagaagaaagctaccggcttttattacagcagaacatggaactgaaaaaccaaatggagcagcttcttgccgcctttgatgaaaccagagaaaagctgaaccggctttccaaagaaaatgaaacgatgcgaaaggaactccatgacgtccggcagaatcttggcaatgccagaaacgaaatccataacgttcatgttgaccttggaagcgcaagaaatgaaattcatgcggttcatgttgacgttggaaacgcaagaaatgaaatccacaaggttcatgtcgatgttggaagcgcaagaaacgagattcatgcggttcatgtcgatgttggaaacgcaagaaacgaaatccatgctatccgcaaggatactacgtctgcggtgcatactgcggaatataaaattaacaaatatatggataaagagaaaatcccggaagcgctttgtgactggtactatgaaaagaccggcaaaactttggatttagaacatccaaagacctttaatgaaattatccaatggaccaagctttatgattttgatgcggaaaaatgcaaattagttgacaaatatctggtacgcgactgggtaaaagaaaaaatcggagaaaactatttgattccgttgcttggcgtatgggacagagcagaggatattgatttcgataagcttccgcaatcctttgttttaaagtgtaatcatggctgccactataacattattgtaaaagacaggtccatacaggattttgacttaattcgaaagaaattaaatggctggcttcatgaggattttgcatttatgaatggttttgaaatgcagtattctcagattcagccacgcatcatagcggaagaatacattgaaaacgcgaacgaagatttatatgactataaagttttctgtttcaatggaaaagccaaatacattatgttcctatccaatcggaagcaaaaattaaaaatgcagttttatgatttggaatggaatttgcagccatttgtgtatagctttgaacgggatgaaaccattattgaaaaacccgataatttaccggaactcatcgaatgtgcagaaaaactggcggcaggctttattcagtcaagagttgacttttaccggttaaatgacggttcctggaaatttggtgaaataacttttacctccgcatcgggtatcgcgaattggaatccgccggaatacgacgaaattttaggcagtcagattgacctgaaaaaataaataagctgcatcgaaaagaatgccgcctgtcaataaaaatggagattggacaaatgaaaaaagtcaccctgattgtaccatgctacaatgaagcggaagcgcttccgctgtttcaagaacaactgaataccgtaatccatacgcttgacagctatcgttttgagattttacttatcaacgacggttctaccgacgatacgctttccgttatgaaagaaatctgtaacgccgacgaatcgtataaatacatttccttttccagaaattttggaaaagaagctgcaatgtatgccggtttctgtaattcagacggtgattataccgcggttatggacgccgatatgcaggaccccccttctctgcttccggagatgcttgcctgtctggaaaccgaggactatgacagcgtcgcaaccagacgtgtttcaagaaagggtgaaccgccgatacggtcatttttcgcgcgcaaattttacaaacttatcaacaaaatttcggatgctgacgtcgtggacggagccagagatttccgcctgatgaaaaaagagatggtcgacagcattgtcgcaatgtgcgaatataaccgtttttccaaaggcattttcggatggattggctttaaaaccaaatggatagaatacgaaaatgtaaaccgtattgccggtgaaacatcatggagcttctggggactgttaaaatatgcaattgatggaattatcaatttttccgaaacgccgatgtccattgcttccggcttgggaatgtttcttacatttgtttcgtttatcatgataatatttattattatccgcaaagcgatatttggcgacccggttgcaggctggccatcccttgtatgtattattttgtttatttcgggactccagtttctgtgcatgggaatcatgggaaaatacatggcaaaaacatatctcgaagttaaaaaccggccgcattatattgttgctgaaacaaacaaagaagatacaaaacgcatcaactaacctgctactgattcataaagaaggcgtaatatttgaaaaaactgattgatactttattgtttataacatttctaatactaatcatacatacaaaatccgtttctgtatttgcggcagcggctgatactgccgcctcaaatcagacgataaccgtaactgctgaggatgggagcgatatatcggacaaactccgggaagcgcttatcaatgcgcgggatgttgccgacagttccaatcagattgtcaccgtaaaagtacaggaagggaattatttcctgtccaaaccgcttcatatctacagcaatacaacgctcgacgtcacaaatgttcatctgacgtttgccggttcgcaccgctttaacatgcttatcagcggagcaaacagcgcatacaaaggatacgacaaatacaataccagcgaagcctgttccggatatgacggtttcaaaaatataacggtaatcggcggtacatgggaaagcaccgatgccaacgaaagcagtattatccgcattttccatgcgacaaatgtcacgttggatggacttaccgtaaccggaggcgcctgcgttcatcaggtcgaggttgccgcaatcaacggattttatgtgaaaaactgtacgtttcaaaatcatggcaaaaatgcggacaatacaaccaaccgcgaaaaagaagaagccatccagcttgacatgccatacagcacgcaggtctatcccggcacctatcaggatggaactccgatgaaaaatgtcgaaattacaaacaacacattccagaatatcgcgcgcggcgtcggcacacatacgatgctctgcggcgcataccatcagaatatcaacatcagcaataatacatttatcaacgtattagaagaatgtattatctgcttaaattatgtcaactgccagataaaagacaatacgattacgaaatgcggcggcggaattcttgttgaaaactgcaaggaatacaacccttccatcaacacgagcatacacgatggcgcggaaaagcatgcgactacggttctccatgatttgaataccgaaatcagcggaaacacgattcagattaactaccgcccgaccacatttcaggttgccggtatcttcatctatggaagaaatattaccgaggatgcccttggcggcgacggttatgccattccaaaaaaggactattttgccagctccgtttatgtgcggaacaataccatcgtcactgcaggcgacggaatcgttgtatcagatgcaaaagactgcgaactatcgggaaatacgataaaaggctacggattttctgcaaacgatacttccaaaaagtccagagatggtatacggataaatcatgcctgctccggcatttcgataaccggaaacacgataaaaaatatgccgcggaacggaatttatatttatcagaaatcttcggtttcaaatattgtaaataataccatcagcggatgttcgagaatcggtatttttctgacggaaagcagcgcctgtacctatgacattacaaataataccgtcaaaaaatgttccgccggaggtattttgattggaaataacagccgcacttctgacatgattggaaatgccatcagcaaaaccggcggaaaagccgccatccgaatctataacagcagcaatgccggatatataaattccaaccggatatacgatatgggaaaactgacaaagaaacgccttgcttccggcattgaactaaccgggcattcttttgtaaaaggtatcgcaggcaatcagatatatgcctcgaagaataaaaatgcggcagattttggaatcgtagccgactattcctcccggatttccggctcgattgaaaacaatgcgatttccgatacggtaaattattccatcgctgtcatgaataaagcgcgggtatcggacgaaatcagcaaaaaccgcatttccggttccaaaaagagcgcaatcgctgtaacaaattcaggatttgtcggaaacggtattgaaaataacacaattgcttcaagcgaagcaaacggaatctatctggacggaaaaacaaccacctgcagccggatttccaacaacacgatttccgactgcaccaattacggaatcaatgtccagcatatcaaaaacaccctttccgtaacccataacacgctaagcggaaatggcaacagcgcgattaatgtcgtagcaaataagaagaatctgataacgatttcagaaaatacattatcaggctcctcaaagaaagcaggaatccagttgagcaaatgcaaaactgcgatatttgaaaacacgataagcggttttaaatatgctgttaaaactacttccgtttccggctcaatctatgataatatatatagtgaaattaagaaaaaggattacaagatagatgactccgaaaagcagcccgatgagcagactgcagcaataagctgtacgccggattatttgaaaaatcaggtgactgttacatgggattctctgaaaaacatcagcggctacgaactgcaatacagtaccgatgcggatttttccaattcatgtaccaaacggttcaatgcagaccagacatttattcttttgcatgacatgccaaagaataaaaccgtctactgtcgcatccggggatacaaggtcatcggaagcatctgtatcttttatccttttcaaacaactaatttcatcatgaaataataacactaaatgaactcatctgatttcaatacttgcggtaactgttttttattgcctgtgcaaatgcaagcataccaacgcagggcgtttgcacaggcagtataaaacacaacattattcgcaagtattaaagttaccgcaagtattaaaattcacttgaaattctcatcagggaaaggggaaattttatgaaaaagaaaacgttacttttaatcaccggcatgcttgtttcgcaggcgctttttgccggaagcagcattaacacactggcggcggaacaaaacagcagcatctgcacgctggcagcggaacaaaacagcaataccgctgaaattgccgcagccgctgaggaaccggagctttttgcgaatacttactcggttagcggaaatacgattaccgttaccgcaaaacaaaacagcgacatttccgaggtcttaaacgaggctttgcttgcggcacgagatatggcagatgcaggcaatgaaatcataactatcaacgttcctgccggtacttacaaacagacggacgcgcttcatattttcagcaacacaacgctgaatctgaaaggcgttaccctgcaggcttccggcagcgcgccatttaatatgcttattaccggaaccatgggtacttacaagggacaaaaaccatataatacaagctctctttgcagcaagtacaatggtttcaaaaacataacagtaaacggtggaacctttgtcagcaattcgaaaaatgactctgcgattgtccgcctgttccatgccacaaatgtaaaattgaccggactgacattaaagggcggcgcctgctcccaccagatggaagtctgcgccattaacggattctatgtcacaaactgtacattccaggacaacggaaaaaaagaaactgacgttgacaaccacgacaatcaggaagcgctgcagctcgacatgccatgtcgtgatttcgtatttcctgacatttattccgatggcactccgatgaaaaatgtggaaattaccggatgtacatttaaaaatgttgcccgcggcgtcggcacgcatacattattaaaaggcgcctatcatgaaaacattaaaataaacggaaacacatttgacaatgttcttgaagaatgtatcatcggactgaactattacaattgtgaaataaagaataatacaattaccaactgcggcggcggtattattttccagaattttaaatccacgccaaattcgatgaacacgaccattttaaatggcaaaaagaaatttaccggagaattccgatacgatatgaaaaccgttatcagcggaaataacatcacactccgctatacgccaacctgcgccgaccaggaaggcatcaaggtattcggctacaaacaggcaaaatcagcaaagggcggcgacggttttgcgattcctgtcggaaattattacatcagcggcgtaaccgtaacaaataacacaattgtaacgtccggacatggcattcatcttcttgacgccagaaactgtaccgtaaccaacaacaagataaccggaaagaatttctccaaaaacgacccggacagaaataataaagacggtatttttgttgaaaattattctaagaatattacgattaccaacaacaaaatatcgggcatgacaatgaccggtcttttggtacaaacttcctcaaccgttggaaatataaccaataactcctttgtcaactgcggcggacgcggtatccagatttacaacaagagcggctgctccggcaccatttccggcaacacgattcggaaatgtaaatccggcggtattcttatcagcaccggaagcacgacaggcgttatcagcggcaatacgataaccaaatgcagcggcgacgccggaatcaccgtatacaagaacagcaagaccggaaagattataaagaataccataaccgatatgggaaaggatacgaaaaaggcgctgctgcctgctgttaaagtaacgacctcatctgcgaccggttccatcaccggcaacaaaatacaggcagtttccgaaaagtattcttcctcgagagcgatactgatttataattcatccaaggtatccggctcgattacatcaaatacactggaaaaatgcaatgataccgcaatttcgatttctctgaaatccaaagtaacgggaagcgtaagcaataacaagattacttccgctgccagatacggtatccagacattaaacagttctacgataggaaagaccattaccggtaataccattaagaatgcaaagacctgcggtatcaacatctgcagcacaaaaaacaagctgacgattgacaaaaacaagatttccggctgctccaatgccgcgatttacgttcagccgaatgataccaaatacaaagtaactgtaaagaacaacaccctgaccggcaacaaaaagggaccgggcgttgcggttataaaaggaaatattaaaattaccggaaacaagataaccaaagtgacttacggtgtatttgctgacaaatcctgcaaaggcaacatttattccaataaaataacaaaggcgtcaaagaagaaagtatataccgctacgaaaaacgtaaaactcaagaaataattgctgcgcacgcaataaatagaattacaagaaatagaaaaacaaaaaataaaaaagcaagaaataaaaaagcaagaaataaaaagtaataaataaaaagtaataaatagaataataaataaaacagcaaaaaagccatatataaacgatatcgccgacatcattcgcttaaataatgatgtcggcgatactgttttttatatatggctttcttctttgaatttgattgggtttagtctaatgtaacttttacctttttcagattccagatttcctttgcatattcttcaattgttctgtctgatgagaacttacctgaacatgcagtatttaacataaccatcttagcccagttcttctcatctctgtagagcgtatctacttttctgtgtgcctctacataagcttcgaaatccttcaaaatgaagtaaacgtcttcgttcatcagagaatcatataaatctctgaaacgctcagggtcatccggtgaatacattccatttatcaactgtgtaagaacggttcttactgctgaatcattgttgtagatatctcttggattatatccgccttcccgctcatatttcataacttcttctgcacgcagaccgaagataactgcattttcttcgccaacttcttctacaatctcaacgtttgcgccatccatcgttccaagcgtaactgcgccattcaacatgaacttcatgttaccggttccggaagcctctctggatgcggttgaaatctgctcgctgacgtcagcagccgcaaaaatcagctctgcattggatactctgtagttctcaataaatacaaccttaatcttgccttcaatcgaagcatcattgttaatgacgtctgcaacggaattaatcagcttaataataagctttgctctcttataaccggcagaagccttcgcaccaaagatatatgtggttggatacatgtcgtatgcaggatttgtcttcagttcgttgtactggtacataacatgcaaaatgttcagaagctgtcttttatattcatgaagacgctttacctgtacatcaaagatggaacgagggtctacttcaacaccgttatgttctttgatgtaatttgcaagacgaactttgttctggtatttgatattcataaattcctgctgatacttctcgtctgtagcatatacctttaacttcttcagatttgtaagcttggtaatccattcatcgccaatcttctctgtaatccagtctgcaagaagcggattaccatgaagcaggaaacgtctttgcgtaataccatttgtcttgttgttaaactgttccggacgcatttcgtagaaatctttcaattcccgttcttccagaatctttgtatgaagggcggcaacaccatttacagagtatgaacctgcaattgcaagatgcgccatctttacctgtccgtcgtaaagaatcgccatattctttaccttatcctgattgcccggatacatggtctggattttcaggatatatctccggttaatttcttcgacaatctggtaaatacgaggaagcagtctggagaataattcaatcggccacttctcaagcgcttctgccataattgtatggtttgtatatgcgcaggttctgcaggtcaaatcccatgcatcatcccattccagaccttcttcatccataagaatacgcattaactctgcgactgcaacagttggatgcgtatcattcatctggaacgttactttatccggaagtttatgaatgtctttgtttgtttctttaaatttcaaaattgcccgctgtacggatgcagaaataaagaaatactgctgtcttaaacgcagctcttttcctgcatagtggttatcatttggataaagcacctcaacaattgtctttgcaagattctgctgttcaaccgctttctgatattcacccttgtcaaatgaatcaagtgagaattcctgcatagcttccgcatcccagattcttaatgtattgacaacgttgtttccatatccaataacaggaaggtcatatggtaccgcacgaatcgactgatatccgtcctgtataaaataatttctgccatcccggttttcaactctgacatatccgccaaatttaacttcaactgcatactctgcacgcttcacttcaaatggattaccgtcttttaaccagtcgtccggaagctcaatctgatatccgtcctgaactgcctgcttgaacataccgtaacgataacggataccgcatccatatgcaggatatccaagtgttgcaagagaatcaaggaaacatgcagcaagacgtccaagtccgccattaccaagcgctgcatccggctcctggtcctcaatcatattcaaatcgaatcccagttcatctaacgcttcttttacagcatcataatatgtcaggttaatcaggttatttcccaacgctctgcccatcaggaattccattgaaagatagtaaacggtctttacattcttcttctcatattccttatgcgttgctatccatctgtcgataatgtcgtcttttacagcatagctgacagcctgaaatacttgctgcggagttgcttcttcaatcggttttctgtataatgtcttaacatttgaaataacctcttttttgaagccctctttgtcaaagtcaatcaactttttcatttattgtatcctccttgaaaattatacgccaatctttctctgacgttttttctaaaacaaatactgacataaccccgtatctgttcctgtttgttgcatctgtcattataaaatgaacgactaactgcctctgatatcatattattctaacaaaaaaacatgtatttctcaatacatgtcttaatttttagtagaaaaatacatattttttagaccaaagtctaattaatattacatttttacaataaattttattcatttcgggataaattacaggattatctgcccggcgtacccatataaaaacatccaaatggattgcatatgttgccgcagcaggacgtcagcaggcaaatcgtgcaaacggtattgcagcattttgtcatatctctgccggacatgtccattccatatccctgtccctggtccatataccatttcgagccgctttttatctgttcatatgcctgtttgtattccatattgtccggctccatctgcatcgcacgctgcagcatttcaagcgcgcgaatctggtttccaagacctgcattgcacacgccggaataataatgccattttgcattgtgattctcaatctgattcagcacatttctggcttcctcataactgcctgaccgcagataatttctggctgcctgaaaataccgggattcctggtcgtttgcgttatattcttcttctctcctgctgtatccgccaaaaccgccaaatggtccaaagccgccataaaaaccgccgaacgtcggcacagtgaaaagcagaatgcatcaggcaaagcgtannnnnnnnnngttcaagcaggcagttcaggacggatatcagattgagcttccggacgggtccgattcatcataggtggttcttccattttgcgaagtatttctataactgccgccataggaaccgttgtatccgcctccatacgagccattgtatccgccggctccataagcgccgccgggtgcatctgcttctccatccataatggctttgtatgcctgttggatttccttgaatttttcttctgcttcttctttattcggattattcacatttgcatccggatgatactttctgctcaatcgtctatatgcactttttacttcatcgttactggcgccgcgtttcagtcccagcacttcataagggtctttcatgtaatctccattctgccttttgcatctttatccatacaccttccggctgttgctttataataactgttccatatgccagaatacaatatatttctaagaatttccacattttttattatcggaagcttttcaaattcctttgcgcattccgccgcctgcatcatcagtatctcttttgtccagtcagcaagcgctttccattgttcttttgttatgatatccggattggttccggaaaaatcttccagtttataccgcagcggattgaagctctgtttccgtatgtccttttccatatcatcataagcatcgagaatatatacaaattttccaagataatatccggtctttctcagattgtcttcccattcatctttccggaatgcaaagatttctgcaaggacgtcgccaaaatatccggaaagcctgtccaaatcatcgctgttttccttttccagctcactgatttttttaagcctgtctgcaatcattgttatcttttctttgtacgaacatattctgctgtccggattttgcagttcgcgtttcggcagcaaaagattcgcgtacagtttgcgaaatactttcttttcatcctgccagtcgtccagacatttgtaatatgtaagaatcaaattcatatcagccgcataatcggaaaatacattcttgatatattcatgcttcgccgccggatgcacgacgcatcgccgcgctcctttttcctcctccggctcataaagtccggtcagaagaagcaccagaaacgtcatatcataacttaacgacatctgcccttttgcgccctgctcgtcttttaacgccttacacaatccgcagtaatatctgtggtattcgtcaaattctttaaatttcatttcctgctggtttacaactatatacccaaacacaagcaatctccattctcataataagttacaggcggacctgcaacaccgatacactagcttttcttaataaaagtattgccacatttcgggcatcgtatttcaattctgccctttccttttggaatacgaatcatctgctcacatttcgggcaggtgaaaatcctgtaatcttttcctgcttccttactctttttcatccgtttaaaaaagcttcggacgccaaccgtatgctccaaaaaccagcggttctggcttgcccgtttttcatattgttttgaaaatatacggatatagccataaataaatgccgcaagtccgaggaaatagaaaatacccgtcttcgcaaacaagtcgattaaaataagaatcagacctgcccatgttaaaaacgaggatagctggtcatttccatatcgggagcgcataaaattgtaaattttgtctttcatatccacaccatctttctagcctaatatcatcgctgactcctgcagctgacggtaggcatcttttattgttcctgcttctatatctgtaatcttatcggcgtcagtccggcataccagctttttcaggtattccaaatcacgccggatttttttaatctgcgccttatccagattctgactctgtcgttccaaaagattttccactttaacaacataggtgtttgcctcatgccagatatccatattttctttatttccctgtgtttcttcttcataccgtttcgcatcttcccgcgcgcgccggatttcctcctcggaaagattcgtactggatgtaatcactatctgctgttccacgcctctgccaaggtcctttgccgatacctttaaaataccgttgacgtccaaatcaaatgttacttcaatctgcggcacgcctgccatcgcgcgtttaattccgctcaggcggaaatttccaagcagtttattatctctggtgtattttcgctcgccctgatagacttttacttcgacgtctttctggaaattgcccgctgtcgtaaatattttggaaacccttgtcggaatcggtgaattccggggaatcaaaacatttgcgattccacccagcgtttctatcgacagagaaagcggtgttacatccatcagcaggatgtcatttaccttattcgtaaccgtaagcgcgccgcttaattttccgccctgaatcgctgcgcccatcgctacgcattcatccggattcagattcttcgaaggcgttttcccggttatccgtccgacttcatctataaccgccgggattcttgtggaaccgccgactaaaagcactttatccaaatcctttgcagaaatgccggcgtcccggagcgcctgattcaccggaccgtccgttcgttttaccaaatcgtccgtcaactcattgaacaattcccttgtaatcagcatatccagatgctttggctcatttttcacaacagttataaatggaagattgatatgcgtctgcaaaacggttgacaactctttcttcgcattttcacacgcttcccggattctctgaactgctgtaacatccttttccagatttatttttgtttctttcttaaacgcttttatcacatactggaccaatcgttcgtcaaaatcatcaccgcccagatggttgtcgcctgcggtcgccagaacttcaatcacatggtcgccaatctctataacggatacatcaaaggttccgccgcccaaatcataaaccagaattttctgggcatgtccgttgtccagtccatatgcaagcgcagccgacgtcggttcattgataatacgaagcacattcagtcctgctatttttccggcgtcttttgttgcctgccgctggctgtcatcaaaataagcaggcactgtaataactgcatcatgaaccgcctcgcccagataactttctgcgtccgtccttaattttgacaaaataatggcggaaatttcctgcggtgaatattctttcccatctatctgcttccggtaagcagtacccatctctcttttaatggacaatatcgtcctgtctacatttaccgtaagctgacgctttgcagcatctccaaccagcctgtcgccatttttcgtaatcgcaacaatagaaggtgttgtacggtttccttctgcatttggtataatggttgcctgctcgccttctaatacggcaacacagctgtttgtcgttcctaaatcaattccaattaccctgctcatttcctgattctccttctatatccatggcgccgaatggacgagcctttgcatgacgccaacatccttaatcgtatccgctggaaaaccagcttttttctaaaaagtatgatagtcaagatttttgaataaaatgtgtatatattataaagcaaatataaagtgtttcataaaactttggcggaaaatacggataaaaaaagcccgtctagtggcgtccggtaaatatttgtagaatttttatagattttgctgtgatattttttatcatttgtttattgtaaacaaatcaaaagtatattacactatagatatcagacattttgtttctaaatgctatatttttttgaaatcctttgtgcagttttttctgtcaggatttcaacagaaaatcataataaacaggaggtattttttatggctaacagatttgtacttaatgaaacatcatatcatggagcaggcgcgattgccgaaattgcaaccgaagccatcggacgcggatttcaaaaagcgctcgtatgctcggacccggaccttttaaaatttggcgttacaaagaaagtgacggacgttctggatgaagccggtctggcatatgaaatttattccaatattaaaccaaatccaacgattgaaaatgtgcagtccggcgtagctgcttttcaggctgccaacgccgattatattatcgccattggcggcggttcttcaatggatacagcaaagggtatcggcattgttattgcaaacccggattttgctgatatccggagtctggaaggcgcagcgcctacaaagaataaatccattcctatctttgcagttccaacgactgccggaactgctgccgaggttactatcaactatgttattacagacgttgagaagaaccgtaaaatggtttgtgtagacccgaaagatattccggttgtcgcttttgtggaccctgaaatgatgagtacgatgccaaaaggtttgacagccgctaccggtatggatgcgctgacacatgcaattgaaggttatattactgccggtgcatgggaactttccgacatgttccatttaaaagcaattgaaattatttcccgctctctgcgcggcgcagttgcaaatacgccggaaggcagagcagatatggcgcttggacaatatgttgccggtatgggattttcaaatgttggtcttggcattgttcattccatggcacatccgctcggcgctctttatgacactccgcatggcgttgcaaatgcgattattctcccaaccgttatggaatataatgcagacgcaaccggcgagaaataccgcgaaattgcaagagctatgggcgttgccggcgtcgacgatatgacgcaggaagaatacagaaaagcagccattgacgctgtcagacaattgtcacaggatgttggcattcctgccgatttgaaagaaattgtaaaaccggaagatatcccgttcctggcacagtccgcatatgatgacgcatgccgcccgggcaatccaaaggaaacaagtgtagaggacattacaaaactgtatgaatccttaatttaaacaatttaaacggtttatgccgattatctcaaagcaatgccgccgatatcttctatgactgatatctttttacgaccgatacttcttacggaatatggcggcaaaaaaacaacaccccagaatgctgtttcaaacattttggggtgtttctctttttacatttcccggaatctcttatatcttgcttcggcaatttcttcgccgctcattccatcgaatttcttcagaaaatctttgatatgatatttcatatattttccgatatatggaaccgcctctttatctgcaccgccatactcaggaattacatgctcaaccacgccaagcctcaaaaggtcctgcgcggtaagctgcattatcgatgccgcttcctctgcgcggctgctgtctttccagagaatcgacgcatatccttccggtgaaaggatggaatatactgcattttcaagcatccagacttcattgccgaccgccattgcaagcgcgccgccgctgccgccttctcctatcaaaatacaaaggaccggaacctttaatgctgacatttcatacaggtttctggcaatcgcctcacccataccgcgttcctctgcttccagtccgcagaatgcgccgggcgtatttacaaatgtaataatcggacggttaaatttctctgcctgcttcatcagacgaagcgcttttctgtatccgtccggaagcggcataccaaaattccgctccatacattccgcactgcttgcgcccttcacctgcgcgataactgttaccggctggccatcaatatgaccgataccgccaacaatcgctttgtcgtcattcatcgttctgtcgccatgaagttcttcaaaatcatcacagatatattcaatataatcaagtgcgcatgggcggctcatctgtctggtgccgcggattttttcccatggcgtcttgttctcaaccgacgtcagacgctcttttaaaatctcgctgatatcaaacttttcatcattttctttgttaaagtttgcatagccatctctttgtttatgcgtcactatcaactgatacataacatccttcatcttatctctggtaataatgccatcaataattccatgctcaactaagaattctgaacgctggaatccttccggaaggtcctgtccaatcgtctgcttgataacacgaggtcctgcaaatccaaccagtgcgcccggctctcctaaaatgatatctccaagcattgcaaagctggctgtcacgccgccggtcgtcgggtctgtcaggatagatacatacaaaagtccggcttccgaatgcttcttcaatgccgcagaagtttttgccatctgcatcaacgaaatgataccctcctgcattcttgcaccgccggaacagcagaacatgaataccggaagtttttcctctgtcgcccgctcaaccgctctggcaatcttttcaccgacaacatatcccatactgctcattaaaaatcttgcgtcgcaaataccaatcactgcaggctcgccatgaatcagcgccttaccaacggtaaccgcttctttcagacctgttttttcctgtgttgcctttaccttatcttcatatccttccgtatttaacggattggacattggcatatcttcaaaccatggctcaaatgactttgcatccgtaaccatcttaattctgtttttcgtctttacgcgaaaataagcgccgcattcataacagatatattttgcttttacaactctttgcttatcaagttcagcgccgcatttcggacacttcaccgtttccggcttcggctcgtccgccacattcattttcaacttttccatttcggcttcttttgccttttttttgataaataacatttctgtttactgctccttatatttctgtaaaagaatacatgcattgtgtccgccaaatccaagagaattgctgattgcacagtcaacttcctgctcatatggctccttgcaataatccaaatccagttcttcttcactctcatgaagtccgcgggttctgtggatatatccttcttcaatggtcttggctgtaacgatacactctattgcaccggctgcgccaagcagatgtcccgtcatagattttgtcgaatttatcttaatgtcttttgcatggtcgccaaatgctttcttaatcgctcttgtttcaaccaaatcattcaaatgcgtacttgttccatgtgcattgatatactgcacttcttccggtgatatacctgcatcgtttactgcatttaacattgctctcgccggactttcgccggattcctccggagcagtaatatggaaagcgtcgctcgaacatccatatccggatatctctgcataaatctttgcgccacgcttctttgcatgctccagttcttccagaaccacaataccggcgccttctccaagtacaaatccatcccgctccttgtcaaacggaattgagcatctgtccggattatcagaggatgaaagtgctgtcagcgcatcaaatgttgaaataccaatcggagaaactgctgcctctgtaccgcctgctatcataacatccgcttcgccatactgaatcgtacggaacgcttcgccaatgctgtttgttcctgatgcgcaggctgttacaacgtcaatgctcttgcccttgcagccaaattgaattgcaatgtttccggctgcaatattactaatcatcattggaaccgtaaacggacttacccggtttggtccctttgtcataattttctcaaacgcgccttccagttcctgaagacttccgacgccggaaccaacacaggttcccaccatatacgcatcctctgcggacatatcaagatttgcatctgcgattgcttctttggctgcagcaactgcaaactgtgaaaaccgcgccattcttcttgctgcttttggctcaatatagtcttttgccacaaatccctttacttctccaacgaccttacacttatattcagacgcatcaaactgggttatcggtccaaatccatgtctgccttccttcaacccgttccagaactcatctacattcagtcccaaaggggttattgcgcctacgcctgtaattactactcgtctactcatgttctcaaaatctccttatatatagtataatttccatttttttccatacatatactgccccatccgctaccttcgcaagtattgtactacattttcatcgaatatggaaacaaatcttgtaaagtttttattaaatatgtcatgctaaatccctctttttcgcctgatttccattatccgccgcctttacattttccgtttgtttctccgccgcccccttatacggaatcgaaaaaatgaatttcttactgataaaatagttcagaaaaataaccaaaacagaggtaaatacctttacgcccattgcataccagccaaggcgggttacaaatacataaataattccggtttctatcagaagcgttgaaattctgctgatataaaataatatcagttcgaaaatataagcttttgctgtttttgcttttgtatgaaagacggattttctgttcgttgcaaacgatacaaaattatataaaatccatgcgatataatttgcgtaaatttcattgatatgacattcataaatcagaaaccaggaagaacccagattcaccacccctacaagaacgccccatgctatgtagatataaatttctttcggtattttccgtaataaaaccatgacaaaatttccccattttacataataaaagcaggtcctgtgccatgcaaaatgcattgtaagtccatcggcgcctgctttttcactcattataactcaaaatgaaatattttccattttaacaaatcttaatcttgcgttgtcattttaaatttaatcttattcttcaattgttatttttatcttcagttgttattttaatcgtaatctttcgttgcttttttaaccgatttctctacaatccggaaatttccagtccatccaacacccctttttcttccggaaattcctgaataatgcgttttaccattttgcggttaaattccatccgctcattataattaaattttaatatattcttatatccccataaatgcgtaaaaatgtcctgatttccgatttccgtcgaacccggaaaaaaagaagatattttcttctgctttttttccgcacacattgccagcatgcgctgttccgcaaaaaccatatggcagagattttcctctttctccagacaattttccatgaaagcaatcgcgctttcggtataatagtctttgaatgcattatccgcaatataaagcatacaggtattgaccggcaatacattccagttccattccgaatcaaatttgtattccggtttcatatgaaaaaattcttttccgggatagatcggaagagcggttcagcaggaa

SEQ ID NO: 659 - DNA, 15383 bp, unidentified
  source 1..15383: mol_type = unassigned DNA
ataacgacctcaaaataacgtaaattatcttctatttatgaatattctgacaattcttttgtcatttcaatacataaagaaaagccccggaaattcaatatttccaggacttctcaatataatctttatcttagaaattcacgattagcaaacaccctgtgcaagcatagcctcagcacaggtattcagtattcatggggatttcaaacatttttgtatattacgcgtatactactatctcactctgaaataaactaaatccaacttccacaaatttatgtcttgaaaatttacccacctcatactataataaacataaagagaagcaaccgcccacaaagtggttagcctcgtaaatggttatttaataagccactcgtccgccaagacaggagtggcttatttattttcgcttgttgttcctatctatgtaggcaagcagtgcgattagaaatgaaccgcctaaaaataacaggcttaaaacttcatacatatccatcagcaccacctcccctcgatctctagtctgggaggctaccactctgtacacgattacttctcatgccggtagtgtatcacaatttacataaaccgacaatctccatttcaaaattcttgttcaaaataaatcgtaatttcattgattaccctgtgctatgttttttccctattttataaaaatacattttagtcgaatcatccttgtatattatgcaaaaccgtttgtatactacgcgtatattatatgtatattacttgtaacttatctccttctctcatgtataaaccgcttactttactgcattttcatgcatctagcaaaacacaaaaaccctacacttttgcgttttcctgcaatgtgtagggttctcaatttttgaataattatttatttgttgctaatttattagcacacgccctgggcaatcatagcatccacaaccttctcaaatcccgcaatatttgcaccagcaacataatctgtctgtccgccgactgttgcattgtatctcttagcggcatcagaaatgttagcatagattgtctccatgattcctttgagttttccatcaacttcttcgaatgtccagtgaagtctctcagagttctggctcatctctaatgcagatgtagcaacaccaccggcattggcagctttaccacctacgaataatacgccgttctcctgtaagtattttgttgcctctaatgtagtaggcatgttagcgccctctgttacagatgtaacaccatttgcaactaacatcttagcatcctcaatgtctaactcattctgagttgcacatggaagggctaaatctactttgtactgccatacaccgtgctcaccattctgttttgcatgatattctgcagatggttttgcagcagcgtactctgttaaacgtgcacgttttacttcttttacttcttttaataatgcaacatcgattccttccggatcataaatccatcctgtagaatcagaacatgttacaacttttacacctaactgctgtgctttctcaattgcgtagatcgcaacgttaccggaaccggaaactgcagcagtcttgccttcaaggctcatgccgtgatctttccacaatgcatttgtcaggtataataaaccatatcctgtagcctgtgtacgggcaagagatccaccgtatgtaagtcctttaccggtaagaacaccttcgaaagaaccacggattctcttgaactggccaaacataaatccgatctctcttgcaccggttccgatatcacctgctggtacgtccacatctgctccgatgtatttagaaagttctgtcataaagctctggcagaatgccatgatctctctgtcagatttaccctttggatcaaagtcagaaccacctttaccaccaccgattggaagtgttgtaagggaattcttgaaaatctgttcaaatcctaagaatttgataattccaaggtttacagaaggatgaagtcttaatcctcccttgtatggtccaatggcattgttgaactgtacacgataacctctgtttacctgaacctgtccgttatcgtctacccaaggtacacggaacatgatctgacggtctggttctgtgattctctcaagaattgcattttttctgtacaattcctcatttgcatcaataacaggtcttaaagactctaatacctcttcaacagcctgtaaaaattcaggttctgaagcatttttttcttttacttttgcgagtacttcatcaacgtatcccattttttttctcctttaaaaatatatttacaaccatgtgaaatcagatatccggcattttttaaatgctccggcattgattccggctgcagatttctcatcaacacatacattttattataaaatgacggcggacgcaatatttttttctttattcctttaatttagtgaagttttctaatgatcagtctatttttttgcaggattcgacttcaaattattcattttgcataaaaaaaatcaatgaattttactttttatattttcaggttataattattatcatttcaacttatatcaaaacaggtcatcgcataaaaaaatagtttttcgatgcaatgacctctgttctttattctttttcacccttgtatacaaggtgaaaataatcggcaagtttcgccagcgcataaatcaggatcggcgtctcctgctcggtaagctggcttttgatctgtgcgatcatctcgtgatgaaactcttcatgatgtttgtaagcagctttcccggtgtctgtcagataaacccataccacacgtttatcctgcgtactgcgctcacggataacatacccttttctggtcagtccatccattgcctttgtcaacgttccggttgtgacacccatcagttttgccaccgttgtcatcgtttttggttcattgactccgattgcctcgatcacgtggaaatcattgtaactgagatctttgaattcttctgtcacaagacattttccctcgatctccatgatgtctttaaacaatctgaccaataattcgtttaatgtttcatctgttgtcatccgatctactcctatttctgcggtcagcgcctgattttaccagtttatcaccgttgctccccaggtgaggcctgctccaaatcctgccaacacgattttcattcctttcctcatcataccatgattattgacattatcaagcaaaatcggcacactcgctgcagaaatattcccacattcctccagattggtcggaaatttttccataggctgaccaagtcttttcgaaactgcttcaatgatcctgtaatttgcctgatgcaacaggaataaatcaacctcttccagttgtaagcctgcctgttccactgcgtctgtgaccgcctttggcacagtcttcactgcaaacctgtacacctcctgcccattcatggaaacataggaaagtgccgtgtcactttttttataagggttgttcacttttctcgccatgcagtttaagacatcgcctctgaaaccatccgagccctgcaccatggataaaatgccatcttctttacttgctgaaagaactgctgcccctgcgccgtccccaaaaagcacgcaggtgctccggtccgtccagtccatcatttttgacagcgtttccgctccaatcacaagcgcatgctgatatccgccatgttccaaatacagtgccgcagtatccagtgcaaaaagaaaaccggaacacgctgcattgatgtcgaacgcaactgcattttctgcaccgatatttttctgcacctcgcaggcaagtcccggaagatgtttatctgcagaaacagttgccgcaatgatgatatccacatcttccgctgaaatatctgcatttttcaacgccttgccggctgcctctgtggacataccggtggttgtctcctctaccgcaatatgtctggcaataatcccggttctcgaccggatccattcgtccgatgtttccatgatctgaccaagatcatcatttgtcacgcgaagcttcggaaggcagcttcccgttcctgttatttttaccttcataatattcctctcttctctgtccggtcacaaaacgattcgtactctctgtgcacatagcctctgtgattttgctaaaatttccggaatctcgcatagcgctcggacgcaaactgttctcctgtcctgccattttgtttctcaagaaacttttttatatttcctttcagatagcgcgagattgattcacaggcttttgcgtctgccacaccatattccgggatgatctgttcaatgacacccagcgattttaaatccaatgccgtgattttcataatctcacttgcctcttttgcacgttttccgtctttccacaaaatggatgcaaatccttccggcgaaagcacacaataggttgcattttccatcatccatacttcatttccgactgctaaggcaagtgctccgccgcttccgccttccccgatcatgatgcagagaaccggcacttttaatgcagacatctcataaagattccgggcgatcgcttccccctgcccacgctcctctgcctccattccgcagtatgctcccgctgtgtttacaaatgtgatcaccgcgcgtccgaatttttctgcctgtttcatcagacgtatcgctttccggtatccttccggcgacggcattccataattgtgtttcatgcagtccttaaaatcttttcctttctggattccgatcacggtcacaggctggccgtcgagatatgcgactccacctacgattgccggatcatcccgaaagtatctgtcaccatggaactccataaattcatcaaaaatattttccatataatcagtggcagaaggtctgtctactttccttgcggcttttaccttttcccacggcgtcagtccttttgcccttgccgcgcgctcccgcattaactctgtcggctcgtagttatcatccatgcgcaatggatcaaaatcagcaaaaccttccctgatgtgatgcatttttaaaatacggtttaaggttattttcagatttttccgctcaacaatggcatccacaaatccatgctctaactgaaattccgcacgttgaaatccctccggaagtttttgtccgatggtctgctcgatcacgcgggggcctgcaaaaccgatcaatgcgcccggctctgccaggataatatctccaagcattgcaaaacttgcggtcacacctcctgtcgtcggatctgtcaataccggcacatacaaaagccctgcatcagaatgcctttttaaagctgcggacgtctttgccatctgcatcagggaaataataccttcctgcattctcgccccaccggagcagcagaacaaaataaccggaagctttaaatctgtcgcccgttccacaccgagcgcaattttttctccgaccacatgtcccatgctgctcatcaggaatctggcatcacagattcccagaaccgtctcttccccatatattttgcatcgtccaatggtcactgcctcatgcagtccggtcttttccctggccgtctccaccttctgggtatattccggaaaatccagtggattttctgattccagatattcaaaccatggttcaaaggttcctgcatctgccaccatgcggatcctgtttttagtccgcacgcggaaatagcttccgcactcatagcagacatacttattcttttccacttccgccttgttcacttctctcttacatgcggggcagaccactgtacttcccggtattttctgctgatccgctgcaggtggtggtgtcataacttccgcctgcacttcctctttgtggtaagttactgcattttttcgttcaggttttatggatatcagctttcttcttctcaaaattgctggcataatatttcctttctgttacagcttctatgtaatgcctttctattctgttactcaactgcaaaggtgagttctgcaatgcatgcaatttcatctccgacttttgccgtcgcttttcccaccccgatcggtcctttcacttttataatttccgtctccagcgtgagaatatcgccgggaactacttttcttttaaattttgcagaattgatggacgcaaaataagctgtttttccacggttttcatcttttccaaggattgcgaccgcaccggtctgcgccagtgcctccacgatcagcacccccggcatcaccggttcttccggaaaatgtcctgcaaaaaaaggttcattgaaactgacgcatttcttcgccactgcacggacaccatactcaatttcttctaccgaatcaatgagcagcattggctgtctgtgtggcaggatttccatgatctgactaatgtttaatactgacatcgctgcctccttatctgcagccattgatatctttgtccgatacaatggtatatttttttaatagaatacttgcattatggccgccaaatccaagggaattgctcagtgcatactgcacctccatcgaaaccggttctttgcaataatcgagatccagttcctcatccggcactttatagccaactgtggcatgaatgtagtcttcctcaatctctttcacacaagtgataaactcgatcgctccggcagctcccagcatatgtccgaccatggattttgtggaattgaccttcatttcaccggcatgcgcaccaaatgcaagtttgatcgcgcgcgtctcaaagagatcgttatggtgcgtggatgttccatgtgcattgatgtaaccgacctcatccactgtgatccctgcatcccaaacggcatttaacatagctcttgctgcgccgctgccatcttctgccggagatgtgatatgatacgcatccgaagaacagccataaccgacaacctctgcatatatctttgcgccacgtcgttttgcatgctctaattcctctaacacgaccaccgctgcgccctctcccatgacaaagccgctgcgttctttatcaaacggaatggaacatctttccggatcggtttctgctgtgagtgcggtgagtgacgtaaaaccagcgattgcagtcggacagatacttccctcggttcccccggaaaccataatgtctgcctcaccatactgaatggcacggaaagcctcaccgatcgtattcgttcctgtggcacaggcggtcacaacattgatactttttccttttaatccaaaatgaatggaaacatttcctgctgccatattagagatcatcatgggaacgaataaaggtcccactctccccggtcctttttctatcagccttgtatgttcgcgctcgatcgcctgaaggcttcccacgccgcttccaatggcacagcctgccatatacggatcttcctgatccatttcaagcccggcatcctcaattgcctccttcgctgccgccacggcatactggctgaatagttccatgcgccttgcttcttttgcatccatataattttttgcatcaaactcttttacttctgctgcaagcttacatttataattagtggtgtcgaattttgtaatttcagaaaacccggttttctgtgcttttacattctgccagaattcatccacactcagtccgatcggtgtgactgctcccattcccgttaccactacgcgtctttttgccatattgttctcctcatgatatatattctttacatgtgcatgccgccgtccacggagatcacctgtccggtgatataatctgccagatccgatgctaaaaatgcagccacaccggccacatctgacacctgccctgtccgctgaagcggaatctgtttttttaccgcttccctggcagcctccggcatagcttctgtcatctctgtctcgataaatccgggagccactgcattgcatgtgatccctctcgacgcaagctcccttgccacacttttggtaagaccgatcactccggctttgcttgcactgtaatttgcctgtcctgcattccccatgacgccggaaacagaagaaatattaatgatcttaccggatttctgtttcaggaaataacgcgaagcatggcggattgtatgaaatgcacctttcagattcgtatcaagtaccctgtcaaaatcttcctcactcattttcatgatcagtccatctcttgtgacccctgcattattgaccagaatatcgaggtgtccatagttgtttatgatcatttccatcatttttccgcaggcatcaaaatcagaaacatcacattgtacaggcgctgccattccaccctgttttatgatttcttttacagtctgttctgctgcgtccggcgaactgttataattgacaataacaaacgctccacatgatgccagtgtctttgcaatctcttttccgattccgcggccggctcccgtgacaagtgccactttatttttcaaagaatctgttaacatgctcccgcctccacatgacttccgataaactgaataaaatcttccattttatcaatgctgctcacttttacatcccggtttacttttttcacaaatccactcaatgttcttcccggtccgatctctacaaattcatccgcaccatctgcaagcagccgttctatggtctgctgccagcgcacagaagaagatacctgactggcaagcaatggtttcacttcctctttttttgtgacatagtctgccgttacatttgcaatataaggaacaaatgaatcactgatctctactttttttaattcttcttttaacttttctcctgcaccctgcaacattttcgaatgaaacgggccgctgactttcaatggaacaacacgttttgccccggacgccttacatgtttctcctgccagatgcactgcttcctcctgaccggaaatgacgatctgtccagggcagttgtaattggctatggaaacctcgctccctgtctgctctgctgtctctctgcagatctgctcaattgccgctgcatccagtcctagcactgctgccattgctccaccggccgggacagcttcctgcataaaaatgcctcttttccgcacaagttcaaatgcttcctcagcagtcatgactccggatgcgatcaacgcaccatactcaccaagactcaatccggctgtgacatccggctgataaccgttctgttccaatgccatataaattgcagcttccgtagccagcatacagatctgcgtgtactctgtgatatttaatttttcgttctcctcaaaacacagtgccgggatatccaatccagtcacctctgatgcaagatcgtacacttctttacaaataggaatctgttcgtaaaattcttttcccatgccaatatattgcgatccctgtcccggaaacataaatactgtctttcccatcctgataaccacacctttctcaaatcttcaaatctgcgcctggcaggtcattttcttcctgcaagcagcgctctggcacctgtaacaacttcctctatgatctcctgacaggtctgctcttttttcacaagcccggcgctctgtcctgccatcagacttccatgaactgcatccccttcgatcaccgctttgcgcagagagccgagtgtcaactgctctaactcctcaaaagaggcaccttccttttctaatttcagataatctcttgtcatctggtttcgcagtacccggatcggatgcccggtactcatacctgtcacttcggaatcgatgtcttttgctttgataatgcgttccttataattctggtgtacgatcgattcttttgcgaccacaaaccttgttcccatctgcacaccttccgctcccagcatcatctctgccgtccgcaatgcctccggcggcaatgaccgggatggtcactgcatccacaacctgcggtaccagcgtcatcgtggtctgtgaaccaatgtgtccgccggactccatcccctctgcgaccacggcatctgcccctgcgcgttccatcatttttgccatcgcaacacttgctacaaccggaattacggtgacgcctgcctgtttccacatctccatgaattttcccggatttccggctcctgtcgtcacaatttttacgccctcttccacgaccacttttgcgacttccggagcatttggattcaaaagcatcacgttgactccaaatggtttatccgtcagttcttttgtttttctgatctgttctctgactacttccggcggagcactggctgcaccgatcagtccgattcctcctgcctctgaaactgccgctgcaagatgatactctgcaacccatgccattccgccctggatcacaggatactgacagccaagcaaatccgtaattctcgttttcattgtttcctgcctctctttgaatatttgtaaatggtcttaagcttccacacctttttctttgagataacccataatatcgttgactgttacaatattctcaagatcctctgatgggatctcgattccgaactcctcttccagagccatcaccatttcaaataaatctaaggaatctgcgcccagatcgtctttgaattttgtttccggcttgatctctgcctcatttacatttaactgttctgcaataatcggtttcatcttttctaacattttgcttttcctcattctttcctggctttcgcctgttgtttttcatattagtttgtttgactttctaattatttgattgtcaaactatttgataggcaaagtatatgcgtttctgttttatttgtcaagaggatttttctgaatcactttcttacgcagcaaaacagcaagtgttttactgctgcgtgaacagtaacatttttcttttctatatacagaacgaccgatctgtgctatattaaaagtgcttcaatgagtcatgaatgattgcattttatatgcaaaaattggaaatgaaagtgaggtaggatttatggatattacaggtttagacgcagcattaagtacggtttctgcatatgacatcggttcttccacaagccctgttacattacaggaagatatcggagttgcaatgctcggaaaatctttagatatgacacagacattaggtgccggcatggttcagatgatggagaattccgtcacaccatatcttggaagtaatatcgatctttatatctgaaaagaaagtcgcagattttgttctgcggcttttgctttgcccacaaattgttggaatctttgtgatttcaagagcttttatgaaaatttcaggttgactttcccgctgcatcttgctatattgatactcgttaaggcatcatagaccttaacagtatttataacagaatcaaaaacgctaggggcgcaaaaaatgctgcatttgccagacattccaacgctgagagatgatttttcatcaacccttattacttgaaccggataataccggcgtaaggaagcttttatgatatttctcatcagacgatagaatatagagttttttcctcctggcgcaaaagatctgaaacgcaaggaggattttattttatgaaagaattttttactaccacgatcggagcctgggatgatggctctgtacgtcttactgcacctggaatcgcagttgtagtagtcattatcgcacttctcgttgttgtcgcagcagtgatccgccacagaaatgcagagaaaaaaacaattctcaccacaaaacagcttgtctactctgccgttgcgattgcgcttgcagtagtatgctccatgattaagtttgcgaatctgccaatgggcggttccgttactttattcagcatgttgtttatcgcactgatcggttactggtacggtccttatgttggtcttatgactgccgttgcctacggtcttgttcagtttgttatggagccaattttctataccgttccacagatgattttagactaccctctggcatttggtgctttagggctcgccggattttttgcaaacaaaaaacacggacttcagattggttatatcgttgccgtgtttggacgttatgtatttgcagtgatctccggtgtcgtattcttcggtgcatatgccccggaaggaacacctgccattgtgtactctttaacttacaatgcaacttatatcgtgccggaagcgatcgctactttgatcgtgatcagtctgccacctgttgcaaaggctttggctcaggtcaagaaaaacgcgctgtctgcataaccggagtttaatttgcgtagtgttgcagattctgcggtgctttcttagggcttgaatggcagatataagcgtcctctcgcaagtcgtggttttataggtttatgaaaagaaaaacggtataaacgaaatattatgtttctgttcgctggacattccgataagactctgaagagtcttatctccatagctcacaaagaaaataatatttgtttataccgttttgctttcattcacgttatggatgacttgtgagaggacgcttatatttgcccaatttacactgtgaattgcaccacagaatctgcaatttacgttatggaactcgcggggtatgggatgagtgtctataaaagagataggataagctgctttgacttcatgaatattgtttctacaataatcacaatcacataaatcttcacttcttatttgattgtaatatgatttggttttctcaatatccaaagtgttcacctcctcaaataaaaatttatcgtattctatataacgattgctattcaaattaactctccactaaattttcatttatatattcaaaatatggtttcttatttacctctgttctatgttccaaataccatttaacactatctctcaatccgtcttctaatgatatggtttctggatatattttgctttgacgtgatacatccaaatagtactcatagttgtaaaaactaaaataatttctctgttcaatctcttcataaacattcacaaaatttggtatttttcctaagctttcatagcattttgttacccaatctttaatagaaactgcttcaacgttaccaacatttaaaatatgctcttccggcttttctttaattattacctccatcaacctgcataaatctttcacatgaaaaaattgtaatttcataccgccatcttgaggtaaatagaattttctgtccgccaaggcgcaatcaaatacaaaagcctctctgtacacattattcattggtccatataaataaggcggtcttaatatatatgcatctttcactctttcaagcaatgccttttcagctgctattttatcagttccatatgcaccccaaaacttattttcggatttctctgattcttccagaaatggctgaacaccatactctggataaacagcactcgaactaatcataatatactgatcaaaagaacctaattccttaacaaaatcaattatatctttatcgttataagccgttatatcagctacaacatcaaagaatgtatccttcaatacaccacccaaattatgcctatcgccttgaataagttttactccctgaacttgtggtttagaatttctgttaagtacaaatacttcataaccagcattcacaaaatattctgccacatatttacttacaaaagttgttccacctgtcactaatatccttttcataaatttctcctttacagtcgagtagacttacacctcacaatgtaagcccctcacagaaccgtacgtgcggctttcccgcatacggctcttcataataatatttacagtctcaaaacaagctgacataaatctttggcattgccaatggataatatttcagcatttcaatgaatccttctcttgtataactctttctgtcacttcgtctattcagcaccttaaacagaagttctctcacttgttgtttgtagtttgaaatcattctgccattaaaacttatgccatagtacctataatgacctattagtttcagatttagcatacccattagtttctttagcggttggtctctattcgcatataaccataccttgatgtctcgaattttctgtctgaatttcttagagcttgtctttggcattatatatggcatgcctttgcgtgaacgcccacaatagaatgtgaatcccagaaaatcaaatgtttgtaatctgatacactcaccgctcttttgctttgcccttgcaatataagcaccgctttgtaagagacgacttttactatcttctaattgcaaaccgaacttttccattcgttctttaagaagcttgtagtaattctctgcttcccatttgtattgaaatcctgcaacaaaatcatctgcatatacaattagaaagttatctcccttgcattctttggtaataataaacttataccatagtgtcaatacattgtgcatatatatgtttgctaggattggacttatgatattgccttgagctgaaccttcttcattcaccataagttcaccattatccagcactcccactttaagatacttcttgacaagaccaattatgttggggtctttaatataaagtttgagaaacttgataatccattcatgcttcatatggtcgaagaatcctttgatgtcagcatccacaatatagcagattttcgtgttgtttaatctcttatacagttcttttattgcgttatgacatcctcgatttggtctgaatccgtacatgcagttcagaaatctcggttcatagatagcttccagtatcttctttaatgctaattggactattttgtcctcatagcacgcaattcctaatggtcgaagttttccattgcttttagggatatataccctaattgatggctgtggtttgtatgattttcttttcagtctttctaccaagtcatctatgttttgctccagatttctctcgtactctttcttagtaatctcatcaacaccgactgctttgtttccgtctaattctttgtgacattgcaaaagcatttctttattgattagatgatacaacgatgtgaactctggtctcggcgaatttgccgatatttctgctattctttctaatttcgtttccatcaatacctccgtccctgagtacggttgatgtgtcctcagaaagaccattattatgtagctccctttcctccgttggcattacccaacttcttcagtactatgaagctatccgactgcctactgttcttttgacattctcctattttgcagttgtttgccatacttgcaatggcaagaaacaataggctctccccagttgactgaataatcacaatgtaaaacataaagtgctctttgaccccgcagaagcaaaccatttctcaccaatgcgaattgatttgtattgctttccgtcgaaattagaacgtcagccttctaaatgtcaaaatttcgaggctcaatc

SEQ ID NO: 660 - DNA, 14097 bp, unidentified
  source 1..14097: mol_type = unassigned DNA
atgaaagaagactggaaacccggaaccatgatttatccgctgcccgccgtactggtgagctgcggaagcactccggaggaatataacattctgactatcgcatggacggggacgatttgcacgaacccgcccatgtgttatatctccgtacgccccgaacgccactcctacgacatcatcaagcggaatatggaattcgtcatcaacctcaccacgaaagatatggcacgggccacggactggtgtggcgtacgctccggaaaggactacaacaaattcgaggaaatgcatctgacaccggggaaaagcaccgtagtcagcgcgcctcttatcgaggaatcaccgctttgcatagaatgccgggtaaaggagattatggctctcggttcgcacgacatgtttatagcggatgtggtaaatgtacgtgccgatacccgtaatctgaaccctgaaaccggcaaactggaactggcggaaacgaatcccttggtctatgtgcacggtggatattatgagctgggagaaaagataggcaaattcggatggtcagtagagaaaaagaagtaataatgcgataaaggttttaagagatggagttgcgacgaatcttgatgggcttatatctgttggccttccccgccatgatgtggggacagactccggttgtgcccggtactgccgacgaagagcattccggacaccgcaaggaaactccggtcaatttcggtttcaaaggcggtttcacctcttccttgttccttgtatcccagttcagtgtcaacggagtacccattgacgaagtgcagaacaattacaagataggatatttcggttcccttttcatgcggataaacttcgaccgccacttcctgcaaccggaaatatcctacaacatcaaccggtgcaacatcaccttcgagaaacctctgcccgaagacgccgcatcaggagcccggctggaggaagcctccattacatcgtccatccacagtatagacatccccgtcatctacggatacaacttcatcaaggaggggccgtacagccttgccgtctttggaggacccaaagtgcgctatatatgggacaggaaaagtgacatcgacttcgagaatttcgaccaggtgaatatccgtgaaaggctgcgtccgctcaatctcagtttcaccgtcggcgtatccgtcaccatctcacgcgtctttttcgacttccgttacgacatggggctgcacaacatctccaagagcgtgacatacgatattccggccgacaacaacgctgctgacgaaaacacgaaaaacgaaatccgttttcaccgcagggacaatgtgctgagtttttctttcggagtgttcttttgacagtaaatttcttccttttctttcaatttattcatttatttcccgtaaatttgtgcgcttaataagagaacacagatttatcaaacttatctaataagcagaatgaaaagagatgatttaattttcgaacttatcgaaaaagaacaccaacgtcagctcaaaggcattgaactgattgcatcagagaactttgtaagtgaccaggttatgcaggcaatgggctcctgcctcaccaacaagtatgctgaaggataccccggcaagcgttactatggtggttgtgaggtagtggaccagagtgagcagattgccatcgaccgcttgaaacagattttcggcgcagaatgggccaacgtacagccgcactccggtgcacaagccaatgcagccgtattcctcgccgtgctcaatccgggcgacaaattcatgggactgaaccttgcacacggcggtcacctctcccatggctcactggtcaacacttccggtattatctatactccctgcgaatacaatctgaaccaggaaaccggacgtgtggactatgaccagatggaagaagttgccctgcgcgagaaacccaaaatgattatcggcggcggttctgcttattcccgcgaatgggactacaagcgcatgcgcgaaatcgcggacaagataggtgccatcctaatgattgacatggctcatcctgccggactgattgcagccggtgaactggataaccccgtgaaatatgcccacatcgtgacctccactacccacaagactctgcgtggtcctcgcggtggcgttatcatgatgggtaaggacttccccaatccctggggcaagaaaactccgaagggagaaatcaagatgatgtcccagttgctggattcagccgtattccccggtatccaaggtggtccgctggaacatgtcatcgcagccaaagccgttgccttcggcgaaatcctgcaaccggaatggaaagaatatgccaagcaggtgaagaaaaacgccgctgtcttggcacaagccttgatagaccgtggcttcaccatcgtttccggcggtacggacaaccactccatgctggtagacctgcgcagcaaatatcccgatttgaccggtaaggttgccgagaaggcgttggtatctgccgacatcaccgtaaacaagaacatggttccgtttgacagccgctcggctttccagacttccggcatccgtctgggtactcctgccatcacaacccgtggtgccaaggaagacctgatgctcgaaattgccgagatgattgaaaccgttctgtccaacgtagacaacgaacaagtcatcgcagaggtacgtgcacacgtcaatgcgaagatgaaagaatacccgctgtttgcttattaataagcaaacagaattaaaaattaagaattaaaaattaaaggctgcgcaatgttcgctttgaactgcgcagcctttaatttttaattcttaatttttaattctaaacgcgctccgcgcgtttagctcagcccttctatatttccgtccacaatatcaatgtgttcggcttgtggtttcttgggtaatcccggcatacggagaatttcaccggcgatggctacaatcatttccgcaccgttattgaccacaatatccttgatgtggaactcaaagttgttgactgcaccgtatatcttcgggtcggcagagaaggagtactgcgtcttggcgatacagacggggtaatggctgatacccatctgctctatcagtttgataaccttgcgggagtggagactgtaagtcactacgcttgccccgtagaggttgcaggctaccttttctattttacgttccacgcaatcgctctcttcgtaggtgaaggtcagcggttcggatggtttgttctcgatagtatctactaccagattggcaaggtcaacggctccctctcctcctttggcaaaggcgttgttcacggcaaaacctacctcgagcttttcttcgcaatggcggcggatagcttccacctcctcgtccgtatcactggcaaaacggttgaatgccacgatgacctgctggccgaatgaacgcaaattgcgtacatgcttgtccagattgccgaagccctctttcaatccttccatattgggttccttgatgcggtccagactgacgccgccatgcatcttcaatccttgtgcggtagcaacgattatcgtcaacttgggctgtaggccgctcttgcggcacttgatgttgtaaaacttctccgcacccaggtcagccccgaaaccggcttccgtcactacataatcgccaaatgtcatggccatttttgtggcaagaatggagttgcaaccatgggcaatatttgcgaacggtcctccatgaacaaaagcagcagagccttcggtagtctgtaccaggttggggttgatagcatctttcaacagtacggtaatggcaccggctactcctaactccttcactgtgaaaggagtaccatcgaaacggaatcccagaataatattttcgatacggcgacggaggtcatcgaggtccgttgccagacagagaatagccataatttcggaagccggggtaatatcgaagcccgactcctcggtaatgccgttggtgctcggtcccaatccggtgacaatgctccgcaaggaacggtcattcacatcaagtacgcgccgccagatgatttctttcagtccgaagccgtccgcctgatgctggtacaagtaattgtcgagcaaagcggaaatcatgttgtgtgcggaggtaatggcgtgaaagtcgcccgtaaagtgcagatttatcttctccatgggaagcacctgggcatatcctccgccggcagcaccgcctttcatgccgaagcaaggacctaacgagggttcgcgtaaagccacaatcgctttcttgccaatcttgttcagccccaatgccagcccgatggacacggttgttttaccgatacccgctttcgtagccgtgatagccgtcaccagtatcagattgctcttcttcactttctcttcatcaatcagatgcgtaggaatcttggctatgtaacggccatagttctctacttcgtcacgcgggatatccacactttcagccacctgctttatcttcttcagctctatgctgcgggctatttcaatgtccgatttcatacagagtcttttctttaaataacaactttaatgttttgaaagttgcaaaagtacgaaagatgtggcaaagtacaaaagaataccgtattttcacctgaccacctgcatcttctatctatttgaaccgcgacgtatccactgcctcccgttgcttctccttatatccaccgaatttataagtaaacgatacgccgaattcgcggaagcatgagtaatgattcgtcacattctgcgtcttgaaacggatgcggggagaaatctgtcccgtctcaaaaatatcgttgcagtagaggttgaggatggctttgttcttggcaaagccgtagcgcagggcaatattcacattgcccgacgtaggcaggtcgtagatgccctgaatggctttactatgcacaaatccggtcaccgtcagcttcaagtcgggtttggtggagagagtaaaagtattgttcatctgggcaatgccatagcattgctttctgtcgaaaggaatatcccagaaatcaccatccttttcgcgatgccacaagccgatgagggtaaggcgagaattcaaccaatccttcaccttaaatgggatagaggcttgtattcctgcttgttgctgataatcaaaattgagtgtcttgtagatttcaaccagacgttcggaagattggtagagcgtctgtacagagtagtccttggtatggttgaaccaggcgctgaagatgtatttgctcttcaaaatataggtcattttcagctcatactcttgtgccggtttcagcaacggattaccatgcagctcagagtatccgccaccgatgtaagagacggcatcctgcaccgcccagtagtcgggatagtccttgtcgctgctcagagagagctgaaggatatgtcccggtgacggcatatagttcaagttgacgatgggataccagtcccactggttccagacgggagtcttgtaatgctccacagccagggaagcgtccaaagcgagtttgtcgccgaaactcttgctgaaacctgcatagatattccaggtctgctcgcggcggcgggacttcatattgctcaaggcatccgatgaggtcagttgtccgccggtttcggggtcataataatattggtagctgttgtcgatgctggtagtatagatggctccgtaattcaaatcccaaccttttcccagactgtgctcctgggccagaaagaatttccagcggttgatgcgctgacagtcttccgtgtagaaatcgagttcctcatcctgcatacggctatgcagtagttggttggacggagagcggtagtaggtcagttcggcaccggctttgaggccgaaaggggtacgatagtccagacggccgttgtgcagccagtcggtgctattgctatgagttgtggacacctgcgtgcccgtcacgcccttccagttgtgggaggtggaatagccaccgttatagacgaaactcagctgatggttcttggcgatattatagtccgcccctaccctgaaattatgggtatggctgcggccacggcccacctcatctgtagtcatggggtgaaccgagccgtccgccagggtgtgcacagcctctttgtcggtagtagagtagctccggccatggctgtgcgagtaaagaaaatctgctgagaatttatttttgctgaagagcaggctggcgcgttcctcaaagccttcgttatgcttctggcgatacttggcatagagttcgccttgccaggagccggggccgcctaccgattgtttcaaggtgatattgataagtgcgccacgcacctggtagcgtgcaggggcgttgtacatcacttccgccttctctatgcggctggcagggatgctgcgcagcaaagaatagagctgctctgtgctgagggtggttactttgccgtccaggataacggtgactccctgacctgccaactgcagccctccattcatctcgatgacgccgggaagctctttcacggcatcgtaggcattgtctacggggaggttccggataaggcggggcaggtcgtacaccagcttgccttgcgctgccttaacgatggggcgttcaccggtaatcatcacttccggcaaggtctgataaagactgtccagacgggcatcggtcgtgataaggctgtcggcgctgaggatgcggttgtcgtccgcaccggaggtggttgcagtgccgttgttctcttgtgccgaaagactgatgctcaaagcacagcatacaatagggagtaaatagaatcgtttcatgttcttctttttatttatgtttatattcttcttcttctgcaaatcttcgtctgcaaagtacggcagaatcagcagaaacttgtgttatcagcggcttaccaagtgttatccagtgttatcgggagtgttatttagtcttatcggatgatagggttcacaatattaatcttacctttgtatgtataaaagtaaccggaaacaaacatgaaactgccattcaaatatattgccatacttgtcatcgtctccctggccggtatcttcgcctaccaagcctactggctgacggggctctaccataccatgcacagtgaaatggaaagggacatcaccgaagccatgcgcatgagcgactataacgaaatgatgatacgcgtggataaaatgaagcaggacgacataaaccacggtgaagtcagcgtatcagccggatacagcgatgacggaaaatcatttgtccgtagcagtaccaccatctcccgtgaagattctttggacaacaccaccctgcacgaaaccttcatgcccaaaggagacagtgtttacgtgacccacccgaacgattcaacccgcgtggaagtcagtgtcaaggactcggacagctctccccaatccgcattgagtgccaaagggggactggatgtgattttgcgcgaccaaaacagtatgctggaactcgccacctacttccagcgcggactgcattcgggactggacatcatttccgaccccgacgtagtgctttatgacagcctgctgacttcattcctgcatgaccgtaacatcaatcttccccataggctgctacatcttcacaaaggcagtaaatgggactctaccattctctatatagatacattggtaaacatcggtactcccggctatgtgcctacctcaaaagctgtggaatataattattctttcgacatcaatacaagtcaaagctaccgtctcatcatggaaccggtcggcatgctggttctgcggcagatgtcgggcattctcaccacgtcattcatcatcttgattgtactcgctttctccttctggttcttgatacgcaccatcttgaaacagaagacactggaagagatgaagagcgatttcaccaacaacatcacccacgaactgaaaacccccatcgccgtagcatatgccgccaacgacgctctgctcaacttcaaccaagcggaggaaaaggcccaacgcgacaaatacctgcgtatctgccaggaacagcttcagcgcctcagtggactggttgaacagatactttccatgagtatggaacgccgcaggactttccgcctgcacccggaggagtttgcaatacgtgatattctggaaacgctcatcgaacaacacaagctgaaagcggaaagctccgtccacatatcggtggacatcgaaccggaagatttgagcgtacttgccgaccgtacgcatttcagcaacatcatcagcaacctgatagacaacgccatcaaatattcgcacggagaggccgaagtggccatccattgccgcaaggtaaccgtcgaagggcagaatgaacagactgaaatctccgtcagcgaccacggtatcggcattgctcccgagaagcagaagcacatcttcgacaaattctaccgcgtacccacgggtaatctgcacgatgtgaaaggctatgggctgggattgttctatgtgaagaccatgatagagaagcatggtggcagcgtatcggtaaagagtgagttgggaaaaggaagtacctttacgataaggatatgataacattatttgttagggtactttacattacttgttaaggagctttacattacttgtaacaaaagcgacaattatggaaaagataaccgtacttctggttgaggacgaacagaccctcgccatgattatcaaggacacattggaagggcagaacttcatcatccacaccgcagcagacggtgaagagggattgcgcaagttcttcgacctccgtcccgacgtgctggtggcagacgtgatgatgccccgcatggacggctttgaaatggtgcgccgcatccggcagaccgacaaacagaccccggtactgttccttaccgcccgctccgccatcaacgatgtggtggaagggtttgagctgggtgccaacgactacctgaaaaagcctttcggaatgcaggaactcattatccgcataaaggccctggtaggcaaagctttctcctttacagaggaaaagcccaaagaaactaccgtttttgaaatcggtgactaccgtttcaattccgtcactcaacgacttgcttttgcaggcagcaccccgacttcacctaacgcggatacggaagtggaactctcccaccgcgagtccgagatactgaaacgtctttgcgagaaccgtaaccaggtggtcaacacccagaacgtattgctcgacctctggggagacgacagcttcttcaactcccgcagcctgcatgtgttcatcaccaaactgcggcataaactggccggagacgagcgcatccgtatcgtcaatgtgcggggaataggatataaactaatagtgaactaaactaaaactaaactactatttatgagaaagttattattcattacttttatctgttcctcactctgcgcctatgcacagagcgagattccggaagacacaataaagaaccggcctcccgtaaagaaagagcagattcccttttctccaaaagagaacaagcgtacgggccttgatgaaagccagccccaacaaagtctgcagggcgaacagcaggaagagataaatctccatctccctccctccgactatgtggagcccctgccctggacggacatgaagaagatacactttcagaaaaacatctttgaatgggacttccagcgtttcgccgatttcctgctctcgccggaagtcgtactgacgatgtacggcagccataacacctatcctgcaatgggctccatcatgcaggctggcgcaggagtcacttattacagtcccgacggacattgggaattgagcggaggggtatatgccgcccattattccatctcccaaccttcatccattacaggtgcccagtatgccaaaagggatgccccccgaggtactcaatgggacataggctacaatgcctccgtatcctaccgcatcaatccctacatgcgcctgcatgccttcggccagtattcgggctacgggagaagcaactcctttcatggatatatgaacccgatgtatccgcaaagcggttatggcatggtactggaactgaaagtgacggactggctcgacctcaacggagggatggaacgaagatacgaccccaccaaaatgaaatgggtaaattcgcccatcttcgcccctaccattcgtataaagaaatagaaataatacaaagatatttccagaaatagagggaaacgagtatctttgttcagtctgcccctatgcggcagacagcaactgaaattgtgaacaaagaactatgaaacgaatcttcttctgcatcatcattttacttgcaggcatgtcatccgtcagcgcacagaacgggatgcctgccgatacggtacgtactgcagtacatggcgaagcgtctcccgaaggcatgtctccgtctgaaaaggagcttctgccggacgtgaagaattacgacggcttcctgctggatatggggctgatgaatctgtccacccccactcttcccaaattcactttggagataccggatgccagcaaagactatagccgcatcttccagttgaacccgaacgtgacttattcacaaggtctttcgaacatattctcactcagcaactcccggtatttcagttcgaatcccttcggactgacgggcttctggggctctactgacaacctgcaaatgggaagtttcactttgaagaacggcatgcgcatccatacgtacggtgaatatgacaaagacggctggaaagtgcccaacccttccgcactgccttgggaaaagaacaatttcaaaggggcgttcgagctgaaatcagccaacggagcctttggcatacgcatcgaggtacagcagggcagacacgtgccctattgatgcccatcacttaacaacagaatcaatgacaagaaagaaaatactggtgataggcgccaacggttttaccggcagacgcatcctggatgatttgtcccgcaacttgtcttaccagacaacgggctgttccctgcacgacgacatctgtccccattcgggcgactatcgctttatccgtacggatatatgcgaccgccaggcggtggaaaagcttttccatgaagtacagccggatgttgtaatcaatacctccgccctctccgtccccgattattgcgaaacgcaccatgcagaagcggatgccgtcaacattactgccgtggagcatctggcagaatgctgtgaggcgggaggcagccgttttatccatctttccaccgacttcgttttcggtggtgatacggaccgaccctatacggaggaggatattcccgctcccgttaattattacggctacaccaaactggaaggtgagaaacgtatcgccgccgtttgcagggattatgccatcgtgcgtgtagtggtagtgtacggtgccgccctgcccggacagcatggcaatgtgctccaactggtggcaaacagattaaggaacaatgaggaagtgttcgtcgtgtccgaccaatggcgtacgcccaccttcgtgggagacgtgtcgcaaggagtggagaagctgataagccatccgcaaaacggcatctaccacctctgtggcagcgagtgcctgaccattgcagacatcgcttatcgggtagcggacgtattggggctgaatcgctcgctcatccgtcccgtcactacgaaggagatgaatgaaaagacgccacgtccccgtttcagtgggctgagtatagaaaaggcacgccgggaactggggtatcagccgcgcacgctggaggaaggaataaagcagatgttcggatggtaaatgatgcagtcggatggtaaatgatgcaggttgaggatggcagcagattcgactacagcaactccggctctgccagtcctttctctttgcgatacacacgtaccatctccagaatcacatctccatatttctccgcccctttctttccgaaatacggaatgcgtacaagcatagccttatccgaaggaagcagattgctgatacccagaattgccttctgctgaatgacggtgtatacgggcaaccccaacgcggaagcttctgcattgcgccatgccaccaagcggttgtaaagttccggatgcaacacatccgtgggtacttcaacagccgcagcatcgcgtttccgctcacgcggacgtttctctttatcagcctgcttactgcttccctgcccttctttggcagcggcacttctccctttgcctttacccttctgcaaagccgaatcatcaatggaaagcagtgctttctgcttcaagtattctgccacatggaaaccattctccagcacataatccagcaaatcagtcttcaagtcaaacatttcctccagctcctccatggcatcccgaagcttcttcttcaactctttattatcagaagttaccgtactcgccatcaccgcatccagcggttgcaactgctcttgaaaataagtggcggcagagtgtatgcgcccctgcaaagtcgggtcggctgcatagtcctgcgcagtatcaatcaggcgggtatactggatactgaacttctgggctactttcgtcactttgtcgtgaaaacgttccatttcctccttacaggctgcgagttgcttgggaaagagcttgtacaagtgttcgtctatcagccgcacataccgccgcaaagcctgctccatgggctggaaatcgaacaagcccgacagcagttccaggaaataggtctgctgcaaggaacggaagcgtttctcgtccggctcgtttctccgtgcctccatcgtgaaggtatctactgcatggtcactgataacggcctttgcagaaagcggggcactgagcaccactccctccaatgtcttgcagcggctcagagccacataggtctgcccatgcgcaaaggaggcactggcatcaatcacggcacgttcaaacgtcagtccctggcttttgtgaatggtaatcgcccacgccagcttcagcggatattgccggaatgttccttcaatatcttctgtaatctccttggtttcctcatcaagcacgtatttggcattcgtccactcttcctcctgaagtaagaaggtagcgtcgcttcccttactgcgcacttcaattccatctgccgacacggctgtcacctctccaatcatgccattgtagtaacggtgctcaccggaggtgtcgttcttcacaaacattacctgggcaccgcgtttcagttccagtacttcatccgtgggataggaatattcgggaaactttccgtcaatcttggcacgaaaggcatacgagcgtcccggaagttgttccagctcatggtcattaatccgttgggcctgataattgtgggtcaccaggcggatgtatccttcttctttatctggtacgaaattgggaatataccggcggttcaaggcttccagcacttgcccgtcacaacggttttcgcgaatgcggttcagtaattcaagaaaagtcccatcgttctgccgatagactttctttagttctatggtgcaatattccgtctgcttcaaggcctggctggagaagaaataaggcgtgtcatagtatttgcgcagcatctgccactcatcgtctttcactacgggagacagctgctgtaagtcgccaatcatcagcagttgcacgccgccaaagggtttgttccggtcgcggaaccgcctcaagacggcatccaccgaatcgagcaagtcggcacggaccatactgatttcatcgatgaccaataaatctatgctgcgtataatgttaattttctctttcccgtaacgaaaacggtaggttgccttgccatctgcgctgaatgagctttcgggcacataaggagcgaaaggtacttggaaaaaggagtggatggtgacaccgcctgcattgatagcggcaattcccgtcggtgcaagtacaatcatccgtttcggactctctgccctcagttttcgcaggaaagttgtcttaccggtacctgccttgccggtcaaaaaaagatgagtgcctgtgttttcaatgaattgccatgcaagcgctatttcgggattattctccat

SEQ ID NO: 661 - DNA, 27953 bp, unidentified
  source 1..27953: mol_type = unassigned DNA
ggaattaattttgaattcctaattcttaattcttaatttcgcaccatgacagcgctatttcacgacattatcttcggcccggtgcattcgcggcggctgggcctttcgctgggagtcaacctgctcccgctctcctcgaaactctgctcgttcgactgcatctactgcgagtgcggctggaatgccgagcacccgggcggacgacgcttcaacagccgcgaggacgtgcgcacacagctcgaagccaccctgcggcgcatggtggccgactccacgccgcccgacgtgatcaccttcgccggcaacggcgaaccgaccatgcaccccgatttcgaagccgtcatcggcgacacgatcgccctgcgcgacgcgctgtgccccgcggcgaaggtctcggtgctctccaacgccacgcagatccaccgcgacagcgtccgccgcgccctgctgcgcgtggacaacaacatcctcaaactcgattcggcgttcgacgcgacggtgcggcggatgaacaacccgcaaagcgcgtcctacacggtgcggggcatcgtcgaagcgatgaaacgcttcgacgggcgcatgattctgcaaacgatgttcctgcgcggggagtgcggcggacagcccgtcgacaacaccaccgaagaggaagtctcggcctggctccggctcgtcgccgaaatccgcccgcggcaggtgatggtctactcgctcgaccgcgacaccccctgcccgacgctcgaaaaagtcaccaaagaggagttgcaggccatcgccgcgcgcgtcgaagcgctcggcatcccctgctccgtagcttaacgcccgaacgccatgcagctgctcctctcctgcgccaagacgatgacggagcgcagttccgtcccgacgccccgcacgacccggcccgcctaccgcagcgaggcctctgaactggccgccgggctggcgacgctcccgaccgacgaactggcccggctcctgcgcgtcaaccgtcgtatcgccgccgaaaaccgcctgcgctacggccgcttccacggcgacgacgacgcggcgatcccagcccttacggcctacacgggaatcgtcttcaaacgcatcgacccggcgagtttcaccgacgccgatttcgaatacgcccaacggcacctcaatatcacctcgttcctctacggactgctccgtccgctggatgccatccgcacctaccggctcgaaggcgacgccgtactgcccggccgcggcgacgaaacgatgttttcctactggcaaagccggctgaccgacgacctgctgggccggattcacgccgacgacggcattctggtcaacctggcgagcggagagatgaagcggctgttcgactggaaacgcgtctgccgcgaagcgcgggtcatcacgcccgaattccgcatccgcgagggcgaccggctgaaaaccgtcgtggtctatacgaaaatgtgccgcggagagatgacgcggcatatcctgaaaaaccgcatcgccgatcccgcgacgctccggtcgttcgaatgggaaggcttccgcctggacccggccctctcgaaaggcgacgactgggtgttcatgctctgacaaatgcctttacggcaaaggcggcgaaattccctgcccctgatccacgaacaacagtttcccggtgcggtagccccgcgcttcggccagccgcaggatgtggttgagcgtacggctcggcagacggggtgtgcgcgagagaatccagaggtatttcgacgaaccgccgcccaccagcgcccagtcgtaatcggggccgagttccagcacgttgtaatccgaatagaaaaaccagaaaaacgagacccgcaaacgccccggcatcgccgtggcgcgggctttgccgcgcgcccgtttgcgacggtccgaacgatagtcgacgccgctgttctcgacggtcacccgaccgtcggacagcaattcgtagtgcgcctgcacacccgccagccgccgttcgaacgaatgatcgtagcgggcgatctcataccatgttcccatataacgccgcaggtcgaacacggcgacaggcatgcggtcggtgcggtccgaagccgccgcgacagccaccgcacccagaatcaaaagggcggcagcaagcaataaaatgacgattttcatttcccggtcgttttgggaagccatcacacagaatttgtgccgaaaaaatgcgttgcggaaaatttacgcgcgggtatcgagcagggcgcgcagaatgccctcctcgtcgtagccgcacagggcgtacaactgcccgggcgtgccgtgttcgacccactcgtcgccgatgccgagccgctgcacccgcacgtcgtagccgcggccgttgaagaacgccgcgacggcttcgccgacgcctccgcgcagcgaaccgtcctcgaccgtgaccacacggcggaacttacgccccacttcgtccagcaacgcttcatccagcggtttcacgaaccgcaggtcgtaatgcgcgacgctcacgccttccgcggcagcgcgtccggccgcccgtgcggcggcgttgccgacggtccccacggtcaacagcgccacgtctgcgccctcgcgcaggcggcggccacgtccgacgggcagcgtctcgaacttctcgccgcgccacggcaggccctcgccgtgcccccgcggatagcggatcataaagggatgtcccgatccgagggccgtatacatcatgttgcgcagttcgggttcgttcatcggcgcggcgatcgtcagtcccggcacggcgccgaaagcggccatatcgaagaccccgtggtgcgtcaccccgtcctcgcccaccaggccgccccggtcgagacacatcaccaccggaagatcctgaatcgcaacgtcgtggatcacattgtcgtaggcccgttgcatgaaactcgaataaatgttgcagaagggaaccatgcctgccgcggccagtccggccgaaaaggtcacggcatgcccttcggcgatgcccacgtcgaaacagcggccgggcatctcgcgcagcagaatgttcatcgaacagcccgacggcatggcgggcgtgacgcccacgacgcgctcgtcgcggcgcgccagttccagcagggtttcgccgaacacgtcctgataacgcgctgcgccgcccggagccgaaatccgctcgcccgtgtcgggattgaaacgccccggggcgtgccaggcgggctggtcgtgctcggccggcaggtagcccttgcccttgaccgtcatcacgtgcagcagtttaggcccctcgatgtcgcgcaacgcccgaagcgtccgcaccaactccttgaggttgtgaccgtccaccggaccgaaatagcgaaaattgagactttcgaaaaaattgctcttgttcagcagcccctgcttcacggcgttgcccgccttctggcagagccgcagcagccgcggcgtatgcgacatcagcccccacagccgttgtttgaaacggttgtagtgcaccgaagtcgagattttcaacaggtagtttttcagcgctcccgtggcctggtcgatggccatgttgttgtcgttgagaatcaccagcaggttggtgcgcttcgaggccccggcgttgttcagcccctcgaacgcaagccctccggtcatcgagccgtcgccgatcacggccacgacctgccgcttctcgccccgcagttcggcggccttggccatgccgaacgccgcggagatcgacaccgaagcgtgcccgcccccgaaagaatcgtattcactctcggacatgcgcggaaaaccgctgatgccgttcagctgccgtttggttttaaacgcctcgcggcgtcccgtgatgatcttgtgggcgtaggtctgatggccgacgtcccagacgatccggtcctccggggtgtcgaagacgtaatgcagggccgcagccagttccacggccccgaggctcgatgccaggtggcccggattgaccgcacactcgtcgatgatgtaacgcctcagctcgtcgcagtaggcggacagctcctccggcgggagttttttcaactcccgcggtgaggaaatcgtatcgagcagtttatattcttccgacgacataaggattgcaaagatagaaaaaagaacggacgcctccaaaaccgaatcgcgcgcggccctgcaaaacgctccgaccggtaaaagtgtcgttacgacaccaaagataaggaatatatatgaattttttcgaaaaaatacctatcttcgcactacgataaaacgcgacccacgatgaaatacaagcgaatactcctgaaattgagcggcgaatcgctgcaaggcggacagaaatacgggctttcccccgagatgctgcaatcctacgccgagcagatcaaagccgccgcagcaacgggcgtccagatcggcatcgtcatcggcggcggcaacatcttccgcggcctcacgggcgccaaaaagggcttcgaccgcgtgaagggcgaccagatgggcatgctcgccacgatcatcaactcgctggcgctccagtcggcgctcgaagacaacggcgtccgatgcaaggtgctcacctcgatccgcatggaacccatcggcgaatactactccaaagcccgtgccatcgaatacctcgaagcgggctacgtggtgatcgtcgggggcggcacgtcgaatccctacttcacgaccgactcggcgtcggcgctgcgcggcatcgagatcgaggccgacgtgatgctgaagggcacccgcgtggacggcgtctatacggccgacccggagaaggaccccgcggcgacgaaattcgacgaaatcacgttcgaggaggtcctcgaccgccgtctgaaggtcatggacctcacggccttcacgctctgccgcgagaacggcctccggatcatcgtcttcgacatggacaccgcgggcaacctcggcaaggtccttgccggagagaagatcggaacgctggtaaaactgtaagactatggcaaccaagaaaagcaacaaatcgctgtgggtgatgctggcgctgatcgccgcgatcatcgccgtcatcctgctgctgccctcgtgcggcaaccgcaacgccaagaagggcgccgagacggacgccgaatcgacaacgctcgtaaaggccggagacacggctccggacttcacggtcgagatggtcgacggcagctccgtgacgctcggcgacctgaagggcaaagtcgtgctgctcaacttctgggccacgtggtgtccgccctgccggcaggagttgacccgcgtgcagacggacatcatcgaccgcttcgccggcaaggagttcgtcttcctgcccgtatcgcgcggcgagaaacgcgaggccgtggaggcgttccgcgaaaagaccggctacgccttcccgatgggactcgaccccgcacgcaccgtctacgaccgctacgcctcgaactacatcccgcggaacttcgtgatcgaccgcaagggcaaggtcgtgctggccacggtgggctacgacgaacatgaattcgaggagctgatccgcaccatcgaaaaaacactcggaaattaaaccccaacacttatggataccaagacgattctcaacgaagctacgggccgcatgcagaaggccatcgaccacctcgaagaggaacttttgaacgttcgcgccggcaaggcgtcgcccaacgccctgaacggcgtgatggtcgactatttcggctcgcaggttcccgtttcgggcgctgccagcgtcaccgtacccgacgccaggaccatcctgatccagccgtgggacaagaacatgctgcgcccgatcgagaaagccatcatcgactcgaacatcggcctgacgccctcgaacaacggcgagcagatccgcctgacgattccgccccttacggaggagcgccgcaaagagctggtgaagcaggtgcgcgccgaagcggagaccgcccgcatcagcctgcgcaacgcccgccgcgacgcggtggaagccttcaagaaggcccagaaggagggcatgcccgaggacgaatcgaaggacggcgaaacacagtcgcagaaactgctcgaaaagttctccaagacgctggacgaagcgctttcgaagaaggagaaggagattatgaaggtctgacctgccggcttccgcaagacgaaaagcccggctggaaaatttattccagccgggctttttccattcgtttgtccggcaaaccccgcacgcacgggcgcggcaaccccgcatcgccccggcaaaaccgcatcgccccggcaaaaccgacagcggccgacaaaaccgacagcgaccgacaaaaccgacagcgaccggtgcagacggatcgcctccgatcgcaaacccgtccgcacacatccgccgcccatccgcctcccatccaccgtccattcaccgtcatccaccgtcatccaccgtcatccgccgcccatccgccggaccgtgcctgttccataacataaaaatcccggtctccaattgcggaaaccgggattcatctatttgcagcggctcatgccgcagagaattactttaccttcgggcctgcggttacaagcttcttgccctcctcgttgcccgtgaacttcacgaagttcttcacgaagcggttggccagatcctctgccttaacctcccaatccttggcgctcttgtaggtgtcgcgcggatcgaggatagcggggtctacgcccggcagggcggtcggaaccacgaaatcgaagataggcatggtcttggtcggagccttgtcgatcgaaccgtcgaggatcgcgtcgatgatgccgcgcgtgtccttgatcgagatacgcttgccggttccgttccagcccgtgttcacgaggtaggccttggcgcccgacttctgcatcttcttcaccagctcctcgccgtacttggtggggtgcagcgacaggaaggctgcgccgaagcaggccgagaaggtcggcgtaggctcggtgatgccgcgctccgtgcctgcgagcttggcggtgaagcccgagaggaagtagtacttcgtctgctcgggggtcaggatcgaaaccgggggcagcacgccgaatgcgtcggccgagaggaagatgaccttcttggcggccggagccttcgatacgggcttcacgatgttctcgatgtggaagatcgggtacgatacgcgggtgttctccgtaaccgacttgtcggcgtagtcgatcttgcccttcttgtccaccgtcacgttctccagcagcgcgttgcggcggatggcgttccagatgtcaggctcgttctcctgcgagaggttgatcaccttggcgtagcagccgccctcgaagttgaatacgccgtcgtcgtcccagccgtgctcgtcgtcgccgatgagctgacgcttcgggtcggtcgaaagcgtggtcttgccggttcccgacaggccgaagaagatagcggtctcgcccttctcgttggtgttggccgagcagtgcatcgaagccatgcccttcagcggaagcaggtagttcatgtaggagaacatgcccttcttcatctcgccgccgtaccaggtgttgatgatcacctgcatcttctcggtgaggttgaagacaacggccgtctccgagttcagacccagctccttgtagttcttcaccttggccttcgaagcgttgagcaccacgaagtcgggctcgccgtaattctccagctcctcgtccgtcggacgaatgaacatgttcttcacgaagtgagcctgccaggccacctccatgatgaagcggatcttcaggcgcgagttctcgttggcgccgcagaacgtgtccacaacgaagagtttcttgcccgaaagctcctcgacggcgattttcttcagctccttccaggccttcttcgtaaccggcttgttgtcgttcttatattcgtcggaagtccaccagatcgtgtccttggtggtctcgtccatcacgaaaaacttgtccttgggcgaacggccggtgtaaacgccggtcatcacgttcacggcgccggtctcggtcagctgacccttctcatagccgcgcaggccttttttcgtctcctcacggaacagttcgtcgtaggagggattgtacacgatctcggtcacgcccgtgatcccgtactttttcagatccattttgtccataattgcaatttatttgattaaaatcctcttttcaacctgacgtttcagtccgcaggtccggacttcaacggcacaaaggtagaaaaactttcataattgtgaaaaaaataacagccgaaattacaaaaaatatttattattttttccgatagtgctatacgcctcattgatagcgtcgtacaacgccgccgaaaagcccttcgcaaacccttgcgaggatcgcccggcaaaaattttgccgcaatttatccgcgccggacgggacgctccggttttcttccgccggtttttatcacctttgggggagcgcggattttccgcccggaaacagccctcccccggaacacgtttcccgccgacccgcaaccgccggccctccatgaaaacacggccggaaacgactccgacgctctgcccgctgccgccccgtgcgttccgggcgacagacggggagcatcgcgctgaaaatgaagaagcgccgccccgacttcccggcctcccgcgggcggaggcggagccgcagccggaaaaattttccgaaccggatgcgattccgttttgcagtcatccgtctttttcgtatctttggataacatggccggactttatttccacatacccttctgcaagcgcgtctgcgcctactgcgacttctacaaaagcgtcgacctgcgccgcatggaccctcttctggagtccatgcaccgcgaactggacgcccggcgggaatatctgggcggcgagccggtgcgcacccgctacttcggcggcggcaccccctcgctgtgcgccccggaggccgtcgcggggctgctggaccatgccgcgacgctgttcgattgcactgcggcggaggagaccacgctcgaagccaatcccgacgacctcacccccgcctacctcgccgtgctgcgccgcgcgggcgtcaaccgcctgtcggtcggcatccagtcgttcgacgacgcgtgtctcaagctgatgaaccgccgccacaacgctgcgcaagccgtcgaggccgtgcggagcgcacagcgcgaaggttatgaaaacatcaccgtcgacctgattttcggcgtcccgggtttcgggaacgacacgctgcgccgctcgctcgacagcgccctcgcgctgggcgtgcagcacatttcggcataccatttgaccgtcgaacccggtacggccttcggacggcgggccgcccgcggacagttcgccccggtggacgaagccaccagcgaaacggaatacgccctcgtgcacgaaacgctgaccggagcggggttcgagcactacgaggtttcgaatttcgccctgcccggcttccgcgcccgccacaacgcggcctactggcacggcgtgaagtacctcggcatcggccccgcagcccattcgttcgacggccgggaacgccattggaacgtcgcctcggtgacggagtacatcggcggcgcgcccgccgaagcggaaaccctcaccgaccgcgaccgcttcaacgaatacgtgatgacccggctgcgcacggccgaaggcatcgacctgcgggaggcggaaaggctgttcggcaaggagcgcgcggcacgggtcctgcgcgatgcggaaccgtggctgaagagccgcacgctcgttctcgcagcgggacggatggccgtcccgccggctcggatgctgatctccgacgcggtgatcgaaacgtttttcgaaacggaaccggacaccgcaaccaagtgaaactgaaatgttaagttattattaaatatttttagaaacccccgactccgattgtttaatataaatataagtgttacctttgcggccgaattcttcttcggttcgtcacgaaaattacaaattagcataagtatatgagcaatgccaaacactcccccgatttgctgttcgaagtaagttgggaagtatgcaacaaggtcggcggcatccacaccgtcatttcgaccaaagcgcagaccgtcacccgcaaattcgcagaccgctacgtcctgctgggtcccgacctctcgcacgagggcgtcaacccggagttcgaggaggaccccaaccagctgaaggcctggcgccagagcctctacaacgaaggcatccgcgtccgcgtcggccgctggaaaatcaagggcgagccgacggtggtgctggtcgatttctcgtcgctgatcccccgcaaggacgaaatactcaaaagcctctgggaatcgtaccacgtggactcgatctcgggccagtgggactacatcgagccggtgctgttcggatgggccgcaggcgtcgtgatcgcctcctacgtcgagaccttcggcacgccgaccgagaaggctgtcgcgcatttccacgagtggatgaccgccgcgggcgggctgtacctgcgcaaacacgccccctacatcgccacggtgttcaccacccacgccacggtcatgggccgctgcatcgccggcaaccgcctgccgctctacaacgacctcccgaaattcaacgccgacgagctggcgcgccagttcaacgtcacggccaaacactcgatcgagaagatggccgccgcctaccacgacgcattcctgacggtgagcgacatcacggccaacgaatgcaaatacctgctggggcgcgaaccggacggcgtgacgcccaacggcttcgagaacgacttcgtatgggccggcgaggagtactacgccaaacgcgacgaagcccgccgggcgatgatctcggtggccgaggcctgcctgggcgaaaaattcacgggcgacccgctgatcgtcggaaccagcggccgctacgaattccgcaacaagggcatcgacgtcttcatcgagtcgctcaagcagttcgccgcctcggaccgtctccggcgcgaggtgctggcctacatcaccgtgccggccggcaaccgcggcccgcgcctcgatttgcaggctcatctggccgacccgtcgaagcccatcgacgcaggccagtacagacattcgacccactaccttgaaaacgcaacgtgggaccccatcgtgaacgcgctgaagaacagcaacctcaccgatcccggatcgaaggtgaaggtgatcttcgtccccacgtacctcaacaaggccgacggcatcttccacaaggattactacgaactgctcgtgggcatggacatcacggttttcccctcctactacgagccgtggggctacaccccgctggagtcggtggccttctccatcccgacggtcaccacgacgctggccgggttcggcatctgggtcgacaagcagcgcgagcacgccggcgtggaggtcatccgccgcgacgactacaacgacaaggaggtcgaggcgaagatcgccgatacgctgctgcgtttcagcctgctggacgaaaaacacgtcaacgaacagcacacctcggcctatgaaatctcgctgacggcgctctgggagcacctcttcgcggcctacgaacaggcctactccgaggcggtcgagagttcgatcgtccgcaccaaccgcgccgtgctcgacggcggcacgaaaaccgagcagatcaacttcgtgcgccagcagcttttcgtcgagaaacccgtctggaaccgcatgatggtcgacaagacgctgcccaagcggctgcacgccctcgaagagctttcgcgcaacctctggtggtgctggaaccccggcgcccgcgacctgttcgaaggcatcgaccccgcactgtgggccgaatcggaccgcaacccgatcgccttcctcgacaagatgagcgtcgagcggatgaaggaactggagaaagacacgaacttcctggcgcagctcgacgccgtgcacacgcagttccgcgactacatgaacgagaagcccgatccgaaggcgacgacggtttcgtacttctcgatggaatacggcctgcactcgtcgctgaagatctactcgggcggcctgggcatcctggccggcgactacctgaaggaggcttcggacaagaacgttccgatggccgccgtgggccttctctaccgctacggctacttcacccaacgcctttcggcgcagggtgcgcaggaggccacctatgaggcgcagaatttctacaaactgccgatctcgcccgtgcgcgacgaggccggaggctgggtgacggtcaccatcgccttcccgggccgcacgctctcggcgcgcgtctggaagtgccaggtgggccgcacggacctctacctgctcgatgccgacatcgaggacaacctcgaagaggaccgccagatcacccactacctctacggaggcgattgggagaaccgtctcaagcaggagatcctactgggcatcggcggcatccgcgcgctgcgtcagctgggcatcaagcacgacgtgttccactgcaacgagggccacgccgcattcatcggcgtcgagcgcatccgcgatctggtgaaccaccgcaagctctcgttctccgaggcgctggaggtggtgcgctcgtcgtcgctcttcacgacgcacacccccgtgcccgcaggccacgacgcattccccgagtcgatgatccgccagtacatgtcgcactatcccgacgtgctgggcatcacctgggagcagtatatcaacctgggcaagaccaatcccaacgaccccaacgagaagttctcgatgtcggtgctggcctgcaacctctcgcaggaggtcaacggcgtttcgtggctccacggcgaggtctcgaaggagatcctgggcaacatgtggccgggctacttcaagaacgagctgcacatcggctacgtcaccaacggcgtgcacttcccgacgtggatcgcctcgtcgctgcgccgcctctacgcccgttacttcggcgacggattcgaaggccacgtctacgacatcccggcctggcagaaggtccacgacatccccgacgcggagctgtgggaggagcgcatgaagctcaagaacaagctcatcaagcatatccgccggcgttacagcgacccccggcaggtgcgcctcgactcgccgcgccagatgcttcaggtcatcgagggcatcaagcccgacgtgctgaccatcggtttcgcacgccgcttcgccacctacaagcgcgcctacctgctgttcacgaacctcgaccgtctggcggcgatcgtcaacaacaaggagcgtcccgtgcagttcatcttcgcgggcaaggcgcaccccaacgacaagccgggacaggacctgatccggcgcatcgtcgaggtggccgccatgccgcagttcgtgggcaagatcctcttcctgcaaaactacgacatggaactcgcccgccgcatggtgcagggtgtcgacgtatggctgaacacgcccacgcggccgctcgaagcctcgggcacctcgggcgagaagtgcgtgatgaacggcgtgctgcaattctccgtgctcgacggctggtgggtcgagggctacaaggagggcgccggatggatgcttccgatggagcgcaccttcgccgaccagcactaccaggacgaactcgacgccgagatgatctacaacaccatcgaggagcagatcgccccgaaatactacgcccgcgacacggacggcatcccgcacgagtgggtttcgtcggtgaagaggtgcgtggcggacatcgcctcgaacttcacgaccaaccgcatgctgaccgactacgagaaccggttctacgacaagctcgccgcgcgcaaacgcgagatgagcgccgaggcctaccgcatggcccgcgagatcgcggcctggaagcgcaaggtctccaccgcatgggaccaggtgcgcatcgtcgacgtgcagcgcgtgaagatcgacaaggaggccgtctgcgtcggcgagaagtaccagttcgccgtgacgctcgacatcgccaacctccggcccgaggacatcggcgtggagatggtcgtcgcgcggcagatcgtcggcggacagtccgtcaacgtcacccgcacgatccagctggaacgcacgaaggccgacggaagccgggtcacctactcgctcgactacacgcccgacgaagccggcacgttcgacgtggcgctgcgcatctacccctcgaacccgctcctgccccaccgcatggacttcgcgctggtgaagtgggcctaatgccaatagaaggtattaaatttgaataattaacaataacaagttgtaactgttcgaaaatttcaatatctttaaaggacgaaccgtattttttagcgatatgtcagcacttactttcgacaaaagcgaattgggcaatctggagtactcgctccagcgcgaaatgctcgcaacggaccgtatcggcggctatatgagcacgaccatcgtctgctgcaacacccgccgttaccacggcctgatggtggccccgatcgacgacagcgaccggacctacgtcctgttgtcggcgctcgacgaaacgatcatccagcacgaccagacgttcaacctggcgctgcaccgtttccaggggacctacgagccgcgcggccacaagtacatcaccgatttcgagtacactccgacccccacgatcacctatcgcgtaggcggcgtgatccttaagaaggagatgctctggattcacaagcgcacgcaactgatgatccgctacacgctcgtcgacgcccattcggaaacgcgcctccggctgcgcccgttcctcgccttccgcgacaagcatgcgctgacgcatgccaacatggaggccgacgggcactcctatccggccgtcaacggcgtgaaatgccgcctctacggttcgtttccgtggctgtatctccagaccagcaaacccggcgcggagttcgtgcccgcgcccgactggtactacaatttcgaataccggcaggacatcgcccgcggctacgacggctacgaggacctgatgaccacgggctatttcgaaaccgaactgaagaagggcgagagcatcatcttctcggcgtcgctcgacgaaatgggctcgacgaaaaccatcgaggaggtcttcggcggctccatcgcgcgccgcacgcacaagatcgacttcatcagctgcctcgaacactcggcgcgacagttcgtgatccgccgcccgggcaaccggacggaggtggtctcgggctatccgtggcacggggtttcgggccgccagaccttcgtctcgctgccgggcatcaccctgtggcaaaaccacaaggaggactgcatcgacgccctcgacacgcaggtgcgcggcatgcaggacggcatgttcgccgggaacgcttcggcggcagcggccgcggacgccccgctgtggttcttctggacccttcagcggctcgaagcgcagatcggcgcgaaaaagatctggaaacactacggcgaggccatgaaacaggtgctcgagtcgtacaaacggggcgtcgcgggccgtgtcgtgctcaacgacaacgggctggtgtgggcctcgtccgacgaggttcccctcacgtggatgaactccgtgatcgacggccgttccgtcaccccgcgcaacggctatcaggtggaggtcaacgccctgtggtacaacgctgtccgctacgctctccggctggccggcgaggcgggcgacacgaagttcgtgaaggcgtgggagaaactgcccgaacgcaccgcggcgtcgttcaacgaactcttccgcctgcccgaaggctacctggccgactgcgtgggctgcgacggcgccaacacggacatccggccgaacatgatcgtcgcctgcgggctgccctacaagatgctcgacgagcagacccagctggaggtgatccgcacagtgcggcagcacctcctcacgccgaagggcctgcgctcgctctcgccccgcaacccgctttacaagggttcgcaggagggtacgcccgccgaacgcgacttcgcgggcaagaacgggtcggtatggccgtggctgctgtcgttctacgtcagcgcctgcttcgacatcgacggcgacgcctttctgccgcaggccgaggagattctcgccggattcgaggaggacatccagacctacggcatcggttcgatcggcgaactgttcgacgccgatcctccgttcgcgccgcgcggagccatttcgcaggcgtggagcgtcgcggccgtgctggacatctacggcatgatcctcgcacgcaaaccggaagagacacccggaaagtcggaaaaacccataaaaaaagcgaatccgaagactgcgaaggcagcaaaaaacgttggtaaggaagaggttgccgcgaaggccgtgaaacccgcggcaaaggccgccgcgaagaggacggccggccaaaagacaacgaagaagaaaacgacggaaaaaacgaaataacgaatacggcccgggcgcacaatgtgaaagagagttgtgccggatggcgaggctccttccgaggggaggggttcgaagcggaatctgacttacggacacggccgggcgccgtgaagggatgcggagaggaagcgcacaggcggcaaaatgaaacaacaaaaagataaggtatgagagttttaatgttcggatgggagtttccgccccacattgcaggcgggctgggaacggcctgctacggaatgacccgcggactggcgcgcaacggcgtagacgtcactttcatcgtcccgcacgcctacggcgacgaggaccagcgtttcacgcacgtcgtgaacgccagcgacgtggaggccttgtacggttcgacgggcagcggcgcggacgacattctggagaagatgtcgttcatccacatcgactcgaacatggtcccctatatctcccccgaggagtacgagtcctaccacgagcagtacgtcaagtcggggcggaagacctggtcgacgaccgatgcctggaaacagcgctacaccttctcgggcaagtacggcgccaacctcatggaggaggtggcgcgctacgccgtggtcgccgcgcaggtggccagggacctcgaaggacagttcgacgtgatccacgcccacgactggctcacctactacgcgggcatcgccgccaaacgcgtctccgggaagccgctggtggtgcacatgcacgccacggagtacgaccgctcgggcgagaacgtcaacacgcaggtctacgccatcgagcgggccggcatgcacgccgccgaccgcgtgatcgccgtttcgaacctcacgcgcaacatcgtcatcaaccgctacggcgttcccgccgaaaagatcgtcacggtgcacaacgccgtgcgcttcgcccagaacagcggcaaggttcccgagcggggcgtcaccgacaaggtcgtgaccttcctgggacgcatcacctaccagaaaggccccgactacttcgtcgaggcggccgccaaggtcctcaagcgggttcccgacgtgcggttcgtgatggccggctcgggcgacatgatgaaccacgtcatccgccgcgtggcgcggctcggcatcgccgaccgtttccacttcacggggttcctccgcggggaggacgtgcacaagatgttccagctgtcggacgtctacgtgatgccctccgtctcggagcctttcggcatctcgccgctggaggcgatgcgctcgaacgtcccggtgatcatctccaagcagagcggcgtggccgaagtgctggactacgccgtgaaggtggactactgggacgtggacgccctggccgacgccatctacggactgatcaaataccccgccctgtcgggcatgttcgcctcgaagggtctcgaagaggtgaccaacctcaagtggaacgacgccgcggcgaagatcaaatcggtgtacgaagccgtgatcgaagagaataagaaacaattaaaatagcaacccgcatgaaaaccgtctgtctttattttcaggtgcatcagccctggcgtctgaagaaataccgcttcttcaacatgggcaaggaccacaactacctggacgacctcatgaaccgttcgatcatgcagaaggtcgcccgccagtgctacctgccgatgaacgccctgctgctcaagctcatcagggagaacaagggcaagttccgctgttcgttctcgatcacgggcatcgccatcgaacagttccgcgccttcgcccccgaagtgctcgactcgttcaaggagcttgccgcgacgggctgcgtggagttcctcgccgagacctactcccactcgctggcctcgctggcttcgaaggaggatttcacggagcaggtcaaactgcacacgaaccttatcaaaaaggagttcggggtgaaacccaccgctttccgcaacacggagctgatctattcggacgagatcggcgcgacggtcgccggcatgggcttccgcacgatgctggccgaaggagccaagcacgtgctggggtggaaatcgcccaactacgtctacgccaacgccatcgaccagaaactgcgcctgctgctgcgcaactacaagctctcggacgacatcgctttccgcttctcgaacaagagctgggaccagtggcccctgacagccgacaagtatgtgcagtggctcgcctcggacgagacgccgggcgaggtcatcaacctgttcatggattacgagaccttcggcgagcatcagaacgccgacacgggcatcttcgaattcatgcgcgcgctgcccaaggcgatcctcgccaggaagaacggcctggagttcgccacggtgaccgaggccgcgaagaagcaccagcccgtcgccgtgctccactgtccgcacgtgatgtcgtgggccgacgaggagcgcgacgtgacggcctggctgggcaacgaattgcagaacgaggctttctcgaagctctatgcccagaaggagaaggtcgcggcgctgaaaaatcccgatttcgattatgtctggagtttcatgcagacctccgaccatttctactacatggccaccaagtggctgtcggacggcgacgtgcactcctacttcaacccctacgattcggcctacgacgccttcatcaactacatgaacgtcctctcggacttcatcatcgagctggacaaggcggtggctgccaaggcggcgaaaaaacgggcctgacgccccgacggacaaccggaaaacgggtctctgcggaggcccgtttttttatttcgcaaaacggcgcgcggcatgtacaacggatgctttatttgcttacatttggcgcatcgaaaacacacatgcatgaatagcgtcttcatcctgctgaacagcctcaacgactggaaaccctactgcgaaaccgattcgctgatgaccgtcaccgactacctcgaacaccgttacggggagcggacgcccaagctggtcatcaacttgagcgacgaatacggctacaactccgaaggctactattgctcgctgctggcccaggcccggggacaccgggtgctgccgggcgtcgagacgctcaacaagctcgaatcgggcgccggaatccgcatgaaccgcaacctgcaacagctctgccaacagtggatcgaacgcaaccgcatcaccgacgaaacctggcagctgaacatctacttcggaacctgccgcgagaagggtctggagaagatcgcgcggttcatcttcgaccactacccctgcccgatcctgcgcgtgacgatgaacaaccacgcccgcaaccagatcgagtcggtgcaggccctttcgctgcgccagctctcggagagcgggcaggacgatttcgccaatgcgctcgactgcttcaacaagaaggtatggcgctcgccgcgctcggccaagcccgcacgctacaacctcgccatcctctacgacccggacgaaaaattcccgcccagcgacaaggacgccctcaacaagttcctcgaagtggcccggaaaatgaacatccacgcggagctgatcaccgaggaggaagccacgcggctgatggagttcgacgcgctgttcatccgcgccaccacagcgctcaaccactacactttccgcctcgcgcagcgtgccgcgatgaacgacatcgccgtgatcgacgatcccgagtcgatcatccgctgcacgaacaaggtctacctctgcgagcttttcgaaaaggcccgcatcccggccccggcctcgcagctgctgttccgcagcaacgaatactccttcggcgagatcagcgaacgcctcggcgcgcccttcatcctcaagattcccgacggatcgttctcggtgggcatgcacaaggtggccagcgacgaagagctgcgcgcggcgctcgacgagatgttccgccactcgtccgtgctgctggcccaggagttcatccccacggagttcgactggcggatcggcctcctggacggcgaaccgttgttcgcctgcaaatactacatggccaagggccactggcagatctacaaccacgcccacgacgacacaggccgcaacctgtgcggcgcatgggagaccgtacccatctacaaggcgccgcagaaagtgctcgacaccgccgtaaaggccgcggcgctgatcggcaagggattgtacggcgtggacctgaaactcatcaacggcagggccgtggtgatcgagatcaacgacaacccgtcgatcgaccacgaagtcgaggacgccgtgctgggcgacgaactttactaccgcatcctcaaccacttcgtccactgcctcaaccgcctccacgcgcaatgaaccccgcagtcggaatacgtcccgcgacggccggggacctcgacgccgtggagtgcgtcgagcggcgttcattcccggaaggggaggccttcacgcggcggcagctgcgctacctgctgacgcatgcgcagggagcgtcctacgccgccacccgcgacggtgcggtcgtcggctacatttcattgctgatgcggcgcacggcgcaaaacctccgcatctactccgtggcggtggaccccgcggcgcgcggctgcggagccggacaggcgttgctggacgccgctatcgcgctggcccggcggctcggactgcgtgaagtgacgctcgaagtgcgcaccgataacgactctgccataaggctttacgcccgcaacggcttccgccccggaaaactgctacgcggctactaccccgacggcacggacgcccggcggatgtcgttcaagacctcctgcggccgtccagaatagcctccttgttcgcctcggcccattccaccagtccgaaaatatgcggcagaagactcccgccccgctccgtaagacggtattccacccgcggcggaacctcggcgtagacttcgcggcggatcattccgtcggtttcgagcatccgcagcgtgacggtcagcatgcggtgcgaaatgtcgcccagcgtgcggtggatctcgctgaaacgcatcacgccgttggcattcaacgtcagcaacaccagcatcgaccacttgtcccccaagcggcacagcacgtcccggaccgggcaggaacccgtgggcgtgaaatttttcaattttttctccggctccatccgtttggtatccagcaatggttacacgcatgtaaccatctcatttttaagtgcgttattgtttttacgggctgtttgccctatctttgtacgcaaagataacaaacttaccgaaaataaccattgtatcactaaacgaattgcaatcatggcaaaaaaaacagctgtcgtggccgtgaatcccgtgaacgggatgggcctgttccagtatctggaaacgtttttcgaaaacaagattccctgcaccgtgttcgccgtggccgaaagccgcgagatccgcaccaactcgggcatcggcctgacggccgacgacgtgatcgccaacctcaagggtcacgaagaggagtacgacgctctggtgttcgcctgcggcgacgccgtgccggtcttcgcgcagcatgccggcgagccctggaacagagacctgatggaggtgctgaaaaccttcggggagacgggcaaaccgatgatcggccactgcgccgcagggatgatgttcggattcgcaggcgtcgccgccggacggcgcgtcgccgtgcacccgatggccaaggccgccgtgacgggccccgtggcgacggacgccccgttcgaaatcgacggcaatttcttcaccgcgcaggaggagcacgccatcccggcgatgatcggccgcgtggtcgaagcgctgaaatagcggcgtgtcatagcggacacccgcgagccgccacctgaaaaacaaggttcggttttttgattttagaggagcggattttgtcctgacacagttcgacccggacgggacatacaaacgtattttccgtccgggccggacaaggcagggcggaagaggccctgtaaaatcgaaaactatcctttccgcttgtaacgcgagggcgaggttccggtgtgctgtttgaaatacttgccgaagaaggactgcgtcgagaaattgaggtggtaggcgatctcctgaatgctcattccggaatacttgagcagggccttggcttcgaggatcaccgactcgtcgatccaccgcgcggcggtcttgccgctcacctccttcaccacggacgagaggtatttgggcgtgatattgagctgcttggcgtagaagctcacgttgcgctccctcttgttgtactgttgcagcagcgacatgaactcgtcgaacagcacctcgcagcgcccctgcttcatctcgccgggctgctcgcgctggttgatctcggtgatgatgtagaacgccgtggtgaagagcgtgcggatgatctcgtggcggtaacgctccttgtcgctgcgcagcatggtcttgatgagctggaacagctggcggatttcgtccacgtcctgcggcgtgacctccagcacgggggccttgccgaagcgcatgtagaccggcagcgaggtcgagaggtcgatctggatctcgttgacgaacgatttcgagaaggccagcaggtaggccgcggcgttcgacgaacacttgattgtgcggatgatcgaatcggggttgaaaaagacgatcgtgttgggcttgatgctgtaattctgcatgtcgatcgacacggtggcctcgcccgtcatcataatgatggccgtaaagccgtcgatcgaggtcggataatcggccgtggtgttcttgtcggccgtgagtgcggaaatcaccagatcgtccgaaaggtaaaagacgtcactcatctccttcttgatccgggagatggagaccttgcgcaaactttcgcgtcctccgctgcgcgccgttttgccgttatccgccatatcgtcgtaatttttccggcaaaagtatgaattttcgcagaatcaaacaagccggaccgtaaaaatcagaaattgcccgaggcctgtttggcgcacatcacgcgcaggccgcccgccagacactcgatgtgcagcgggaattcggcgcccttctgcccgtcgacgtccgtgggttcgttgaccgacgaacggatgtcgatccgccgcgcccggaggtggcggacgatcttcgggctgccgcccgccagatagcggcacatggccagcgtcgaacgaaagaaattcttcttctccagcaggatgcagtcgaacagcccgtccttgatcgacgacctccgcgccaggtggaaaccgcccgccgtctcgccgttgaagatcagcaccatcagcgaccgcaggtcgaaccgctcgccgtcggcctcgatctccagcggcacggcgtgcatcgtgcggaactccttgaccccctcgatgatataggccagtttgccgatcttgtgcttgcgttcgtcgggcgtgcgctgcgaggtggtcgtgaagatgccgaacgaaaagatattgacgaaatacaggtcgttcacccgcccgcagtcgacccgctcgacgctgcccgacgcgatctgtcgcgccgcttcgagcggcgcgcgcgacatgccgaccgccccggcgaaatcattggccgtaccggccggaatcacgccgatgggaatgtccagccccttgcgtttcatggcgttgaccgcatagttcaccgtgccgtcgccgccggcgacgaccatcaggtcgatggtctcgttgccgtcgaacggattgaccgcaaagtcgatccgctgcggcgtgacgtcgtagccgtaggcctgaaaaatcgtactgatgcacccgacgttgcgggcgattttgcccttgcccgattcgggattgtagaggaataccgctgttttcatttatctcgctatttcagaatcaacgcttccatggccggcgagacgtactcctcgtactctccgccgtcacccgccaggatgaagtacgccttcacgccgggcatccgttccacggccgccagcgcatcgtcggcgcccatcgccaggaacatggtccccagcgcgtcggcctcggcgcaggtcggagccgcgacggtcaccgacaacaggcgcgacagggcgctgcgccccgtgcgggggtcgatggtgtgggcgaccttgttgccctccccgtcgaggtagaaacggcggtagttgcccgaggtggccagcccgccgccggtcatctgaatccgtttctggaggtattcgccgtccgacatgttgccgtcgaaaggcgtttcgacgccgatgcgccacgcccggccctgccggttgagtccccggcagcggacctcgccgccgatgtcgacgatgtagttttcagccccgtatttctcgaccagtccggccagcagatcgaccgtatagcctttcgccacggagttgaagtccagctgcacgcgcggatcgtccttcaccagccgccctccctcgacgcggaccttttcgcggcccacgaattcgaggatcgaatcgacgttcgggttttcggcgcgctcccggccggcgaagccccacgcctcgaccagcggcttgacggtcacgtcgtaacgcccgtcgctcaacgcgccgatgctgtcggccagatgcaggttgaaggcgatatgacggtcgacgctgtcggtctcgttgcggttcagacggctcacaagcgacgtcgaatcgtaaatcgacatcgacgccttggcctcgcggtccagctccatgacggccgcatagagacgctgccgcgagacgcccttcacgtcggccaccacatgcagcgtcgtgccgagcatcgtcccgtcgacggtgacgaaatccggctcgctcccgcagccgcacaacaccgcggcgacaagcgcggcgaaagttccgcgcacacccgttttccccataattttcacttgtttagccgcaaaaatacgattttcccgattaatttgttatttttagacgccaaattgaaaataattgtgaattatgaattatgaattatgaattatttcgtacctttgcggaacgctctggcgttatccacggtaagggggatgcgtcgtagagtggaacgtaaaataaatttacacaatggcttatttaacagctgagaaaaagcaggagcttttcggccagtacggcaagtctaacaccgacacgggttcgcccgaaagtcagatcgcgttgttttcctaccgtatcagccaccttacggaacacctcaaaagcaacaagcacgacttcggaacccagcgcgcactgctgcgcctggtcggcaagcgccgcgcgttgctggaatacctgaaggaggtcgacatcgagcgctaccgcgcaatcgtgaagacgctgaatctccgcaagtagtcccgaggaagaaatgaaggcaattcccgagaggggttgccttcattttcgttgcgaaaaacaattcgaaaacattataggtttaaaatttttatggaagaaaagaagctgtacaacgcagtccgcaagatcatcacgctggccgacggtcgccagatcgagatcgagacgggcaaactggccaagcaggccgacggctcggtcgtcgtcaagatgggcgacacgatgctgctcggaaccgtcgtggccgcaaaggatgcaaaacccgacaccgatttcatgcccctccaggtcgaatacaaggagaagtacgccgccgtaggccgcttccccggcggtttcatgaagcgcgaagcgcgcgccaacgacagcgaggtgctcgtcgcccgcctgatcgaccgcgccctccggcccctgttccccgcggattaccacgccgaagtctacgtgacggtcaacctcatctcggcggacaaggatattcagcccgacgcgctggccggtctggccgcctcggcggcgctggccgtatcggacattcccttcggcggccccatctcggaggtccgcgtcgtacgccgcaacggcgaatacgccatcaaccccacctattcggagatgcccgaatgcgacctggacatcatggtcggcggtacgatcgacaacatcctgatggtcgagggcgagatgaaggaggtttcggaagaggtgatgctcggcgccatcaagttcgcgcacgaggagatcaagaagcactgcgccgtacagatcgagctgtcgaaggagttgggcaaggacgtgaaacgcacctactgccacgaggtcaacgacgaagaactgcgccagacgatcatcagagagctttacgacaaggcctacgccatcgccacgagcggcacgatgaagcacgagcgcgaagacaagttcaacgcgctcgaagccgagttcgcagcccgctattcggaagaggagctgatcgagaaggcgccgctgatccacaaatatttccacgacgacgtgcagaagaaggccatgcgcaacatgatcctcgacgaaggcgtccgtctcgacggccgcaagaccgacgagatccgcccgatctggtgcgaggtgggctacctgcccgcagcccacggctcggcgatcttcacccgcggcgaaacgcagtcgctgacgaccgttacgctcggcacgaaactcgacgaaaaggtcaaggacgaggtgctcgtgcagggtaccgagcagttcgtgctccactataacttcccgcccttctcgacgggcgaggccaaggccgcccgcggcctctcgcgccgcgaaatcggccacggccacctggcatggcgcgccctgaagccgatgattccgctgggcgaggacaacccctacgccgtgcgcgtcgtgtcggacatcctcgagtcgaacggctcgtcgtcgatggccacggtctgcgccggaaccctcgcgctgatggacgccggcgtgaagctccgcaaacccgtgtcgggtatcgccatggggctgatctccgattccgaaaccggcaaatgggccgtgctgtcggacattctgggcgatgaggaccacctgggcgacatggacttcaaggtgacgggaaccaaagacggcatcaccgccacgcagatggacatcaaggtcgacggactctcctacgaggtgctggccgccgcgctggagcaggcccgcaaaggccgcatgcacatcctcggcaaactcaccgagtgcatcgccgagccgcgcgaggactacaagccctgcgtgccgcgcatcgtgcagatcgtcattccgcaggatatgatcggtccggttatcggcccgggcggaaaggtgatccaggacatccagaagaccaccaacaccaccatcaccatcacggaggtggacaacaagggcatcgtggacatcttcggcatcgacaaggaggccctcgacggagcgctggcccgcatcaaggccatcgtagccatccccgaagtgggcgagacgtaccacggcaaagtccgctcgatcgtcgccttcggcgcgttcgtcgagatcatgccgggcaaggacgccctgctccacatctcggagatcgactacaagcgtttcgagaccatggaggagacgggtctgaaagagggcgacgagatcgacgtcaagctgatcggcgta

SEQ ID NO: 662 - DNA, 5387 bp, unidentified
  source 1..5387: mol_type = unassigned DNA
ttagttcacaccaagatacttggcaacgaccatacgctggacttcggaagtgccctcgtagatctcggtgatcttggcatcgcgcatcatgcgctcaacgggatactcacgggtgtagccatagccgccgaagagctgaacagcgcggcgggtgacgtcggaagcggtctcggccgcgaagagcttggccatggcagcgtccatggagtaatcctcgtgattctgcttcttcatagcggcagcgtaaacgaggtactgggcagcctgagtgcgggtgtgcatgtcggccagctggaactgggtgttctggaactggctcaggcggcgaccaaactggatacgctccttggtgtacttgacagcctcgttgatggcgccttcggcaagaccgagagcctgggaggcgataccgatacggccgccgtcgagggtcttcatggcgatcttgaagccttcgccttccttaccgagcaggttctccttggggacgacgcagtcttcgaagacgaggtcgcaggtagagctgccgcggatacccatcttcttctcgtgcttaccggtggagaagccggggaagtccttctcaacgatgaaggcggtgataccgtggttgcccttgctcttgtcggtcatggcgaacacgacgaaagtggaggcaacgttaccgttggtgatgaagcacttgctgccgttgaggacgtagtcgccgttctcgttcttgacagcggtggtctgctggccggaggcgtcggtaccggcgccgggctcggtcagaccgaacgcgccgatcttgcggccggacagaaggtcaggcagatacttcatcttctgctcctcggtgccgttctcgaaaatgggagcgcagcagagggaggtgtgggcggaaacgataacagcggtggtgccgcaaaccttagcgagctcctccacgcacatggcataactgagaacatcgccgccggcgccgccgtactgcttcgggaagtaaatacccatcatgccgagcttggccatcttttcgacggtctccatggggaagcgctcttcctcatcgagttcctcagctaaaggcttgacttcattttctgcaaattcgcgatacattttgcggaccagcagatgttctttggacagatggaaatccatagtcttttgctccttcactataaaaataattggattgtctaatttttcacaaatcagttccgtgactctcattatatcctgtgcgtttcattttcgcaaggggaactatcattcctttttggaattcgtgcttttcgccgaattcattaaagtctttttgacatttccgttccttttatgacagttttctgtcattttcaggaatcctttccattccaaaagagaaaaggggaggcagtttttgtaaactgcctcccctttttatccttttagggacggattacttcttgctgtaatcgtagaagcccttgccggacttcttgccaagctggccgccgcggaccatcttcttgagcagcagagcgggacgatacttcggatcgccggtctcgctgtagaggacgttcataatggcgaggcacacgtcaaggccgatgaagtcgcccagggcaagggggcccatggggtggttcgcgccgagcatcatggccttgtcgatatcctcgacagaggcaacgccggtctcgaccaggccgatggcctcgttgatcatcgggatcaggatcttgttgacgacgaagcccggagcctcagcgacctcgacaggctccttgccgatctccttggagaggttgtagatgaagtcgaaggtctcctgcgtggtgttggcgccgcggatgacctcaacgagcttcatgctgggcacggggttgaagaagtgcatgccgatgacggcgtgcttgaggccgagacccatctcggtgacagacagagaagaggtgttggtcgcgaagacggcgctctccttgcacatctcgtcgagctcgccgaggagctgacgcttggtgtccatgttctccgccacacactcgatgacgaggtcggcgtccgccgcggcagacttctcctcgacgaggatgttgttcaggatggcgtccttggcctcttcggtcatcttgcccttctcgacgcgcttctgcagggaagcggcgagcttatccttgtggcgctgagcggaagcgacgctggaagcgtacatcagagcggtgtggcccttggccgcgaagacctgagcgatgccgctgcccatggtgccggcgccgaaaactgcaactttcattgtgtgtatcctcctacaatataaatagataattctatggaatcacttgttgataaagggctcgtgcttgcgcttttcgaggaaggcgcccatgccctcctgctggtcggcgctctggaagcaggagccgaaggccttctcctcgatcacgacggcgcggtcaatatcgacctgaagaccgtcgttgatggcctgcttggacgcgcgcaccgcgatgggcgcgttgccagcgatctggccggcgagcttttccgccgcggcgtagaggtcagaaagcggatagaccgcgttgacaaggccgatgcggtaggcctcgtccgccttgatgttgcgggcggtgtagatcatctgcttggccatgccggggccgacgaggcgggcaaggcgctgtgtgccgccaaagcccggcgtgatgccaaggcctgtctcgggctggccgaagacggcggtatcggagcagatgcggaaatcgcagctcatcgcgagctcacagccgccgccgagggcatagccgcccaccgccgcgatcgtcgggatggggaacgcttcgagcttgcgcatgacgtcgttgccctgcttgccgaaggcctcggcctcctccttgctgagctccttcatctgcgcgatgtccgcgccggcgacaaaggacttctcgcccgcgccgcggacgatcaggcagcggatctcgcttaagtccaccgcgtcgagcgcggcatcgagatcggcgagcacctgagaattgagcgcgttgagcgccttttcgcggtcaatgatgagataggcaatgttgcccttgggttcatatttgacaaaagacatcgtgtgtctcctcctgtcttcttcaactgccccctattatatgggcggcaaggcatatttgcaagagaaaaatcacttttttcaaaaaagtttcacacttttccggtgtcattgcaagaaacgttgcatttttaatgatcttttctcccaatgcagcaactcttgtataaaatttttaaaatgacttgtctcttgcaccaattttcgatatgataggctttaattataggaaaacgaggttcattctatgcgaatgcgcaaaaagaaaaacctgcttccccgcatggagcggtgcggggcgtatcagatcaaggacccctacgagcgcaagggccgctggcacgacttgatgcccgaggcgaaggagatccgcgtggagctcggctgcggcaagggccgcttcaccgtcgagacggccgcggcggagcccgacgtgctgctcatcgcggtcgaaaaggtgcccgacgcgatggtcgtcgcgatggagcgcgcggcgaaggcagagctgcacaacgtcttcttcatcgacatcgacgccaaccagctgcccgaaattttcgatgcaggcgaggtcgaccgcatctatgtcaacttctgcgacccgtggccgcccaagcggcaggccaagcgccggctgacgcacggcaatttcttgaagctctaccgcaaggtgctcaaggacaacggccaaattcatttcaagaccgacaacgacccgctgtttgagtggtcgatcgaggagatcccgcagttcggcttcaccctctctgaggtcacacgcgatctgcacgcgaacggacagcgcggcgtgatgaccgactacgaggccaaattctatgccgagggcaagaacatcaaccgctgcgtcgccacgatgcagccgtgggaagagcccgaggaagaggatacgcccgaagaggcggacgaaacggctgaataaaaggaaggctttcagccttcctttttgctttcttccagatacggcgaatacatcatcaccgcgtcgttcacggcgacaggcgtctccgcgagcagcttgccctgcaaatcaaacgtctgccggtagagctcgttgtggcggatgtagccgccccagtactgcgcgcgcatctcgtggttgcgctctacgaccgcatagcgctcggtcggctcggcgctcacgcgccactcgccctcaaggtctgttttgccgacgcggacgcgcatctgataggtgtcctgtgtgtcgttgcggatcatcaggtcaagataggggtaaaagcaggtcgcaccgctgccgaagggctgcgtgcggttcgcgtcgggaaagacgtcgtagccgtggcggtggcgctcgacgaccgtgagcggcgtgtgcagcgtcatccagtagatgaggtttgagagctggcagagcccgccgcccgtcgcggccagatacccgccgttgcgcaggatcatgccgggcagataccccttccccgctgtcggctttccgatgagataccagtagctcatcgtttcaccggggcgcagcaaaagcccgtcgagccgcgcacaggcgaggcggagattcgtcaccttgttgcgctggagctgcatgtcgacgtccttgagctttcgcatgagcggcgtatggtgggaaaacgcctgatatgctaagtcttccccgctgcgctcgcgcgcaaaatgcttccgcatcgaaagccatctgagttttcgctgcgcgctaaaatacgcgccgccgagcttcagccgcaaattagagcgttttttcggttcgcggacggtcatatgcttccctcccctgtttttctgcttttatagacgcaaaacggcgggaaaaagttccaacattttcttatttcaggctcatcacgtagatttgacacgggttccacacgtcccagagcgtcgggaatacctcaaactcgccaaaaccgagggcgagatagaagcggttcgtcgcgtcgtactcagggtacttccccatctgcacggtcttgacctgcaaaaacgagtagccaagctccttcgcccgctgcttcgctgcggcaaagagcatcttgccgacgccgcggcggtggtattctttcagcacgcccatgacatagagttccgccgtatccctccccgtttcggcaaggtaaaggaagccgacggcgttctcgccgtcgaacgcggcgaaaaacggctgcttaacactcttttcgatgtattcctcgcgcgcctctggaatgccaaaccagtcgggcagcgcctctaaaatcaagcgcgcgatgcactgcttctcctctgccgctgtgatctctctaacttccat

SEQ ID NO: 663 - DNA, 27245 bp, unidentified
  source 1..27245: mol_type = unassigned DNA
ctgggcaaagatgtcggggatattatgcccgatgcggcgctcaatttcagcgtccagatccacaaatttcttgtcaaggcactttgccagcgccgcgccgacggtggattttccacagcccggcatcccgatgatcgagacattcgccagctggtgccgcagctcgcggctgaccgccgggatgatggctgccgtgtccagctgtctgccggtaaagtgctccgcggcaaacacagcctgcgccaccagcatctcaaaaccgcccgccgcggtcacgccgcagtcctcggcccgcagcaaaagctcggtgcggaaggggttgtacaccacatccagcacggcctccagcgcggggaacgccttcgggtcgataaggcactgccccacgttcgggaacatgccgcagggcgtcgtattgacgatgatctgcacgtccgggcggtgcatggcctcgctgtacagcagggcatcgcccttgccggtgcggctggcggtcagaatctccttagccccgccgtcgcggcagaccgccgtgaccgtcgagtgcgtaccgcccgtgcccaggatcagcacggtcttgcccgcaaaatctacgccgtggaccccggccagataggcaaagcccgcgtagtcggtgttatacccatacaatttcccgtcacggttcacaatcgtgttcaccgcgccgatggcctgcgccttcgggtcaacgacgtcgcagtaggggatgacaaactgcttgtaggggatcgtcacgttgatggccgcaaaggcgcgcctttccataaaggtgcgggcctcggcctcggtgggcaggggcagcagctcataggtgtaatctgcaattttttcatggatgattttggagtagctgtggcccagcttgccgccgatcaatccgtacagcggttgctgcatagttcttcacttcctgtttttacactttggggaatccgtgcttctgggccagcgtgccgtagcgcacggtcagaaggtccagcagtccgaacgccgtcaggctgttctgcacgacggcggcgcggggcacgatgcaggggtcatggcggcccttgatctgcagctccgcatcggtcctgccgatataatccacggtatgctgttgcttatagatgctgggcgtgggcttgagcaccgtgcggaacacgatgggcattccgttggtgatgccgccgttgatgccgccgttcttgttcgtggcggtggcgattttgccgtcccgcatcgtgaacgggtcgttggcctggctgccgtgcattgcggcaaagccgaagcccgcgccgaactcaatgcccttgcaggccgggatggcgaacatcaggtgggccagctcgctctcaacgctgtcgaaccacggctcgccgatgcccgcgggcagaccggtcacaatcgtttccagaatgccgccgacgctgtcgccctcgctgcccgcagcgcggatagccgcctgcatggcctcctccttcgacgcatccagcagcgcaaagtgtccgggctgcgggtcaggcatgaccagccccgcagcgctggaaagcggtgcgtcctgcacgcctgcacactcggcaatatgggtgtagacctttacgcccagaccgttcagcaccgtctcgcagatcgtgcccgccgcaacgcttgccgccgtaatgcggcccgagaagtgcccgccgccgcgcgcgtcctgaaagccctcgtacttggcgtaggccgtgtagtcggcgtggccggggcgcagcaggtcggcggttttggcgtagtcgccgctgcgggtattcaggttgcggatcatcagggtgacggccgtgccggtggtgtggccctcatacacgccggagaggaactccacggcgtcggcctcggtgcgggcggtggaaagcccatccccgcgggcgcggcggcggtccatggccgcggcaatcgcggcctcatccaccggcaggcccgcggccagcccgtcgagcaccgcccccacggcaggtccatggctctcaccaaaaatcgtcatactgacggcatttccaaaggtgtttttcatatatccttcccgatttttctatgaatggaaaaatggcgatcccggcaagctctctccctcgcagagggaggcaaggccctcggcccgcaggccggtgggggagagagccatgccgccagatgccgtttccctcattccatacctaacaatgccggcagctcggtcatgggcagactgtcggcgcgccagcagccgaggccggggcacttgatgaccgtgatatggtcgccgcgggcctttttgtcatgctgcatgtaggccaggaccttctccttgttggccccagcacgggtgggcaggcccagcgcgcggtaaatcgcccgggtgcgcttgagcagggccgtgtcctcgatcatcggcagcatacccagcgcgacgcattcgccgtggtacaggcccgtggtacggcggccccgcacaccgcgcacggcttcgatgccgtggccgatggtgtggccgaagttcaggcaggcgcggacgcttccctcgcgctcgtcctgctcgacgatctttttcttaaatttcagacttctgtaaacaatttgttcaatgttatcctcggggtgctcgcactcaaacagtgcaaacagctgcgggtctccgatgatgccggtcttgagcgcctcggccaggccgttgacgacctgacggcggggcagggtcttgagcgtgtcaaaatcgacaagcacgaccttgggctgccagaatgcgccgacgatgttcttcgtctcgcccaaatcaatcgccgtcttgccgccgatggaggaatccacctgcgaaagcaccgtcgtggggcagttgacaaagtcaatgccgcgcatgtagctggccgcgcagaagccgcccagatcgcccacaacgccgccgccgacggacaccagcagatccttgcggtccatgccgaacgccagcatagcctgcaaaacctgaccgtagaccttcaggcatttgctgccctcgccccgggggatcgtgtagacggtggaatcggggcactgggccgccacggtctgcgcgtactcggcgggtacgccggagtcggtcagcacaaagaccttgcggtttgccacgttcgtgaactgatggaggttggcaaggcatccagccttcaaaataatatcgtagctgcggcttttaagctgcatcgtcagtttcatgcttcgcacatcctttttcttcatggcttatttctccgtactgtcaagggtgaaggcacccagcagccgcagggtgctgcaaacagaagtcagggtgtccagcagggtctggcaccctgcgcccgtgctgcccgccgggcagacgatttgtacatagaaatagtattcaaacggaacatggggcaggggacggctcttgatgcactccatgttaaagccccgcgcgccgatctgatccagcgctgcggccagctggccgggcttatggcgtgccgtgaacagcagcgccagccgctggccctcgccggtcatggcgggggcggcggcggcacgctcgatcacgatgaaccgcgttgtgttgtcgccgtcggcgttgatgcccgcggacaagatctgcaggccgtacagcccggcggtctcggcactggcaatggccgcaacgctcgggtcgttcagctcggccacatggcgggccgcgtcggcggtgttgccccaggtggacgttttaaagccgtgctgctgtacaaaaacgctgctctgggccagcgcctgcgggtggctgatgacggtcctgaccgtctccagcgtcgcgcccggcacgcccagcaggtcctgccggatcggcaggtcgcacatcctggcaatgataatatcggggtgggtgtacagcagatcgagcacggtggagacatcgcccgcgttggagttttcaaacggcagaacgccgaattgtgcatcctcgttctgcacggcgtcaaagacctcgccccaggtggtgcaggccgtctcccgcgcaaaggggaaaaggcggcgcagcgcaatgtggctccacgcgccgggcacgccttggtaggcggcggtatcgcggcccagccgggcgcgctggtatgcgcgggaaatgctcatggcatcgctgagaaaggcgcggtagtaggggcgcagcgcctcatcggtgatgcgggccgtgtttttgtcaagcacggcggcctcccgcgcggcatcaaagaccggcttgccggtctcggccttgtagcgcaccacatcggccaccgcgcgcatacgccgctcaaacagagcggccatctcggcatcaacggtgtcgatctcggcacgggcttgctgtaaaaggtccatgtgtcggctccttttcggaatttttcgggaatatctccgctgcccctttttggcatggatgtagggcggggtgccccccgccgcggcggcctgtgggcaggccgccctacgaatcaaccgcaggcgcagcgttgtttatttatacatactcaaagtcagtataccataaataaagcgccgtcacaagagtgacggcgctttatttgtcttttcttggccacctcccccgcaaagggaggcaagcgcagttttacccgtgcagcgcacttctcagggcggccaggagctcggcctggtaggcggggctgaaggtgccgtgcagcagcttgggcagggcctcctcctgcaggcggcgccagctgtcggcctcgcggcccggcaggatcggcacaaaggccacaccgttggcagcggctgcctgggcgtcgcccatggcgtcgccgaccatcatgaccttgcggctctcatacccgcaggccagcattgtggcgatggagtttgccttgctgccgacctcctgcccgaagatgacatccgcatgacgggccagcccgtagcgcttccactcgctggcaatggcgctctcgttcgcggcactgacgacggccacatcggccacggcgtgcagctggcgcaggctttcctccacgccggggaacggctcaaacgtcggctccagcgcctgaatacggcggttgcaggcgttgttccactcctgcagcttgcgcagggctaggctgccggtcttttgcagttcccgctgcaggctggccgtggaaagctccgtcgcggtatcgacccaggcggcaatatcctcgctgcccgggatctcgatgccgcggtttttcaaccggtcaaacaccagccggacgctctcaaaccgggagatgccgcgggtgatcgtgtgcaggttgatctcatcccacgcggcagtgatgaaatccgcgtggtcatccagcgcaaacacgcggatgagctcggggcacatgacggtggaatgcttgatgcgcaccgtgtccatcacgcagccgtcggaatccatgcaaatcagaaattcacgtttcttggtaaaatccgtcagtgcatttgccataaaaaccgtctccctctatcaactctgcctataaactcaatatgaatctatcataacaaaattccacggcgttttgcaatgccttttttaaaaaaagcatggatttttgtgtaatttctacacttcaatgggggcatcggggtccagcgtgcggccaatcggagcgtggatcagcagattggccattgcgtccgccggggtgggctgcttgttgatgacaacaaggttctccccgcggaagtagcgcagcagacccgccgccgggtagacggccaggcttgtgccgccgacgatgagggtgtcggccccgcggatggcgtgcacggcgttttccatcgtctcctcgtccagcccctcctcgtagagcacaacatcgggcttgacgatgccgccgcactcgtcgcagcggggcacgccgtcgccgacgcccgccgcatcctcaatgaactgcaccgggaagaatttgccgcaccgcgtacagtagttgcgcagggtcgagccgtgcagctcatacacggtcttgctgcccgcggcctggtgcaggccgtcgatgttctgggtcacgacggccctgcatttgccctcgcgctccagcgccgccagacgcaggtgggccgcgttgggctttgccccgtggacgatgagcttctggcggtagaagtcaaaaaactccgcagtgtgggtctcgtagaaggtgtgggagagcatcgtctcgggcgggtacttgaatttttggtggtacagcccgtccaccgagcggaaatcggggatgccgctctcggtcgagacgcccgccccgccgaaaaagaccatgctttttgttgctgccagaatttcctctaatgccggaaccatgcaaactgcccctttcgcttttggcctttatgccttataatatacctattataatctattttcggagggatgcaagatgcagcgcgaaatcacacgggagctggtgcgccggctgctgcccgggcgcatggcggagagcaacaaggggagctacggcagtgtgctggccgcggcgggcagcatggcctaccgcggggcggcggcgctctgcacagagggcgctttgcgcggcggggccgggctggtgtatctggccagcgtcgagcctgttatccagctggtgctttcccgcacgccggaatgctgcgcctgcggctgccgcacggcggccaacgggggcatccacccgcaggacgccgacgcgctgcgccgctggttcgcagacaggcacaccgttttgctggccgggcccgggttgggggagagcgccgccgatgtctgtaaggccctgctcggcaggaacgccccgtgggccggtgccgtgctggacgccgacgcactgaacgcactggcagcggggaagtacaggggggatctgcccgcaaacacgatcctgacgccccaccccggcgaggccgcgcggctgctgggcctgactgtgcccgaggtgcaggcggaccgcgagggcgccgccgtgtcgctggccgaaaaatatcactgcgtcgccgttttgaaagggcatcacacactggttgccgcgccggacggcacggtctggcgcaatgagaccggcaatgccgggttagccaagggcggcagtggggatattttagccggtctgaccgccgggctgctggcagcgggtctaaagcagggccgcacgcccgaggacgccgcgctctgcgcggtatggctccacggcgccgctgcagaccgctgcgccaagcgccgcagcatgaccgccatgctgccgggggatctgtttcaagatctagggtggattttaggggagctggggcggtaaggctgcggaccgaaaggcggcaggcagaggaaggctgcagcgggggttctggggcgcttggcggcgcacaaccccgcaccgcatccgcaacaacgggacttttctttgctgctttcttctggtcacaaaagaaagcaggacctcccgggaggcagccgttcccggtcttgccacccgcccctatagggtgtataataggactatatctgccagactcaggaaaggagccgctgttatgtcgcgcaaagaaggccagaaacgcaaactgcttgttcttttggagatcctcgcccgggaaaccgacgagaagcaccccttgagtgttccccagctggtggaaaaattgcaggagcacggcgtcgtcgccgagcgcaaaagcgtctacgatgacctgaacaccttaaacaacctgcccgacaccaaatatgagatcgtgcagcagcgcgggcgcggcggcggctactatatgaccgaggctccgtttgagcttgccgagctcaagctgctcgtcgatgccgtctacgccagcaaattcatcacggcgcgcaaatccaaaatcctgatcgacaagctcggccagttcacctccacataccggcaggaggagctggaccgtaaggtactggtcagcgggcgtatcaagagcaccgacgagaaaattctgtacaccgtcgatgcgctgcacgccgccatcacggcaggggagcaggtcaccttcaaatactgcgactggaacctgcaaaagcggatggccccgcgccacgacggccagctctaccgcgtcagcccgtgggtgctcgtgtgggagaacggcaactattatttgatcgcctacaccgaggggcggctcaagcactaccgcgtcgacaagatgcagaacgttcaccagttgcccgacacgacccgcgagggtgccggggaatacgccaatttcgacgtcaatacgtatatgcagcagatgttcggcatgttcaacggcccgctcaagcgggtaacgctgcaatgcgagaaccgccttgccggggcgatgatcgatcggttcggcaccgcgccgatcctgacaccctgcgccgacggcgagcactttacaatgaccgccgagattcaggtcagcccgcagttcttcggctgggtggccgggttcggcaccggcgtcgtcgtctccggcccgccggaggtccgcgccgaaatgaagaaaacgctggatcagctgcaggagctttaccgctgatttgcaataccggcgtaaatatggtaaaatagattgtttaaatctatcaccgtagggagggcatcacctcttgctggaaaagaaccaacgcttcaaaagccttttgtatgtgctggcggacgcggcactgcttttcatcggctttttgcttgccaactatatccgtttcaattacgtccgctactttgagccgggcggcgcagggcctgcgctggccgtggccagggacccgcgcaacatcattgccgggctggccacgtcgctggtgctcgtgctcatctactgggtcgccggtatctacagcaccacgcggctgcgcggcctggccgagcgctgcaccaagattgccgtcatcaacgcggcgggactgttgatcttcattggtgctttgtatctgatgcatctggacgactactcccgtatcgtactggcgctgttctacatcctcggcacggcaggcgtcgtgatcgagcgtatgatcctgcgctgggtagaccgcgcccgccgccgcaaggggctgggtctgcgccatatcctgctggtgggcggcggtaaatccgccgcactttatctgcgcgcgctcgagcacaatccctactacggctttgtcgtggacggctatctggccggaatcgaagaaccgggtcttggtgtgcgctacatgggcggctatgacgcgctgtccgcccggctcgacgaggtcgccgtcgatgaggtcgtcgtagcgctggaggctgacgagatcgaattgctgccccacgtttttgccgcctgcgacaaaaacggcgtgcgcatcacgatggtaccgttctacagcgactatctgcccgcccggcccaccattgacgtgctggacgagtgcaagctcatcaatgtgcggcagacgccgtttgacaatctgctcaacgccgctgtcaagcgcgggcttgatattatcggcagcctgattctgatcattctgaccagtcctgtcatgctggtcacggccatcggcgtcaagctgtccagccccgggccggtcatcttcaggcaggagcgcatcggcctgaacaaaaagcccttcatgatgtacaagttccgctcgatgcgggtcaatgtgcagcaggagaccggctggtccaccgactgcgacccgcgcaagacccacttcggcagctttatccgcaagttcagcctggacgagctgccccagttcttcaacgtgctgaaaggggatatgtccctcgtcgggccgcggcccgaggtgccctaccatgtggagcattttaaagaggagatcccgcgctaccttgtgcgccagcaggtccgtcccggctgcacgggctgggcgcagatccacggcctgcgcggcgacaccgacattgccgagcgcatccgctacgacatctggtacatcgaaaactggaccgtggcgctggacatcaagatcatcttccgcaccgtgttcggcggcaagatggtcaacgacgaaaaactacaataacgccctgtgcgttaccggacgggagtgtctgtaatgagcaaaaaggagcccaaggtcgccatcgttcacgactggcttgtcggctacgccggcggggaccgcgttgtggacgccatgaagcgcgttttccccgatgccgtcatctacacccttgtgtacgaccccaaaaacatgcccgagcactttaaaagctatgacatccgcacaagctggttccagaaggtgcccttctccaacaggctgtacaaggccatgctgccgctgatgccccgcgcgtttgaggcgttcgacctgaccgagtacgatctggtgctgtcgtcgtcctcctcctgttccaaaggcgtcatcacccgcccggatgccgtacacatctgctactgccacacgccgatccgttatgtgtgggatttttactacacctaccgcgccaacgccaactggctggcgaagctcgtcatgcccggccagatgcacaaaatgcgcatctgggacaagtgcgccgcggaccgtgtggattatttcatcgccaactcgcattatatcgcccagcgcatcaaaaaatattaccggcgtgacagcgatgtcatttacccctgctgccacatcaacgagtcgccttttgtcgaaaaggaggacttctacctgaccgtgggccgtctgacctggtacaagcgcgtggatctggccgtgcaggcctgcacgcgccttaacaagcgcctcgtcgtcatcggcggcgggggagagctggacaagctcaggaccatggccgggccgaccatcgagttcaagggcggcggtctgtccgacgaagaagtgcgcagctactacctgcgcgcgaagggctttcttttcccgggtgaagaggactttggcatcacccccgtcgaggcccagagcgcgggcacgccggtgctggcctatggccgcggcggcgcgtgcgagagcgtgctgcccggcaggaccggctactggtttaaagagcagaccgtcgagagcctggccgactgcatcgaacggtttgagcgcgacggcgtggcctgttccaaagaggaaatccgtgagcacagccgctccttcagcgaggaacgctttgagcgcgagctgaaggaatactgcctgcgccgcatggccgactggcagcaggagctgctcgactgctcccactgggagaaggaggaactggattgaaccctatcgtcatcaacggcacggtgctgtgtgacaatatcaccggcatcccgcgctatgtctatgagaatgtcgtccggctggacaagctgatcgagggcaccggcctggacgtccgcattgcctaccgcgacgacgggcggcccatccatctgccggagctgaaaaacatccggctggtgccgctcaagtccatcccgtatttttacaatctggccgtgctgcccgcctacctgcgccgcacccatgcgttttacgtgggccttgccagcgatatgctgctgacccgccgcagcgtcgtggtgctgcacgacatccgcccgctggtcatggataccgacaagggctttttccgcttcaagttctgggtacactgcctgtccaccaaatggttcgcccagcgggtgttcacggtcagcgacaaccagcggcacctcatcagcgagaagctcggcatcccgctggacaagatcggcatcacctacaacggctgggagcacatgaagaacgtcacccccgacgagagcatttttgacaagatgcccggcgtcaaaaaaggggagtacttctacgccctcggcagtttggcaaagcataaaaacttcaagtggatccgagaggtcgcccgccgcagccccgacaagacgtttgtcgtcgcgggcggcaaggacctgcgtgcctttggcgacgacgccgaggcgaaggacacccacaatgtgttctacccgggctatgtgtccgatgccgagaacgccgcactgatgaagcactgcaagctgtttttgcaccccgccgtgttcgagggctttggcatcccgccgctggaggcgctggccctgggcgcgccggtcgcgctggccaacgccacctgcctgcccgagctgtacggtgatacggcgcggtattttgacccgtatgattatgatgtggatcttgaagcgctggccgcccagcccgtggccgcgcccgacgaggtcctgaaaaagtacagctgggacaagaccgccgagttctggctgcacgagatggagaagtacgcgaatcagtaacagcataaaccataaactaggagaactcctatgaaatttatttctcccccatccaaagggacttcacttacattcaagtgcaaagtcggtatcactgttatttggctgcttttgggggctgttttaggctatttgttcttagttattgcgttctgcctgcccactaatcgtatgcgcagtcacttagagagcacacctgatgttttttataacggttctgttgccctcgtaaaggatgatttagctacgcatttggattacttaacagaagcaactattttatccgaagctatctatgatggaaatgaaagtccttttgtgaaggctgccgccatttattccgtccttccaccagagggagatgaaaattggtcctatcgaaagctaatttcttcactcagtgcaaccaacgaatctgcccacggcccatatgatcgttattggcagggtcagttggccattttgagaccacttcttctgttgctggattacaaagatatcttacgcttgaatacgcttgttcagcttttcttaatgttatggattgctcatctgttatcctgtcattcattaactcaccttctttttcctctggcactaatgttctgctctttaaccccgatagctacaggcatctgccttcaatatactccgtgttttctcattatggctattggctgtgttgttcttctacgccatacaaatataataaataaatttaattggttgtttttcttatcacttggcatggcaacaagttattttgattttctgacatatccgcttgttaccttaggaatccccctcattctgtatttacagttagagacaagttctccttctcaacgttttttccaaattacaacttgctctttatcgtggggcattggttatattggtttctgggcagaaaaatggttgcttggttctgtcatcttgcaggaaaacctcttttctgaagcatataacagcattattctccggtcttctcatgaaacactggggcaaaccataacctatatggctaccctaaaaaacaatcttcaggcatacgatttacgtacgtggaaaattctgtggcttcttcttttcttagttactatcgtattggctttacaccgccattgtttgactttgcataatattttagctttctcccctttatgcttagttgcttgtatgccttttgtgtggtactattttacacagaatcactcctatattcacttcggtttcacacatcgtgaactctctatcacatttttcgcacttagctgttttctggttcagctttgtaattcagctcatatcaaacccaaacaaaaaatatagactctgtaacaacttcaccgatggaaccgctgcactagccatatagcctgttgccacccttgatgcagtgctggaaaagtacagctggaaccgcaccgccgagttctggctgcacgagatggagaagtatgcaaagcagtgaagcggcaactcccgcagggtaaggcccctcaggcctcgcaagctcggccagctccccaccctgtggggcgcctttcacgggcgtacgcccgaaaaaagcctcccttttcaggggaggtggtcgagcgccagcgatgaccggaagggctctggccatttcccgctgccacatcacctatcccacaaaaggaggagcattattcttatgtttattataatcaccctgctcctcaccgtgctcgtctccggcatcttcggtgcggttcctgcggtagtatcccaccgcagggtttcccgccgcgacgctgcctgggccgccgggctctggctggccgtctgggtgttcgctctgtgcgcctaccaccgccccgggctgaccgtcggcttccacgcgttccggctcgtcgccctcaccgccatgaccggctgggcggggcttgtcaccgccgggctgcgcagcctcgggcgcaaagggttaaaggccgtcgtcccgctgctggccgtcacggcgctggggctggaggtgttcgtcggcaatgtggcctacttcaacacccacagctacacgccgtttcagctcgtcgattaccttgacgacaacatcaatgtcgggcgcggcgtcggcacgatctcgctcgacgagggccgcacctatctgcgattcctcgacattgaccagcccatctacaacctgcggtttgacggtctggtcagcgacgacaccgagccgctccacgccgacagcgccgtgatcttcaccattgagggcaccgacgccgccaacaccgagctgacccgcttcggcagctggcaggtggggctgcaggccccgcgcacccaggtcatcagcctggacctgaccggctccgtcgggatgctgacgctgaccgctgccgggtacagctccacctacgcgcagttcccggtggcgctgaccttccgcggcatcacggccaacgcgccgcgcgcgctggatttctcgattttgcgcttctgcgcgatatttctggcgctgctggccgtctacggcctgcgcccggccagcgggctgtggcaccgccgctggctggcgggcaacgtctgtgaccgcgccgcagccgctgtgctgggccttgtgctggctgccttcgtcgtggtcatcccgttctgggagccgagcaacaccggccttgccacaaaagattacaacaccgcgttctgggacggggagagcacggtcagcttcgtctaccagcagtacggcgcgctggcgcacagcctgctgaacgggcgccttgacttggaggccgacccgcccgccgagctgctggcgctggacaacccctacgatgccggggcgcgcgacgccgcgcaaatcaacgacatccactgggaccacgccttttacaatgggcgctactacgtctattttggcattgtaccgtgtcttttgttccagctgccgtttgaggcactgaccggcatccagaacctggcctatgcgccctgcatggtcctgctggggctgatcttcctcgccgcctgcttcggcgtcgtcgggcaggccgtgcgccggtggttcccgcaggcgtccaccgcagcgtacctgctggccgtggccgccgtagcgctgggcagtcagttctactatctgttgctgcgcccctacatttatgaatatgccatcctctgcggtgcggcgctgctgatgctggggctttggctctggctctccgccgccagcacgccggtggaaaagcgcggtgcgctggtcgtcaagctcgtcttcggcagcctctgcgtggcgctcgtcgccgggtgccgcccccagatggagctgtttgcgtttttggccgtgcccatcttctggccgcggtacatcgggcagaagcggctgcgcagccgcgccggggcaggggaggccgccgcgttcctgctgccggtggtgctggtcgctgccgggctcatgtggtacaacgctgcgcggttcggctcgccctttgactttggcgccaactacaacctgaccggcaacgatatgacccagcgcggcttcaacgccgtgcgcatcggcccggctgtgttcacgagtctgttcgagctgcccagctggcagggtgttttcccgttcctgcgggagaccgacgtccagacgaacgccgtcatccgcacgatcagcgagaagttcacgggcggcattctggccgccacgccgtacctgtgggtgctggcgctgccgctgcttcccgcgttccgccgctgtctgcaccgccgccgtgtcaccgcctgtgtggtctacggcagcctggccgccatggtcgtcataaccgtcgttgactgcgagatggccggggtgctctaccgttatctaatggattacagccccgtgctgttgcttggtgcggcgctgtgctggttctgcgccgagggtgcgctctcccgccgcgcagctctgggggagggcactgccgccgcggcgctgcccgcactgcgcaccgtcatggccgccgctgtggcatataccgccgtctaccgcttctgcacgctcttcgccatggagccgtatctgcagggcatgaatccttccctttactacaccgtcagccgccttgttcaattctggatgtaaaatccgcccggaggtccttttattatggataaaatcgccgttctgatcccctgctacaacgagtccaagactgtcgagaaggtcgtctcggatttccgccgcgtcctgcccgacgccaccgtctacgtctacgacaacaattccaccgacggcactgccgagctggccgccggagccggggccgttgtccgccatgagtaccagcagggcaagggcaatgtcatgcgccgcatgttccgcgagatcgacgcagaagcgtacattcttgtggacggcgatgacacctaccccgcggaggccgcgcccgagatggtcgctgccgtgaccgggcgccaggccgacatggtcgtcggtgaccgcctgtccagcacctactacacccagaacaagcgcccgttccacaacttcggcaacgatctggtgcggttctgcacaaatcatctgtttggcggcaagatcaaggacattatgaccggctaccgcgcattcagctaccaattcgtcaagacctatcccgtgctgtcccgcgggtttgagatcgagaccgagatgacgatccacgccctgcagcgcaatatgcaggtcgagaacgttgtcattgactaccgtgaccgtccggaagggtcggagagcaagctgaacacctactccgacggctttaaagtattgggcacgattgcgcggctgttcaagaactaccgcccgttcagctttttcggcattctggccgcgatcctggccgtgttcggcatcggctttatgatcccggtgctgggcgagtatttccggaccggccttgtgccgcgcttcccgactttgattgtctgctgctttgtgctggtggcggcgctgctgctgtttatctcgggcatcatcctctcgagccagcttgccaaggatgcccgcgactttgagttccagctgcaaaccgtgcatcattggcacagtgaaaagaaataagccttccccctcgggggaaggtggccgaggccccgcctgaggccggatgaggggcaagcctgcggcagccgcccgtttacgggctttctccgtaagctctcccctcatccgtcacctgcggtgacagcttccccctcaggggaagcccttttgccccagcccgcaaaccgggacacccggtctgcgggcttcttgctttttggggcgcaatgggctataatagttttatatgtgcgcactgcacatactacgtacaacaaagagggactatcaagggagtatatacattatgacgaaaattgccgcatcgatcctgtcggctgattttgccaacctgaaacatgactgcacccgcctgttggaggccggtgtcgacctgatgcactttgacgtgatggacgggcactttgtacccaatatcagctacggcgcgccggtgctgaaatgcctgcatgccgctatgcccgacgtctactacgacgtccacctgatgatcagtgacccggcccgctacgccgccgactttgccagggcaggggccagcctcatcaccttccacctcgaagctgtgccggacacggcagaggaggtcatcgccgctatccgcgctgcgggctgccaggtcggcatcagcatccgccccggcacgccggtggaagctgttttcccgtatctgggcgttgtcgatctgatcctggtcatgagcgtggagcccggtttcggcgggcagaagttcatccccaccacccccacgcgcattgccgccatctgtgccgagcgcacccgccgtggctgtgataccctgatcgaggtggacggcggcatcaacaccgagaccggccccctgtgcatcgctgccggggccgactggctcgtggccggaagttcgctgttccatgccatggatcctgccgctgtggtaaacgtcctgcacagcaagtaaaggagctttttccctatgcccaatcgtaaaaaagttgaacgcagcgcgaactacagctactacagtgacctgctgtggtgcacagtcccgctgatcggcatgtcgtggtattactacggtgcgcgcccggtgcttttgctgctggccgcactgctgaccgcctacctgtgcgactgtgccttggccccgctgcacggcacgggctaccagtcccatgagccgtccagtgagtgctttgccgcgctcatcgtgctgctgatgcctgccagcatctcgtatcccatcgtcatttccgccgtcatcgtcgccgtgctcgtcaaggaggcgttcggcggcgagggccactatccgttccatcccgccgccgtcggcgtcgtcgtggccggtatctcgtggccgcaggacgtcttttcgtaccccattcccggcacgcagctgccgttgttcggcagcgtgaacaccactctcgtcgagggcatgaacgccactctgcgggatggcggtctgcccagtgccagcacgatgaacctgctgaccggcaatgtctccgccgccataggcaccagcgcagcgctggtcgtgatggcctgcgggctgttcctgcttgtgcgcgggcacatcaagctttctgtcgttattccgttctttatctttgtcatcggtctgccgtggttcttcccgaatctgaacgagctgccgaccttcagcctgccgtgggaatatatccgccagcgcttctatctggaaaaatatgtcgtcctgtccggcacggcactgttcaccggcctgttcctgatctgtgagccggtcacgatgccggaccgccgcatgagccgcatcatctacggcgcggcgctgggcatcatgacctatgtgttccgcgtgttcagcccgtatgagtgtgcggcctgctgtgcgctgctgatcgtcagttccatccccgaatggctcgacctcatcagccaccgcaccgaacgcatccgctttatgagagaggaggagcagcgccttgccaattcaacaaaacccgaataagcgccggggcgaggagcgctccgagaccttaattatcccgcacatcaccagggagatgctcgaggtcgcccgcgccatggcggagaagggcgcctcccgcgccgagatcgaggccgcccttgccgccatgcagaccggcaaggcgcccgccgccccggcggcccctgccccggaaaagcagcccggcgcaccgcagcagcccgcacccgggcgcagtgatgccgcccgcagcggcggcatcatcccgacgagccgcccgcggtacaccgccgcggagcgccgcgccatgttggaggaggtccagcgccgccaggctgagcgcgaggccgcccgccaggcggaagcccaggccgaggaggatcggttccgcagctaccgggaccgggagtacggcaggagccccgcggtcacaccgtccgcagcaccccagcccactcccgctgcccgcagtggccagacgcccgcagcagctgacgagacccgcacgatctcgatcccgaagcgcagaactgccgagcctgccgcccatgccgtgcagccccctgcacccgcggcacagcccgcccagcagcccacgcaggtcatgccgccggtacaaaaggcggcccctgcggcaccggctgcgcccgccccggcagagcacaccgcccacccggagccgacccctgcgccgaagtccaaaaaagccagcgcctcgcgttcctacgccgcggcggaggctgccctgaacgagcgcatccgcgccgaccatatctggctgtccaaccccgtgcttgtgcgcggcctcggcatggccccggtcatcggtgccgcgctggacggccggcgggcgctcatgctctgtatcgcctcgctgattttggtcaccttcacccgtgtgctggccgtggccatctgccatctgacaaagaaccgcttccgccccgtggtgtactgctactctgcggcgcttctctacatccctacgtatgttttgctctacgcactgttcggctctgacctgacgctgctgggcatctacctgccgatcatggtcgtggagcccgctatcgtcaagcgcatggagttctccgaccttgaacccgtgagggatgcgttccgccacggcttcaacaacgcgctcggcatgtgtgttgtgctgctcatcgtgggctgcctgcgtgagctgctggccacgggcgcggtctttggcaacgtcatcctgcacaatgcgctgctgccgctggctgcactgcccgcgggcggctttgtcatcgtgggcatcctggccgccatctggtgcgccgctgccaacctgtacaccgattataaacatgaggaggtgcgccgcctgtatgctgaccgtaagcactgagctgcagccgattttaaacggtattgtgcagtttatcagctatatggtgctggccgtctttgcggagaatgtcatcctggcccgcgcgctgggcgtcacccgcctgatgaagctcgtgcccgaccaccgcgcgcaggtgtgggatttctgcctgccgctgctgctggtcatcacgctgtccgcacctgccggctgggccgcacacgacctgtttttcccgtggctgcgtgattatctgcccgcatggctgcccatctcggccctgcggcccatcgtctacctgacctgcggcatcgcggccatggccgtggcctggctgctgctgggcgtgctgccccgcaagctgcgtgccagctgccgcagccaactcagccttgccacctgcagcaccgccgtgctgggcacgatgctcatctgcgcgaaccagaactatacgattttgcaaagcgtcgcgttcgctctgggcagcgggctgggctatgtctttgccgtctttatcgttcgggagggccgccgccgtctgcgcagcaaggccatctcctcgatcttccagggtctgcccagctcgatgatctacgtcggcgtgctgtcgctggcgatctacgccctggttggccacaccgttgttctgtaactgttagggggtcgttgttatgtccgaagcctgctttaccgcagccgatattttactgcccgccgccggggtcccactggacccgtgggcctgcatcgccgttgaccagtttacatcccagccggagtactggcagcgcgccgagcacctggccgacggcaagcccagcaccctgcacatcgttctgccggaggcgtacttaggcaccccgcaggaggccgagcgcttagagagcatccgccgcacgatggaggagtaccgtaaaaccgttctgacccggaaagtacatggctacgtttatgttgagcgtacccagatggacggcacggtccggcagggccttgtcggcgctgtcgatcttgatgcctacgactacgcgaagggctccaagcccgctatccgcccgagcgagagcaccgtcgtggagcgcatcccgccgcgcctcaaggtccgccgcggggcgacgctggaaacgccccacgtcatgatgctggccgacgacgccgactgcacgctgatcgagcccatcggactgatgaagaaccagctgccgccgctctacgacggtgagctgatgctgggcggcgggcatctgcgcggctgggccgtcgaggaccccgcgctgatcgcccaaattgattccgcgctggcggcgctggccgaccctgccgcctttgcccgccgctggcccgctgccaaagggcagcagccgatggtactggccgtcggtgacggcaatcacagcctggccaccgccaaggcctactgggaggagctgaagcccaccctgagcgaggagcagcgcaggacccatccggcgcgctggtgcctggccgaggtctgcaacgtccacagccccgccattgagatcgagccgatccaccgcgtcgtgttcggcgtcggtgccaaggagctgtatgccgcgctcgacgcctgggaccagcagcaggggagcagtacgacgatgtccgaccagcgtctgcgcctggccgatgcccacggcgagagtgctgtcgcgctggccaacccgcccgcgccgctgaccgtcggcagtgtggaggcatttctggcggacttcctgcccgcccatcccggcgtgaccgtggactacatccacggcgaaagcacggcgctggcgctggcctccgacccggccaaaccagccacggccattctgctgcctgactttgcgaaggctgacctgttcaagggcgttgtgctgggcggcgtgctgccccgcaagaccttcagtatgggccatgccgaggaaaaacgatattacaatgaatgccgtgtcatcggcgtataacaggattcaggtgaattatggaaaaagctgcacaaaccccgaacggtgcaccgcaccgtcgccgccgccgtcgccttgccggcaatggcagcgccccgcaggcgcagcagcccgcgcgtgaggggaaagcccccgcacagccgcgcaagccggccccgcaggccgctgcgcccgcagcccccaaggccccgcgcagcgagaatgcgccccgcgccaatggcagccacccccgccgcgggcagggcagacccgcccaaccgcagagccagcaggcaccgcgccagaacgccccggcccagcgcccggctgcaccccagaatgcgccccagagcgcacgccctgccgcgccccagccgccgcgccgcaatgcccgcccggccccgcaggtgcccagccagccgctgcgcgaccagcccaaggcaccgcgtccgccccgcaatgtccgcaccccgcgcagcaccgcgccggagcagccgggtctcgatctgatctcccgccgcccgccgaagcagaagttcgcaaatttcgaggactatctcgccgcccacggcggtatgactgtgccgctgccgcccgaggcatcggacgcagcggacacccccgagacggccacgcccgccgaggctgccgaatgacccccgccaccgcggcagccctgcgctgccccgtatgcggcgggccgctgctgctggccgggcgcagcctgcgctgtgccaaagcccacagctttgaccttgccaaagagggctacgcctacttgctgccgatgcagaagaagcacgccgccgaccccggcgacggcaaggccatggtccgcgcccgccgcgcgttcctgtcggcagggcactacgccccgctgatggcgacgctggccgcgctttgcgccgcgctgccccacgaccatattgtggacgccggctgcggcgagggcagctacgataagtatttgtatgacgcgctgggctgccctcagattgcggcgttcgacctgtccaaggaggccgtgcggctggcgtcgaagctcgtgcccgacgcggcgttctgtgtcggcggcagcttttgtgcgccggtgcgcgacggttgggccgacctgcttttgaacatcttctcgcccatggccgaggccgagtttgcccgtatgctgcgcccgggcgggcatcttgtttacgccgtgcccaccgcgcggcatctgttcggcctgaaagagattttgtacgactgcccgtatgaaaacgaggtccggcagaccgaatacgacggctttgcgtttgtgaaggccgttgagtccaccgctgtcatcacgctggaagggcagagtgtgcaggatttgttcgccatgacgccttattactggaacacccccgccgacggcgcagcccggcttgcggaatgtgaaagcctgacgacagagatcgggttccggtttttggtgtatcaaaaggtataaatgtacgtgccttcccccgtgggggaaggtggccgaggccccgcccgaggccggatgaggggcgagcttgcggcgtctccccgtgtacgggctgcctccgcaagctcgcccctcatcagtcgcctgcagcgacagcttcccccgcgggggaagcctttttactttagatcttctccggcggcacgattcccgggccatacggctcctgcgcgggtggggcaatgacctcctgcgtctgcttcggctcatcctcgtcgcggtactgctcgtcgggcacctcgctcaaatcggtccagaagccttcgcgctcatcctcggcaccgcggggtccaaattcatcaaacataccagacactcctttataatagtgtataagcgcggcccttgcggcctacactgtaggcatagtctttgctgggggagtgtgggttatgcgttccaaccgcggaattttctggtacagcctcgggctgacgctgcttctgctgctgccgatggtgctgaccgtcgcgttcttcaccgaccaataccagaagcagcagctcctgcgccaggcgtcggcggcggacagtacgctgcacatcgagccgggtgcgcagggcgtgtatacgctgctgctcgtcgtccagcaggaggagcccgcctttgtgctggcccgtgcggacggcccgcagcagacggtcacactctgcgcactgccgggttcgctgcgcgtcagcgcaccctcgggtacaacaacgctggcggagtgtgcgctgtctgccggggccgggcgggccgcacagctgctcgtcggcacggtggctacgggggagaccgccgccccggcgctgcactatatcgcggccacgcccgccacctgggcggactgcgcgggccgcacagcctcggcacgcatcgacacggcatcgctgctggatgccgccgcacgcacgcgccttggctacggcgaggatcccatcgccgtgtgtaccgccgcgcaggcgtcggagctgatcgcccaattgcaggcggcgctgcccggggcaggggaaggctgcatggcccgcgccgccgtctgggcggcgttcctgcggcaggacccggcgctgctggccggtctgcccgatggtctgcgcagccgcagtgcccggctgctgaccgacctgctggccgcagacctgaacgccctgggcgagacactggcctatttaagtgcccgcaccgccctgacgattgactacaccaccgccgccgtggccgctgcccggggcggcgtgcagctgacggaggaggggatggcagccgtttgcgccctcctgctgtgacggagaacgcggctatgcccgcccgcggagcttccgcttctgcgttcggcgcaaggccgtcaaaattttacaagaattttttcaaaaccgcttgacgtagacccgcagtcgtgttattatgatagcacctcttttgcgggtttattttttatgccctttttcaagggcgcctgcaagcgcgagggaggcttattaaccgataatggaggtgccgaacaatgactgtcaagatcaccctggcctgcacggagtgcaagcagcgcaactacaacaaggagaagaacaagaagaactctccggaccgtcttgagatgaagaagtattgccgtttctgcaagaagcatacccttcaccgcgaaaccaagtgaggataggagcttagagatggcagacaataaagcagccaccgctgcagcccagactcaaagcgacaagcccaaaaagaacgacggcaagaagaaggtctccttcttcgacaaggtcaagaactttttcaaagggatcggcaagtatttcaaagatacgaagagcgagctgaaaaaggtcgtgtggcccagcaagaacgacgtcaaaaccaatacgatcaccgttatcgtggtcgtgctggtcgcagctgtcgtgctgatcctgctggacctcatctttggcggcgccatccacctgttgatcggcgcctgagcgcgttgagcggaggcaaagacaatggctgagcaagcaaattggtatgtggcacatacctattccggctatgagaacaaggtcgcaaccgatctgatgacgatggtggagaaccgccacctgcaggatctgatctgcgacgtcaaggttcccaccgagacccgcattgaagaagtttttgacaagcgcggcaacaagaccggcgagaaagaggttcagtcgaagctctaccccggctacgtctttattaaaatggtcatgaacgacaacacttggtacatcgtgcgaaacacgcgcggctgcaccggctttgtcggcccggagtccaagcccgagcccctgaccgaggcggaggttgccaagatgggcgtcgaaaccaccgttgaccttgaggtcgagtacaaggtcggtgatacggttgagatcaccgccggtccgatggaaggctccgtcggcaccgtcgacgagatcgacattcctgcgcgcaaggtgcgcgtaaggatcaccatgtttggccgcgagcttccggcagagctggagctgcatcaggtcaagctgttctgagtttttctcaggacaccctagtttccggtaaagaccgcgaacgggccagtgcccggggtacggtttttatagggcgcgcggaggtcgtgcgcccgtgggaggtctgcaccgcaggccgcaactcaccacaaaatttggaggtgcaagtattatggcacagaaaatcactggctacatcaagctgcaaatccccgccggcaaggcaactccggctccccctgttggtcctgctctgggtcagaagggcgtcaacatcatggcgttcaccaaggagttcaacgagcgtaccaagaaccagatgggcatgatcatccccgtcgtcatcacggtctacgctgaccgctccttctccttcatcaccaagactcctccggcgcccgttctgatcaagaaggctgccggcatcgacactgcttccggcgtgcccaacaagaacaaggttggctccatcacgctggctcaggccgaggagatcgccaagaccaagatgcccgacctgaacgctgcttccctggaggccgctgtcagcatgatcaagggcaccgcccgcagcatgggcgttaccgttgagggctgaataggagggtaatacgcaatgaaacacggcaagaagtatatcgacgctgctaagctgatcgagaataacaagacttacgatcccaccgaggccctggagctgtgctgcaagaccgctaccgctaagttcgacgagaccgttgagctgcacgt

SEQ ID NO: 664 - DNA, 25911 bp, unidentified
  source 1..25911: mol_type = unassigned DNA
agctggatctccggtcaggagggcgacggcaactacctcgccctgtccgctgaggagatcgagctgctccagaacctgaaggctctgaaagacaacggcacctttaagaacatcatcgtcctgatcaacagctccaacgccatcgagctggacttcctcaaccccgcgatctgcggtgaggactacggcatcgacgctgcaatgtggatcggtgacgtgggccagaccggcatcaacggtgtgggccagctgctctccggcgctgtcaccccctccggctctctggtcgatacctacctgtacgacaacatggccaaccccgccatgtacaacttctacactcaggcctaccccaacgcagcagagtacaacctgctgaccgagggtgctgacgtgcagggtatgtacagcgtctatcaggaaggcatctatctgggctaccgctacttcgagacccgttacgaggacgtcgtcatgggcaccgccaaggccggcgactacaactgggctaccactgtcgcttaccccttcggctacggcgacagctacaccacctttgcatactccaacttcaatgtgaccgagtctgacgatgccttcaccgtcaccctgaaggtcaccaacaccggcaagaccttctccggcaaggagaccgtccagatctacttccagtctccctacaccgcttacgacaaggccaacggcattgagaaggccgctgcagagctgtgcggctttgcaaagaccgatgtgctggctcccggcgcttcggaggacgtgaccatcactgtcccgaagagcgagctgcgcacctacgacgcaaacaacgccaagacctacatcgtggacgccggtgactactacttcactgctgccaccgactcccacaacgcagtcaacaacattctggctgccaagggctacaccgtcgagaacaccaacggccgcatgaccgagaacggcgacgagtctctggtctggaagtggaccaacgacacccttgacaccaccaccttcgccaccagcgcaaacggcactgccatcaccaacctgtttgacgagtccgaccccaacaagagcagcgacgctcccggcagtgtcacttggatgagccgctctgactggactggcaccttccccaccgctcctgcacagctgaccgccaacgagcatctggctgcaagcctcgctttcacccagtacgacggctctgaggccaacagcgtcgagatgcccactctgggcgcaaagaacggcctgaccctcgcttccatgatcggcaagagcttcgacgatcccgagtgggataccctgctcgaccagctgacctacagcgagatggtccagaccatcaccctcggcttccataacaccgcagctgctgcctccatcggcaagacggccaccaaggacgagaacggcccgcagggtctgaccgctgccctgaccggcggtgcatccgcaatgtgctacacctccgaggacgtcatggccgcaactttcaacacggacctcatcaacgaggtcggccgctgcatcggcgaggactgccttgcaatgggctactccggcctgtacggccccggcatcaatatgcaccgcaccgcttactccggccgtaacttcgagtactactctgaggatccgttcgtggccggcaccatctgcgctgctgaggtgcagggcatccagtccaagggcgtctacgtctacctgaagcacgtggccctgaacgactccgagaccagccgccgcggcgtcaacacctggctcaacgagcagaccgcccgtgagatctatctggaagtcgccgacaaggccatcaccgacggtggggcttggtgtgtcatgaccggcttcaaccgctggggcgctacctggtgcggcacgaacgccaacctgctgaccgactacctgcgcggcgagctggggatgcgcggcatgtgcatcaccgacttctccggctccagccagtacatggatctggtggacggcctgatcgccggctccgacatctgggacagcccgatgcccaagatccacaccaccaaggctgcaaactatgagaacgatgcctacatcgtcactcagatgcgcaacgccatgcaccacatcctctacaccgtggtcaactccaacgccatgaacggctggtcttccaccgataccctgaagaccgtcaccccgtggtggcagaccgccatctatgcgctcatcgcagtgatggccgtcctgaccctcctgtgcgcatggcagctgtccaaggccctcaaggccaagaagagcatggtcaacactgctcccgcagcggaccagaagtaattcccccacagagttccgcaactgttaagaccaacggcagcctgtcccccaaaatcggcgggcaggctgccgttttctgtgaaaaaggagacaccgcaaatgggtgaacaaaccgcaaaggcgtcgggcctgaaccgcgccaagacctaccagctggtgctgttcccgctgaacaacggcgcgacgaacgtgtactatgtgctggtgctttcctacatcgctaccttcggcagtaaggtgctggccctgtccatgatcttcgcttcggtcatggtcacgggaatgcgcctgttcgacgccattaccgaccccatcatcggcgcgttgatggaccgcaccaacggcagatttggcaagttccggcccttcatggtcatcggcaacctcatcatggcggccagcatcctcgtgctgtactgtctgacccccctcatccccgccagctcgatgggcctgcgctacgccgcctttgtggccctgtatgcggtctgggtcatcggctataccttccagaccagctgcacccgctccggccagaccgtcctgaccaacgaccccaagcagcgccccctctttaccatcttcaacaccgtgggcagcctgctgggcatgggcgcgatgcagttcttcgcccccatcctcgccaagaactatgagggcggctacgcctccgcaggcttcttccgcacactggcccctgtgggcatcgtcatctctatcctgctcaccattctggccatcatcggcatctgggagaaggaccagcccaagtacttcggcatcggcggcgaggccagcgaaaaggtcaagctccacgagtacgttcagatcatcaagaacaacaaccccatgcagcgcctgatggtggcgggtgccggctgcaagctggccctctccatcgccaccaacaccaccgtcctctgtatgctgtacggctgcatgatgggcaactacgacggcctttacctgcccatgatggtgctgggctatgtcttcagcgtgcccttcttcctgctgaccgtccgcaccagccagaaggagggccagaaggccagcctgatgaagtacgtcagcgtggcatttatctgctacatcggcgtgctggtcctgctgctgctctggggccgcagcgacgccttcaccctgtccatcatgggagagaacggcctgtccatcaacctgtacaccgtcctcttcatcgccttcttcggcatcggctacggcgcatactacgccaccgccgatatgcccatcccgatggtcgccgactgctcggactatgagacctaccgcagcggcaactacatccccggcatcatgggcaccctgttcagcctcgtggacaagctggtgtccagcctgtccgctaccgtcgtgggcatcgcggtgagcttcatcggtctcgagagcctgcccacccagtacgacccctacacccccggcatgaactgggtggtcatcgtgctgttctgcatcatcccgatggtggcttgggccgccaccctcatcgccatgaagggctacaccctgaccggcgagaagatgaaggagatccaggccgtcaacgcctgccgccgcgacgcggtggccaagggcatgaagctggacgaggccatagccaagtggcagagcatggatcagctgcccgccgagtaccgcagctgaggcgctcttcctctgcccgcgcgggcgtagaatagaaccatgagaaaaagcaccggttttcgtgagaaagccggtgctttttgcgcgcttcaggactctttttcgggagtctgctgccgctgcccggcgctcccgacggctgcttcctcgttctcggcaccttcttctccaactgcggcggcgatgtcctgatcgacggcgtcatgaagctcagcgataagacagtcggcggccccgcaaatgccctgaaatgcggcagaacggatgtgaaaaattccggagtagttgtaattaagaacgaattgcggtattatataatagttgaattatacgcatctgtcagcagggcgtgaccataaagagagtgaaaaggaaaactgcgaatgagatctgcgggaagaaaaccgaagcatgagagaaaagtcggcccggaagagagacaggggcgcggctctgggtcggcgcgtccgcctgagcaggagagcgccgcttgggcagaactgaacatcgtcgaagagggcggcgagccggaagaagacagcgaagccgaggaggcagaagccccccgggaaaagcgaggacgcttccgcagacattggaagcatcgcctgaagaggagaccggccttttcgtctgttcacgacttcctcaacagccttctctccttccgccttctgttcgaggtcttcgtgcagaaggtgcgctggctctttgccgtgggcgtggtgtgcacgctggggttcatgttcgtacttaccaccgtcaagagctttggggcaagcaccaccatgtccctgaactatgaggagagtgtcaccggcaagacgcccaacggcgcacgcttcagcgagtcggagttcctgacgcaggagtatctcgaggccatcttacaggccaccggcctgcaggacgacctgacgaccgccgacctcgcggactgcatctccatcagccccaccaccagccggatcgtgaccaaggaggacgattattacatcagctcgtcctattatctctcggtcaagctgccgtggacgctctgggggaagatcacggtgcaggacttcctcgacgagatatgccgggtatacctcaagcggttcaccgcagattaccgggtcaacgccacctcgctggacatcgacgatgactacagcgacatggactacgaggagatcggctcctacttcagcatgatgatcgaccgggtcaacaactacctcacggtgcgcaacgatcaggacggctcctatctctccgccagcggccagagctacagcgccatcaagaaacaggtacagaacctgcagggctataccctccgggaataccagagctacatctgggaaaaaggcgtggccaagaacaatttccgctgcatcgacgatctcaacgagctgaaccgcaccctgcggtgggacgagatgagcgactcccagaagagcgcgatctacatgaccattctggacaactacaacaacaagatggtctcctcggtgctcatccccacctatgacaacgacggtgcgttctatatgtcccgcaccaagatcggcatcgacgatctggccctgcaggccaacgatctgctcagctcggcggtggaggcccagaagagcatcgccaccaacaacaccaaggtcacggcgctggaacagttcaccgagtcgcatgaggtgcagatggcacaggccatggtggacaacatcacccggcagctcgcggacatcgtgagcgcgacacgggagctggacgccgactgctacgcccagcgcatccgcagctatcttatgttcagtgagccgcagaggtctttcatgcagcgctataacgtgaaacgcagcgtgatgctggccgcgctggtctgtgcggtctgctatctgggcgcagtcgtccaagcgtgcgtccggcgccagcgccagcggatggagaacgaataatatccgtctctgggacaggatggaggaagaatgaaaagttttgatttgctgcgctacctgaaaaaatggtggtttgtcatcatgctcgtcacggcggtgggctgtctgggcgtgtatgagtttatttcgtcgcggcagtcgtacacggccacagccgttatccagtacgcaggccccaacgccagcgagggcttgaacgccgacggaacaaggatcgacccttccgagatcacctcggcatcggtcatcaacaagaccattcaggatctgggcctgacggccagcaccgagtccatccgcccccggatctcggtgcaggaggtcatcccggaggacgaagagaccaaaaaggagacggctctttccaacggcgacgaatacgagtattatcccacgacctacgccgtctccttcacggtggacagcaaggacgccaccgactacgcccgcaatgtgctggactcggtgctgacgaactactttcagtattacagcgagacccatgtggacgcggatattttcccgaacaatgccagcaacgtctcggtggcgaactacgagtatattgattgcgtggagatcctgcgcaacaacgccaacgagagtgcggcttttctgcgaaaaaaggcagaagagaaatacggcttttacagcgtgaagtcgggctattccttctcggacctcgtatcggagtatgaatatctgacccagaacgccctgaacgacctttacgcctacgttatcaacaataagctggtgcgggaccacacccttctggtcaacaccaagaagaacgccatcctgcgctaccagcttcagatcgacagcctgaacaacaacatctctgaggccaaggacatcatcgaccagttcggcgacaagacgctggacggcgcagcggtctattcggccaaccggaacgccgacggcggcgagacccagatcatcaccgatgtggtgcgggactacaccacccagccctccggcgatgtcaccaccacctacgataagctcatccagcattacgccgacctccacgccgagcgcatcgatgctaccatcgcgcagggaaaggcacaggagatcctggacgcctacgccgacgtgacccggaacaccgaccccgccagcgccgaggcccagtgggccagcgaccgcatcgacgagctggtgcagaaattcaccagtctgtatgagctttccatcgagaccgttgaagagttcaatcaggtcaacggtgcggacaacatcaagatgaagaacagcatcgtggtcaacgcgaagctcaatctgaagctctatgcggccctgtcggtgatactgttcctctttctgggctgcttctgcgccatcttcctcggacggctgggcgattttgtggactactatctctatgtggacaaaaagagcggcctgcccaaccgcgagcgctgcgacgccatggtggaccgctacagcaccgttcgtctgaacggccagttcaccgtcatccacattcaggtcgacctctcggggatgagccgcaacgacggcgacaaggcgctgcgggcgctgggcgaccagctgcaatacgtcttccggacgctgggctttgtgggctacaacggcgcgggacacttcatcgtcctgctggaagattgcagcatcgacttggcaaggaactgcatcgaccgcctgagcaatctgctggccaagaccgagctggccgtgtttggcccctgcgtctttgtgggcgtctccaactcggcgaaggatgacgcctacgagatccgcgccctgctgaggctggccatccgccgctgcgcggacgcaaaggcccgtcaggaggccgaaaatgcaaggaaggcggctgagtcgtcgccgctgaagagcgaaagctgagagtgatttatgggaaagatgagtaaaaaaattctggcagggctgctggccgtcgtgcttgtgctgggcggcatcctgctgtacaatctgcagatgaataagagcttcatcacgacgttttattcggtcacggtggataagccggtagaagacctgcgcatcgtcctgctgtccgacctgcatctccacgagtacggcgaagacaacgccgaccttgtgcggaagatacagaacctcgccccggacctcatcgcggtggcgggcgatatgaacatcgacacggacaccgattaccacgtcgtgctcgacctgatgcaccagctggtggacattgcgccggtatactatgcccccggcaaccacgagtgggcgggacggtacgcgggcggcagcgacgccctttttgacgacattcaggccaccggcgtccactggctgaacggcagctatgaggacgtggaattcaagggcaggaagctgcgcatcggcggctttttcgagtggccccgcgcccagctggaacgggaaaactcccgcgcagtggccgacgccatgaacggcgagacgaacgagctggacgacgtctgcaccatcctcatctgccactgcccggaggttctggacacatcgctggagctgtaccagttcgaccttgtgctcagcggccacgcccacggcggacaggtgcgcatcggcagtcaaggcctctggtctaccagtcagggttttctgcccaaatacaccagcggggtcaaccagatgggggagtcgcaggtggtcatcagccgcggcctcggcgattcggagccattcccgcgcatcttcaaccagccggaactggtggtcgtggatgtgaattgagcggaaaggattaaaataacaggatgaagacgtttcggagcagatggatacgatatgggagcgcggcactctacattctgctttcctttttgagcttttactgcgcttgctataagctgccggttggcttgaaatatggaatcaatcttgtggtttttgcatgggcttgtgcggcctttttcgtctctccgcaattcgaacacgcactgttctgcctgcgcttttttgtattgtttttctttccgtacctgatgttctggatgtggtcggcaggaatatggattacagagtttcaaagctggccgtatatcctgcgaggttcgcaaaatattatttatatgttgacgaacctcttgtatgtgattggagcagtatatctttttgatgaagatgcaacaacatatacgcttatttcaatggcatttgcaaactttgcggtttttgtgcaagtcggactacgcacaggttttccccggcttatttcagaatacattacgttgctgttaacatttgcggacgatactggtggtgcagtacgccaaatggaactgcatgacatggtttacggctggggtacttatgtcgtgtattatatgattcaccggagcttcaaaggcgaaaaagacatctggaaatttatcatttctatttttttctttactctggcgatgaagcgcgttgcaattcccggtgcgatgggggcggtgatattctattgggtcatgaaatggttcgtaaagcgttttggaacaagaccattgcgaggaatcattaccttaatcacagttgtttcaatcgcgggtttgtttggctatctgatgattattcggagcggcctttttattgaacttgcagaacgctatgacgtagatttgatgagccgcgaccgattgtggactttttatcaggatatttattggttgtcgccgacctaccttggaaaaggcattcgatatatttataactacggctcaacgcatatggagaatatagacattcctattgcggtagttcataatgtgtttttggagctgtatattgaaacgggtttttggtgctggattgtatggcttttctatgagctgtcgttccgggtcaagagactgcttgagatgttcgatgcagaagcggcgcttggcatgatggcaatgaatgtttatgttttttcaacctatctgacggataatacatcgttttattttcctatcaatgttacataccgattggtgatgatgacatggtgttatgagattttacgatataggcaaaaaaaggtggtagtaccagtctatgatgactgatgttccgcatggatgaaaagaggaaagaacatgttagcatatgcggcacgagtagcactgttttttaaacagaagaagggtcagctccaaaacaggaaacagcggaagatattggagcggggacagtatacgaaggaaactgctgtcatagatacagctcaggcggtgcaggtgctggaaaagatacgaccatgcgaaaaagcggaatgcaaagaattaacattccggggcggctgtgcggtatctgttattattccagtatataacgcggcgggaactctgagtaaatgtttggactctgtctgtggacagaaattgatgcagggctttgaggtcatttgtgtcaatgacggctcgacagatggttcggcagatattttgagtgagtatgaaaaacgatacccggaacttgtggtaatagaagaggaaaatcgcggtggtgcgggcgcaaggaattgcgggttgcagaaagcggagggaaagtatcttttcttcttagacgcagatgattttttgccgcagggagtgctgcaaaagctgttggacgatgcacagaagtcgggtgcagaaatcgtgattggaaaaactgcaaagtgtctgacctcaagagaaatcattgtaaaaccgaggactgaaggaagccgggaggaaaaaagcctttggtcagccagaaaatacggaatgggaacgccgtggggcaaactgtataaagcctcgctctggaaaaggacgcagttttttgagggctatggctttgaggacagcattgtttatctggatatttacccacaatgcaaaaaattttatcttgagggaagtccgagctactgtttccgaagcggcaaaaacagtctgtataagcggcagaaaaattcggcgaaaggcatcgacgcactctggattgtgataaaagctgtacagcacgctcaggagataggagtagacatatataacagtgagtattatcaactgattttgtggcatctgagcacagtcatgtacggcagattgacacagtttgagtcgcgtgagattcttgagagcgcctttgtcgtggcggcagaatttatcagtaagacctttgccggaaaggcagagtatgcgtttgtgggcgatgagagtgaaaaagaaatctatcgtctactggaaaagagctttcaggagagagactttggaacatgggtacagtgcagtaaagcgctgtaagctgtggtgaaagatacagtgggaagtacggcaatgaaaattttgatgataaacaaattcctctaccccaacggcggctcagagacatacatcttcgagctgggaaagcagctggaaaagatgggccacgaggtgcagtatttcgggatggagcacgagggccgctgtgtgggcaaccgggtgggggcttataccagcagcatggatttccacggcggaagcaggctggcgaagcttacatacccgctcaagaccatttattcctccgaggcccggcagaagctgcggctggtgctggatgattttcgaccagatgttatccatctcaacaatttcaactatcagttgacgcccagcgtcctccttgaggcggacaagtggcggcgggagaacggacagccctgccgcatcctctacaccgcccacgactaccagctggtctgcccgaaccatatgtgctgccgggtggatggtcaggtctgcgaagactgcctcagcgggaagtctgcctcctgcatccggcacaagtgcatccatggctctgccgccaagagcgccatcggcgctgcggaggcggcgctctggcggtggaaaaaggtctacaaaaagctggatgccatcgtctgctgctcggagttcatgaagaaaaagctggacaccgaccccatcctgcgaggcaaaacggtggccctgcacaactttatttccacaaaaaaagcgccggatgtggaaaaacaggactatgtgctctacttcggacgctttgcaaaggaaaagggcgtcgaaacctttgcaaaagcctgtaaagctctgccggacatcccctttgtggcggcgggcagcggcccgctggaaggggagctggccggtatcccgaacctgaaaaatgtgggcttccagtcgggtgaggcgctccggaagctcatcgccggggcgcggttcagcgtctacccgtccgagtggtacgagaactgccccttctcggtgatggagtcgctgatgtacggcacgccggtgctgggcgcggacatcggcggcatcccggagctgatcgacgcaggggagaacggcgagctgttcgagagcgggaacgccgatgcgctggccggaaagataagagcactctggggcgaccgcgccagactggacgcctacacaaaggcctgcggcaagacccgcttcgacaccgtggaggcgtatgcggaaaagctgatgcgcctgtaccaagggtaatatggaggagaaggaatcatggcaaccaagaaactgaacggaaccgttatcgtcacctatcgctgcaacgcgcgctgcaccatgtgcaaccgctacaaggccccctcgaagcccgaggaagagatcagcctcgagaccatccgcaagctgccgcccatgtactttacgaacatcaccggcggcgagccgttcatccgcactgacctgaaggacatcgtgcgggagctgcggaagaagtcggaccgcatcgtcatctccaccaacggcttcttcaccgaccgcatcctcgacctgtgcagggagttcccggacatcggcatccgcatctccattgagggcctcgagcagaccaacaatgagatccgcggtctcgccgacggctacaatcgcggctacaccaccctgaaaaagctccgggagatggggatgaaggacgtgggcttcggcatgaccgtgcaggacaagaacgcccccgacctcgtgcccctctaccgcctgtcggatgagatggggatggagtttgccaccgccaccctgcacaacagcttctatttcgtggaggccaagaacatcatccacgaccgcccgatggtggccaagaacttcgaggccctcatcaacgagctgctgcggagcaattcgcccaagaagtggttccgcgcctacttcaaccatggacttatcaactatctttacggccagaagcgtctgctgccctgtgatatgagcttcgacaccttctttatcgacccctacggcgacgtcatgccctgcaacggcaccaaggacaaggaggtcatgggcaacctgaacacccagagctgggaggagctgtggagcagccccgaggccgacgcggtccgcgccaaggtgcgccactgcgaccgcgcctgctggatgatcggttcggtctcgcccgccatgcacaagtacatctggaagccgggcttctgggtgctgacccataagctcaaggccctctttaccaagaccccctacagtatgtacgagctgaaggtctgccgcgactaccgcgacggcagggtgacgaaggaggagctggaccgctgctccacctgcgacctcaactgtgtggtcaacaacggcctgagcgccgcctcgcaggagcagctgcgccataagtccggcgaggagatcgtggacgctgatcttgcaagccagctcagacagtgagggagaagccgatgaagatactcatcattcgtccgtggcccagcctgctggacgtgaccaagaacacctacaacattcaggaggtggggctggccaaagcgctggtcaagcggggccactctaccgacatcctgttctggacggacggggatgagatgaccgtggaggtggaggcagagggcggcaagcccatccgggtcttctaccgccacgggaaagtcctgctcaagaacgtctggttcagcgggcaggatgcgcttttcgcccagtacgatgttttgcagaccgccgagtacaatcagatgttctcatggcatctggccgggaagtaccccgaaaagacggtcatctaccacggcccctactattcgcccttcaacaagaactacaaccggatgtgcagggtgttcgacgcctttttcgtggggcgctaccgccgccggggcacccggttcctgaccaagagcgagctggcccggaagttcctgctggaaaagcggctctcgccggagcaggtgacgacggtgggcgtcggcatcgacgccgagcttctacgcgaccgtccggacgccgggcagaccgagctggaagggaagatgcgcgcccagaaaaagggcctgaagctgctctacatcggccgcatcgagccgcgccgcgaccccttcttcctgctggatgtgctggccgaggtgcggaaaagcgatcccgacgcctgcctctacctcatcggcgacggggacgaggcgtatcgggacagcgtgaaagcggccattggggaaaaggggctgacggattgggtcttctggcagaaaaaagccccgcagtaccagatgaagggggtctaccagcaggcagacttcttcctgctgccgacggagtacgagatcttcggcatggtgctgctggaggcgatgttcttccgccgggtcgtgctgaccacccccaacggcggcgcggatatgctgctgcgcagcggcgagaacggcatcgtgctggaaaaatcagacccggcccgctgggcagaggccctgctggacgtcgccgccgacccggcgaaaaaggcccggatggagcaggcggcctatgagacggtcatccatgagaacacatgggacgcccttgccggccgctttctgaagggctacgaaacgagataaaacgccaaaaaaggctgccgcacgttttgtgcagcagcctttcgttatttctgatacagtttcagagtctcgaccacgatcttatcccacgggaagcgggtgcagacgtactcggcggcgagccacttgaacatccgcaccgcattgggatgctcgagggcgtaggtgagcttctgggcgaggtcgtccacatcgcccttgcggaagacgatgccgttgtcgtggatgacattgtagcactcctcgatgtcggaggtgatgacgcagttgtcgtagctcatggcctccagcaggcagaggggcattccctcaaggtcgctgggcaggacgaagaggtaggcgttgctgtaaagctcttcccgcagcgcaccgtccacaaagccggtgaaaatgatgcggtcgtccccgccggcctgctccttcaactggtcgatgtaccagtgggtgtcggaggagccgcccgcgatgaccagcttcttgtcggtgtggagcttcttgaacgcatccaccagatagtgacagcccttttccggcaccatccggcccagatagaggatgtaggagtccttctcgaggccgtacttctcccggataatgtccggggccgcaggggccacaggattgacgccgttggggatataacgggtggcgcggccgtaggtgtcctgaaaatacttttgtgtgctgtgattgaggacgatgatctcgtgggcgaaccggacgccggtcttttcgcccgtgtggatataccacgagccgaaggagcctttccatttgtcccgtgcccagtccagaccgtggacggtcaggacgacccgcttgccggtgaggcgggggagccaggagaacatggcaggcccttcggcgtggatgtggaccacgtcataggggccgaacgccgctgcaagacagccgaagaagctggacgtcaccgccgcaaggcccttgcggtcgatggtgggcacccgcttgagccggatgccacggtattcgtcgagatgctcgatgtcgtattcttttccgctgacgtgatggccggtgcggttgtagcaggtgacgctgtggccgtgcatcaccatccgcgcggcaagctcctctacaacgacctcgatccctccttcccgtgagggcacccgcttgtgccctaccatagcgatccgcatagttgcatcaactctttcttgtttcatgtatgattctaggaatacaaagtggaaatatttgactacaagtgacaaaaaatgacaatttgtttcaatgatatgtatattttacacaattttgatgcaaaggtcaatactcgtggataagaatcttagccaagccgtcaaaaaaatcccctccggatgggaggggaagggtgtgtggatcaatcgtcgtcgctgtcaagcttgaggactgcggtgaaagcctcgctgggcagggagacagagccgagctggcgcatcttcttcttgccttccttctgcttttccagcagcttctttttgcgggagatgtcgccgccgtagcacttggccagcacatccttgcgcatagccttgaccgtctcgcgggcgatgatcttgccgccgatggctgcctgaacggggatctcgaagaggttgcgggggatgttgtcccgcagcttctcgcagatgcggcgtcccttggcgtaggcgttgtcccggaatacgatcatggacagggcatccacggggtcaccgttgagcaggaagtccagcttgaccagatcgctctcgcggtactccttgaactcgtaatcgtagctagcgtagccgcggctccggctcttgatggcgtcgaagaagtcgtagacgatctcgcccagcggcagggcgtagtgcagatccacgcggacgtcgtccagatacttcatgtcgatgaggacgccgcgcttgttctggcacaggtccatcaggctgcccacatattcgttgggggtatagaggtggacgtccacgaacggctcctcctgcttgacgatgttggaggggtcggggtagctggaggggttgtcgatcagctccaccgtgccgtcggtgagggtcaggcggtagcggacgctgggggtggtggtaatgaggtcgaggtcaaattcccgctcaaggcgctcggtgatgatctccatgtggagcagaccgaggaagccgcagcggaagccgaagcccagcgcggcgctggtctccagctcgaaggtcagggaggcgtcgttgagctgcagcttttccagcgcgtccttcaggtcggggtactttgcgccgtcggcggggtagatgccgcagaagaccatcggcttgacctgacggtagccgggcagggcctcggcggtggggttgtcggccagcgtgacggtgtcgcccacgcgggtgtcctgcacagtcttgatgctggcggtcaggtagccgacctcgccggcctgcagctgggcgcagggggtcaggctggtggcacccatgtggcccacctccaccagcgtgaactgtgcgccggtggccatcagacggatggtgtcgccgggcttcaccgtgccctcaaagacgcggatatagacgatgacgcccttgtagctgtcatagatactgtcgaagatgagggccttgaggggggcgtcggggtcgccggtgggggcggggatgtcgctgaccacccgctccagcacctgatcgatgttcagaccggtcttggccgagacgcggggggcgtcgaggcagggcaggccgatgacatcctccacctcctgcgccacctcgtctggatgggccgagggcaggtcgatcttattcaggatgggcaccagctcgaggtcgtgctccagcgccatataggtgttggcgagggtctgggcctccacgccctgcgtggcatccaccacgaggatggcaccctcgcaggcggcgaggctgcggctgacctcgtaggcgaagtccacatggcccggggtgtcgatgaggttgaactcgtacaccttgccgtccttggcggtgtagttcatggtgacggcgcgggccttgatggtgatgccgcgctcccgctcaatgtccatgttgtcgaggatctggtcctccatcgtccgctcgtccacgctcttggtcagctcgaggatgcggtcggacagggtggatttgccgtggtcgatgtgcgcgatgatgcagaagttgcggatgttgtctcttgccatgtagttcctccgaaatttataagatccagtcttcgacggccttgacgccgccgttttccagataaacgcggggcacccggcgggaaacgccgcagagcacctcgtaagaaatggtatcggtcttgcgggcgatggtctcggcgctgtcgctcaccgtgccgccccagaggatggcctcatccccctcccgcacgtcgggcagggcggaaacgtccaccatcagctggtccatgcagacccggcccagcaccgggcagggtctgcccttgatctccacgatgcccttgccgcagctcagcagacgggggtagccgtcggcgtacccggcgcagagggtggcgaccttggtgggcttttcggcggtgaagcggcgtccgtagctggccgactggccgggctgcatctcctttaccatgctgacgatggtcttcagcttcatcaccgggcggaaaacgccgaagcgcacctcgtcgctggggtcgaagccgtagaggatgatgccgggacgagccatgcagtgggtgcggggcaggccggcgggccagtcggggtggagcatcaccccggcggagttgtcacagtggacgacggcaggctcgaacccggccttggcgaggccctgataggcccggacgaagagggtgtgctgcccgctggtgtaggcgatgctgtcggcggtgtcgtcgtcggcaacggcaaagtgctggaacaggcccgtgacccggagaccgggcaggcggcagacttccagcatcccggccagcgcggcgtcaaagtcggtgcgaagcgcaaagccaatgcggcccatgccggtgtcggccttgaggtggacatccaccgtcccgcctgcggcggaggctgcctcgctgagggccttggcctgcgacagggagtagcaggcggcggtgatgttctgctccatcaggaccgctgcgcagcccggctccacatggcccagaatgaggatgggcaggcgcagcccggcctgacggagctgacgggcctcggccagacagctcacggccaaccatgcggccccttcctcggcgaagaccttggcgcattccactgcgccgtgaccgtagctgtccgccttgacgacggcacacagcggcatcttgccggcccgggacttaacgatacggaaattgtggcgcagggcatccagatcgatctcggcccagacgtgtttttcaaagagtggtgtctgcatgggcagtgtcctccttatttgatgtgcgggccgggtgcaggggacgccagccgtcgatgccgctttcctgcaaggcgtggagcgtcttctgccggaaagcccggtcggtgcggcagcgctcccggacgaagtccttggtgtcctcccgggtggtcacgccgtcggcggggcagcggcttttcacgatggggaagcccgactctttcacggcagtgcgcacctcctgctcggtggcgaggaggagcggccggatgagggtcaggccccggtcggacagctccgtcaccggcgaaaaacagccgatgcggccctcccgccagagattcatgtaaaaggtctcgatggcgtcgtcgaggtgatggcccagcgccaccttgttgcagcccagctcttcggcggcggcatggagggcgccccggcgcagattggcgcagagagagcagggatttttctcctttcggtagtcgaagacgatggggccgatgagggtgcggcgcacctcgtaggacacaccgtactgccggaaaagggcttccagcgcggagtagtccaccggctgtcctccgaactgggggtcgagggtgacggctgtcacctcaaagggaaagccgaggtactgccgcagctgcgcaaggcccaccgtcagggccacgctgtccttgccgcccgaaacgcccacgaggacgcggtcgccgggggaaagcatctcatactgctggatggctttgcgcatcaggccgcagagccgctgcatcgctttcgtgccgctcatgacaggctcacgctctccacgaggttcacgatgtcgctgatggaggccagcttggtcagcgcagagacatagatgacatcgccggtgtcgtattcgatggtggccagcacggcgtagtaagcctgaatatcacagcgcacggcggtgacggctgcaccgtcgatgttcaggttgaccttccgggggctgatgacgccgtaggcctgcttgaggtcgcgctccgactggccgatgaagtcctcgtaggagtccttcgtgcccctctggagcagcacgacctgatagttggcgtcgtcgctgctctgggcggaggccagctccagcgcacggccaagggtggcgtcctcggtcatcttgcagaccggccagacggcggactcataatagaccgagatgccgttttcggcggtatagcgggtgtcgggagaagcgggggtgcggcggttgaccgcgagggtcagaacaaaataggccagtgcgcccagcaggacgatgatgcccatggcgagcagcaggcggaaagagcgctgctgtgcgctgtcgcgctggtggatgtctttcggcatgagggggtatcctccttataaaagtaggggtcggccccgggggtggggctgtatcctttttagtataacatactcagcgccaaaattgtagcgccgtgccgcaaaaagcagaccgaaaatacgattcgagaaaacatgagatttcgagagaaaacaagagaaaacaagagattcaaaaaactgagccgaaaaaatcgaaaaatggtgttgacaggcggctcccggggatgtatactaacactcgcgcccccaaaaggcgcattgaaccgttgaaacacttatcaggaggaaatagatatgagcactactctcgtcaagcccgctgaagtcgagcgcaagtggtatctgctcgacgctgccggcaagagcctgggccacgtcgctgctgaggctgctgttctgctgcgcggcaagcagaaggtcgattatacccccaatgttgactgcggcgattacgtcgtcgtcatcaactgcgacaaggctgtcctgaccggcaagaaggccgagcagaagttccacatcacccacagcaagttcatcggcggcctgaagaaggtccagtacagcaagctgatggctgagaacagcgatctggccatgacctacgctgtcaagggcatgatcccttccaacaccatcggtgctaaggctctgacccgcctgcactgctaccagggtgccgagcacgctcacgcagctcagaagcccgagaagatcgagttctaagaaggaggcaatcgaacatgtacgaaaccaaaccttatttctacggcactggtcgtcgtaaggattccgttgcccgcgttcgcgtttatcagggcactggcaaggtcaccatcaatgaccgtgacatcgacaactacttcggtctggagaccctgaagctgatcgtccgctctccgctggtcctgctgggcctcgagggcaagtatgacgtcgtcgtccgcgtttccggcggcggtgtttccggtcaggctggcgctatccgccacggcctgagccgcgccctgctgcagcagagcgatgagaaccgctctgtcctgaagaaggctggcttcctgacccgcgatcctcgtatgaaggagcgcaagaagtacggtctgaaggctgcacgtcgtgcaccccagttcagcaagcgctgattttaccgatactgcgattttacggctctgcttcggcagagccgtttttgtttgtcaggtacatttcctgctggactggggggcacgacagacgcgcgtttcaaatcattgctcaagcatcgcgtgggcggcggggccgccccagcgatgcaccccagttcagcaagtgcaacagcgacgaccgccgccagcggcggaaacagggaggagctgttggggctgcggccagcaggatatgaggcccgctcaagggccgaaatagacgctgggaaccgcaacccggggaagactgcccggagatgcgggtttagtagggctgtcatgtccgtaaaagtaaacttttttccagatgacttgacatttttgctgtttggcatataatgaaggtagccaaaggaaactggctggagagttcatttgcgcaccaaaagcgaaccccctcggagtgtgagtccgagggggttctttttgggcttacttacccttgcggtggctgtcaagccacttgcagatgtagtacgaaactacattcgctgcgacagtcacgaggaaactgttgaacagagagtccattttgcacaccccctccctgttgccagagtaggtaagggcagcgataccagtataacacagcagcaaaaggaacgcaaaccttgtcgaagcggggcaaaagagaaaaatcgaacttcctttctccccctcttgacaaaagcgaaaaaagaggctattataacaagtagacagacaatggagcctggggtgtgttcaccctaggcttttttctttggaatgtcttgggaaatgcctcgctgcgggccgatagagggggtccgcagcgaagaaaactggaatgtgggaccgcggcagaaaggtgtctgccgggccgcaaaagaggaaaaggagaaggtatcatgaacgagaatgttgatagtctgatgattcgtctggtcggtcttgcactggctgttctgatgatggcaggcatgaccatctatacgggccttttcccgaaggcatctgcaaaggccgctgacacccacgccgctgtcatcagcgtgcaggagggctatgtggcagcggaggacgttcagcagaacgtctgagtggttcattcttcaaatataagagaggcgcaccccggagcagttcgctccggggtgcgccttttttgcggcgaagatggcggtggtattattgttatgtaaaacgcctcacagttgcgacgaatagagtcgaaaaacttctgctttcgtcaaaatgccaaagaaaatcttggagaactgtgcgcaactccgaatctgcggaaaaatattgacagtgtttggtcagaaagtgtagaatgcggacaagagagactgcccgaaaacggcagtccacaacggacgaaaacgcagataaaggaggaattttccatgaaactgttcaggaagctcgcggccgccgcactggctggtgtgatggcactgtccctgctgaccggctgtgccctcggggatgccgcgaaagagaatgcgatgctgaaggcattgcagacggtgggcgatttgtatcaagtcaaggtctctgagagcgacagcttgagcaagaaggccagcggcatattcaaggcttttaagaacgcaaaggggaaagcttgggacatagatgagctgcggaagacggaaggctcttctgacatcagtacaagtgtgacctataaagaaactgattatcgggttatcgttctcaagatgccccaaaatgcaaaggattccacaaaatggggttatccggctgatgcgattctttatagttatagtcttaatagatgcatcgaaaaggatgaagatggcaacgacacgctgaaagtcggctttgatgtcatgaacgatgccaagctgaccgacacgcaggaaaaggccgaagactacatggtcgtctttgcaaagtgtctggacagcggcacgggcagcggctcccgaacctgatcgttttcggatgcgataactttctccaataaagaggcagcgccccggggccgaccgctccggggcgctgctgcgttttcagcgtttctgctgcttgaggcgggtcatgaagtcgtcggcttcgatggcctcgggggtaaagctgttgttgttccaccagctggcgagggcggcggcgacggtgaggccgctggaaatgagctgttccagctgggcgctctcgatgggcaggatgggcttgcccacggcgctgaggacctgattggtcagggccagagccagcgcagcggtgcgggccagagtggatgcggagatgttgtgatgagtcatagggagtacctctctttctgatttcatgatatgtgtgttgttgtcagtcggcttcccgcagcacgacagtgcccgcgaagatgagggtggtgtcgccgtcgtagtaggcgctgccgtgggcgatgtcgatgaagtcgttttcctccacccacccggcctccaccgagggcggatagaagttgttgacggcggacaggtacagctgatactccacgcctttttccagcggaaaaccgcccatgtcgaggacgacatcgttgtagcctcggatgagttccagcgagaggtccaccagcggggtggtggagccgtaccggcgcaggatggcccgcatctttccggccacaaagcctttgatgcggaattccagcgcgcggagcaggaggccgggctttttggcggtcaggggcatggaaaactcggcgtgggagggagcggcgtcccacgcggggatgctgccgctggcgtcgtgggccgtctcgatgcggtagacggcgggggtcacggtgacggtgcagccgtcgcttttggtgtcagagacggcggtgacgacggcggtgcccttcttgaggccggtgacgcggcctgcctccaccgagacgacgccctccggcgaagcgctccaaagcaccgtctggtcggtggcgtccgggggcgtgatggagacgctgagatcggcggagctgagccggggcagctccagagtgtgctggctcagagccaccttctggacggggatgatgtccggctcaggcaggggcgtgggcggcgcggtgtcccacagctttttcagggcggtcaggtcgtcctgtgcgctgctgccggtgtagctggcggcgtccagcagcttgagcagaagggctttttcctcgctgcccagcccgctgaggcggtcggcgctcacggtgtcgatggtcagtgcgccggtggcggcatccaccttcaccacccgcaccagctggcccgcctgcggcaggacggggcggggcgttgcccagacgtccagcgcgttcagccggaccgcgccgctcctgccgttgacgctcaggacagcgccctcgccgggcgcgtaggaggccgcacgctcggcagcggcctctgcttgttcggcatagcctgcggccagcgtggcgctggcagcggtctgctgggccgaggctgccgcctcgctggcgctctgcttggcgttctcctcgccggaggccgcccgcttggcggcctcggcggcggcgttggcgctggcgaccacccgggcgatgaactgctcgtagaccgagggcgtcagctcctcgcccccgccctcggtggggaggatgtcgtggacgtcatactggccgggccgggtgtaggcggtgtagccctcgccgttggcggcggccagcatccactcgccgctggcccagccggtgaagctgcggcccacccggacgcggcccgcttcgtccagctccaaaggctcggccagtgtgccgtcggcgtggcggatgtggagggtgacgatgcacccggcccactgccggggcagggcaaattccagccagtccacgccttcggccttctgtgcgcccagatgcagccggtggggctgggcgagaaattcggtgccgccgaagtcccgggcggtaatgttgatctgcatggtgaaaactcctttcgtttggttttgcatctggcctgattgtagcgcagagcggcaaggcgtgggagagtacacttttttatttggaatttggtgggttcggcattttgccaaacggcattttcggggagaaattaccccctgtttctggccggaaaataaggggaaaacagcccgtgatttgtgtcagaaatgggcctgtcaaggccggtttgacgctgcaaagatgctctgcgatactgcaaaaaacggcccggaaagcgcggaagaaatgttaaaaatatatgaacggataagagccgaaaattgcgaaaaaatcggagagaaaccattgaatttca

SEQ ID NO: 665 - DNA, 33913 bp, unidentified
  source 1..33913: mol_type = unassigned DNA
gcgctgaagtagccgataacgctgaacgtgagcgcaccgacaaagttgacaaacaggtcctgcatcgtatcatacaggcccacatccagatagccgccaagaccgagcgactcgccgttcacagccacgtccgtgatgttgtccacgaggatgggaatattgctgttcgtcgggtcgagcgtcacggaggcgaaggagtggatgatcatgtccttctgcatgtccatgtggaacaggtagtccatcgaaaactcgaaaaactcccacagaacgccgaccgtcatggaaaagcagaacgccaccagcgccagaaacaccggcgagagcttgaaatgctgcggtttgttgcggttgagcagatccaccatggcaaagccgaacgccgcgctgatgaagcccgtcgtcgtgtgcagcatggagtcccagtgcgggtaggtgatgaaatagctcttgagctcgccgaggatctctgccgcgaaaatgaagaccaggataatgatctccagcgtgctcggcagctcgatgcggaagttgcgctccacgaacctcggcagcatgaacaaaatcagcaccagcacacacacgaacgtgctctcatagttcttatggatgatcgtcatgaccatgacgccgataacgatcagacgcaggatccagtagacggccacgactgccggcttcggtttgtatttctggttttcctgctccatctttttcaggatcttcgggtcactcatatttctcctctttatcctcgtctatctgtttctctgtttggtttctctcaggctgtggccgtcggctgacgccggtccacgatccggcgcgccgcgacatagatgatcaggtacagcaccagcgacagcgcgagcgccgcaaacacgtccagaatggagtgctgcttgacaaacaccgtcgccgcgcagatcgcagcggcgatgatgaccgccgggatgcgcaccttttttaaatacttactgtcgaacgtcacggccagcacggccatacagccgaccacgtgcatactcggcaggacgttcgtcggcgtgtcggccgaatagatcgcattgaccagccagccgcacagcgtgctcgtgtccaccacggacgggcgcaggagctggcagttcggccagatcatgcagatcgtcagcgagatggaaaagcccgcaatgataaacgccgcatagcggatgaacgcgcggcgatcgtctttgagcagcgtcacaacgaccgggacgatcaaaaacggataccagagcacatacgccagaatgaaccccggcagaaaggggatcttgtcgtccagcggcagataggatacaaagcagccctccgtcgaaggcaccatgcgctcgaccagcgcaaaccagatcagataaatgggcaaatacagcaccaacagaacatatttatgttcctgaatatatttcttcattaaaccgtctccttatacatcctgcatcgaagcacccgcgcacaccgttcaggcgcttgcctcgatctccgtgatgcgccccagcaggcggatcagttcgcgggaatcctgctcacccagctgctcgagaacgcgctgcacgtgcgcgcacagcgacgcacgcgcccgctccgccgtctggcggccaagctccgtcaggtgcacaacgacgcggcgccggtcatagctgtcggcacagcggcgcagcattcccttttcctccagcgcgcgcagcatggccgccgtgcgcggcgcgctcacgcccaggacctcccgcagcacgcccggcgtactgcacccgccgtgctcatcgaggtagctcagcaggaagttttcgcccttcaggtgctcctgcacactctgcggtatgcaggaccggttcaaagaagtaaccgtcagcagcaattcctcagtcagtcgctgcaattgcatgaaccatcctccttttgttaaccccgttaatcagcatctcgtaatgttaacactccgcccggtgattgtcaaacctaatttatgggatttctgcgcttttgatccgatgcgttttttcactcgcagcaccactgccggacacataacgccgctctgtgaaaaaaatgcgcaaacgggaaaaaatttggcacatttgcaaaaggatgcaacattttccgcgtctcatgcattataattattgacgagtgattatcaatgtgttattttatgaatagattgtaaacaatgcaattttcacccacagcaaccgttcccaacgcactccctcgcgatctctttttatcgatcaccagctaatgtgaaaggcggatgtaatcaacatgaaaaaagcaactcatcgcaagcaggcactcatgattgccatcttcttgctggcattcacgctgtcgctgttttcgttcggcacgaccccggcggcggccggcgacgtggcgggcgtgagcacgcacctgtttttgacagtcttgcgcgactatgaccacgatgcggccttctccgtgacctacacggacgcgctcggcacgcacacgaagccctatcatgccggcatggaagtgacggcgtggtcccccgtgaccatcacctgcaccaaccaccatgtccacgactggagcattgatgcggatgtgcaggaggccaccatcgtcggcgtcggcgggatcacctaccccggcggcacgggcatccatgtcaagggcacgaataccatcaaggcgtttgccacgaacttcggtctgcactacatcaatatcgttgtcatcctcggcgagggcaatgataacggcggcgacaatggcggcggcaacaacggcggcgataatggcggcggcaataacggcggtgataacggcggcggcaataacggcggtgataacggcggcggcaacaacggcggcgataatggcggcggcgataacggcggcggtaacaacggcggcggtaacaatggcggcgataacggcggcggcaacaacggcggcggcaacaatggcggcggcgataacggcaacggcaccgaccccaacaatccggacgggaatggcccggatggcaacaatccggacggcaataatccggacggcaacaatccggacggcaacaatccggacggcaataatccggacggcaataatccggatggcaataatccggatggcagcaagtcgaacacccccaagaccggcgacacacgtctgatctggctggtcattgcgctggcagtgatcttcgtggcgaccttcgctgcgacctactacaaccgcaggaagagcaagcaccacggcgcctgatcttcactctcatgcagttaaaatgggcagcgtcaaatgacactgcccattttcttatcaggagttttgtatgaaaaaaaccgttctcatcgtgatccgcgtcgtctgcatcgtcggattcttggtctgtgttggcgtgctcggctggtactggcacagtgaccgcagcgaccgcgctgtcgcagaggcgctcgccgccgcgcacgacgcagccagtgcggaggccatggagcaggtgcgtgcagttgccgccgacaatgcggatacgatcggctggctgcggatcgacggcaccaacatcaacaacgtcgtcatgtttgcccccgacacgccgggcaagtacctgcacacggacttctacggcaagtggtcgtaccgcggcacgctgtatgtcgccgaaaactgcgatgtgcgcacggcagacaacatcctcatctacgggcaccacatgaaagacggcagcatgttcggctcgctgatctcctacaaggatgcggcatttcgcgctgcgcacccgatcgtgcagtttgacacgctctacgcctcccattcgtatgaggtcgtggccgcgatcgaaacggaaatccccgctgagggctctgacgcctttcgatattatgactgcgtcggcacggacccggagcagtttgcgcagtactgcacgtttatcgaacaaaaccggtgctatgacaccggcatcacgatccagcccggcgaccggctgctcacgctgtccacctgcgcctaccacacggcgaacggccgctttctggtcgtggcgcggcaggtcaactgaagaatatacaaaaaccccgccatccggtcggatggcggggtttttaacttggaaactcagttcagggcaaccttcgcctgctcgcacagagcggtgaacgcagcggggtcatgaatcgcagtctcggagagcatcttgcggttcatgtcgatgccggccagcttcaggccgtgcataaaggtggagtagttcatgccgttggctttgcagccggcgctgatacgggtgatccacagctgacggaagtctctcttcttctgcttgcggccgacgtaagcgtagcggccggacttcatcatctgctggttggccatcttatagtggcgggacttgttgccccagtagcccttggccaggccgaggatcttttttctatgtttgcgcgtcatcatcgcgcccttaactcttgccattgttgtttcctcctattgtgcggtcaatccttatttataaggaatcatttttctgatggtcgcttcggtagtcgcatccgcataagtggtggaacgcagacgacggcagcgcttggtatccttcttggtaagaatgtggctcttgaacgcatgggcacgcttgaccttgccgttcttggtgagattgaatctcttcttcgcgccactgtgagatttcagtttgggcattgtattttctccttccttggtttgcttacttcttattattggtgttctgcggctttggcgacaggaacatggacatattgcgtccctccagcttgggctgcttgtcgaggttggcaatgtccgcgcacttggcggcaaagtcacgcaggagctgttcaccgatattggtgtgcgccatttcacggccgcggaagcggatcgtcaccttcaggcggtcgccgccctgcaggaacttctggccgtttttcagcttggtgttgaagtcgttctcgccgatgccgggcgacatgcggatctccttgacttcgatcacatgctgattttttctggcttccttctcgcgcttggcctgctcgaaacggtacttgccgtagtccatgatcttgcagaccggcgggttggaacccggagcgatcttcacgaggtcgaggtccttcccctcggcaatctccagcgcagcggccgaggacatgatgcccagctgagcgccgtcagcgccgatgacgcggacttccttatcgcggatctcttcgttgatctgatagtttgcagttgcgatacgaacacacctccattggttgcatcgggagcgatcgctccgagaacaaaaaagcacggatgcaagacacatccgcgcgcataaaacacacatatctcccagacgggagcgggttttattgaccgcggaccgccttcgcggccgggtgaggctgcccagagggcgcccactttgttgtcagcttttatactatagcagtcccggcacgatctgtcaagggttttctgcgccgggcgagcaaaaaatgcggactgaatcccgccttccggggacatactcctccacggaggcaaagccatatgaaagtactcgaatacggcggtgtgttcaccgccggcggactgggctacggcgggctggagctgctctggcgcggccggacgcactggtcgatgctgctgtgcggcggcgtgtgcgccgtgctgatctatctgatcgcggggcgcgagcgcaccgtgctctggcggcgctggacgctgtgcgcggccgccgtcacgacggtggagtatttcaccggcgtgctggtcaacttgcgcctcggctggaacgtctggaactacgcagaccggccgctcaacgtcctcgggcagatctgcccgctgtattccctgttctggtttctgcttgccatccccggcgtgtggctggggcggaccgtgcggcaaaaactcgccgcccggcagactcagtaagtggtgtcctgctgttccggcgtctctggctgtgcagccgcttccggctgctgcggcgcggccgctgcctcggcagcctgctgctcctgcgccatggcgatcttcacgatgcggctggtgccgagccggtccgcgccgaggcggatgaactcctccgcgtcggcaaggcttgcgatgccgccggcggctttgacctttacatgcggcgggcagcaggtgcgcagcaggcgcacatcgtccgccgtggcgccgccggtggaaaagccggtggaggtcttgatatagtcggccccgctgtcggacacgatgcggcagagcatgcgcttttcctcctcggtcagcaggcagcactcaatgatgaccttgaggatgcggccgcggctgacctcacgcacggcgcggatatcggccgcgacatcgtcccagcagccgtccttgaccatggccagattgatgaccatgtccacctcgtcggcgccgttgcggatggcttccgccgcctcgaacgccttgacagccggggtgttgtacccattcgggaagccgatgaccgtgcagatgcgcaggcggtcgccgacatatttcttcgccccggcgacatggcacggcgggatgcacacgctggcgcaaccataacgcatgccctgatcgcagagggcgcggatctccgccgcggtggcatccacgcgcaggagcgtgtggtcgcagcgggaaagaatctctcgaagttccatgatcgttcgtcctttctgatgagacacgaaaaataggtgctcttattataccgcgtccggccgcattgcacaagacgcatattttccgccgccggcacataggctgtgttacccaacaagagaggtgcagcacatggacgaactggaacaaaacaactatgccgagctctgcggcacgctggcggcgccgcccgtgctgtcgcacgaaaaccggcaggagcgctttttcaccttcccgctcgagacgcagcggctgtccggcacgatcgaccgcgtgaacgtcgtcgtgcgcgagcggctgctggccgagatgccgctggaggaatcggcaagactgtgcgtgatcggcgatgtgcgctcgttcaacaaccgccgcgggccgggcgcaaagctggtcatcacggtgttcgcgcgcgacatttcactcagcgacgagccgtatgaccgcaacctgatcctgctcagcggcacgctctgcaaaccaccgaacctgcgcacgacgccgatgggccgcgacatctgcgacctgatgctggccgtaaaccggcactacggccgcagcgactacctgccgtgcatcacctggggtgcgcgcgcgtgcgagaccgcactctgggacgtaggcacgcgcgtgtccctcgaagggcggctgcaaagccgcagctacatcaaggtgctggacaccggcgccgtcgagcgtacggcgttcgaggtgtccgtgctcgacatctgccggctgtcggcgccggacgactgagcgcacataccggccaacaaagcgcgccccgcagatttttctgtggggcgccggtcattgtatagcgaaaaccactcgctaggcgagtggttttcgctatacaaaaaaacacaggagacgtttttccgtctcctgcgtggggattcacttttccggcacgatctcgatccagtacccgtccgggtcctcgatgaagtagatgcccatgccgggattttcaaagcagatgcagcccatggccgcgtgcttcgcgtgcgcggcgtccatgtccggcacggaaaacgcgaggtgaaactccccctccccgaggtcatacggctgcgtgcggccgcgcagaccggtcagctcgagctgaaacggcgagtgcccgtcgcccagaaacacaagtcggaacgagccgtcggccgcatccttcgtgcgcacaggctccagcccgagggcgtcatgataaaagcgcacgctgcgctcgagatcgaggacattgaaattaaagtgattgaaggtaaacataccgcgcctcccaaatacattctatctgtcccaagtatagcggctgcggcgcgcattgtcaaagcaaggccgcaaaaaactgttggaatttcatgccgggcacggtataatgatcgtgctagactgggatattggaggcgcgccatggataagacaggacgcgcgcccggctcccccatggagccggagctgcaggaatttcataccggcgcggccgtgcacgcttaccgcacgttcggctgccacgcgctccccggcgcggcggggcaccactttgctgtctgggcgccgcacgcgcagcgcgtcgcgctcgtgggcgacttcaacggctgggacgcggcggcaacgccgatggaccgcctgccggacggcacatgggtgcagaccgtggccggtctgcgtgacggggcgctctataaatacgccgtcaccgcccccgacggccagacggtgctcaaggccgaccccttcgccgcgcactgcgagaccgggcctgcgaccgcgtcgaaggtctgggcgctcgagggctacgtctggcacgaccggagctatctgcgccgccgcgcagcgcgcgatgtgtaccgcgcgccgatgagcatttacgaggtgcacctcggctcctggcgccggccggagaccggcctgccgtggtaccgctcggtcgcagacgagctggcggactactgccggacgatgcactacacacacgtggagctgctgcccgtgacggaatacccctacgagggctcctggggctatcaggtgaccgggtactacgcccccaccagccgctatggtacgccgcaggacttcatgtactttgtcgatacgctccaccgcgccggcatcggcgtgctcatggactgggtcccggcgcactttccgaaggacgcgcacgggctcgcgcgctttgacggcacgcggctctacgagtgcaaggatgcgcgcatggccgagcatccggagtggggcacgctcattttcgactacgaaatgccggaggtgcagagctttctcatttcgtcggccatgtcgtttttcgaccgctatcacatcgacggcatccgcgtggacgcggtgtcctcgatgctgtatctcaactacgcccggcgcgacggcgaatggacgccgaaccgcgacggtggcaacatcaacctcggcgcggtcgcctttctgcaaaagctcaacacgaccgtgctcacggcgtggcccggctgcgtgacggtcgcggaggagtcctccgcctaccccggtgtgacgaagccgccctatgacggcggcctcggcttcagcttcaagtgggatatgggcttcatgcacgatacgctcgactatctggagctcgacccctacttccgcaaataccatcacgacaagctgacgttctcgatgatgtacgccttctccgagaacttcatcctcgcgttttcgcacgacgaggtcgtgcacggcaagaagtcgatgctcgacaagatgtacggcacctatgagcagaagtttgccaccctgcgcgcgctctacggctatcagttcgcgcacccgggcaagaagctcacgttcatgggttcggaattcggccagttcatcgagtggaactacaagcagggacttgactggctgctgctcgactacccaatgcacaaggccatgcagcgctggtgcagcgcgctcaacgcctgctaccgcagcatccgcgcgctctgggacatcgacgacggctgggacggcttcacgtggctgaacgtggacgacgccgagcgcagcgccatcgccttcctgcgtacggcgcgcaacggccgccggctcgtgtgcgtgtgcaacttcacgcccgtgcgctatgaagattttgtcatcggcctgcccaggcgcggcgtgctgcgcgagctgctgtcgagcgacagcgaggaattcggcggctccggcgtgcacaacgcgcccgagatccgcagcgagaacgtgccgttcggcgcgctcccctactccgcgcgcgtgacgctgccggagcttgccgccgtatacttcaccttcacgaaccggtaaaggagggaacgccatgaaacccgaactgcgcgcagcgctggccgaaaagggccgctgcgacctgcccggcgtgctgctggcagccgccgagtgcgcgccgctggccaagaccggcggccttgcggacgtcgtcggcacgctgccgaagagtctggccgcgctcggctttgacgcgcgcatcatcacgccgtaccaccgcgtgatcaaggaaaaatacgcatcccaggtcacgcacctgacggatttttatatcgatctcggctggcggcatcagtacgtcggcatcgagcggctgctgctcgacggcatcgtcatctacctcgtggacaacgagttttatttcggcgaccgcatttatctcggcggcgaggccgagggcgagcagtatgcgtttttcgcccgcgcgatcctggaggcgctgccaaggctcgacttcacgcccgagatcctgcactgcaacgactggcacacggccgtgctgcccatgctgatgaaaacacagtacgccggcaggatgcagtcgcgcatgcagacgctgctgacgatccacaacatcgcctatcagggcaagttctcgttcgaatttgtgcaggacctgctcggcatcgacgcgcgctattacacgccggagttcatggagctcaacggctgcgcgaacctgctcaaggccggctgcgtctttgccgaccacatcaacaccgtcagcccgagctacgccggcgagattcgcacggtggcttacggcgagggactcgagggcattctcaacgcccggcagcaccagctgtccggcattctcaacggcatcgacaccgccgtctttgaccccgcgcacgacggcggcatcgccgcgccctactccgccgacgacctgagcggcaaggccgcctgccgcgccgcgctgtgccgggagctcggtctcgagatcggcgcgcacacgcccatcgtcgccatggtcacgcgcatgacgccgcaaaagggcttcgacctggtgcagtgcgtgctcgacgagctcatggacagcgaggacatggcgttcgtgctcctcggcacgggcaacgccgaatatgaggactttatgcgcagcgccgagtggcggcacaagggccgcctgtgcgcctacatcggctacgacgaggcgctgtcgcaccgcgtgtacgcgggcagcgattttctgctcatgccgtcgagcttcgagccatgcggcctgtcgcagatgatcgccatgcgttacggcacgctgccgatcgtgcgcgagaccggcggcctgcgcgacagcgtgcagccgtataaccggttcaccggcgagggcaccggcttctcgtttgccaacttcaacgcctacgagctggcggacacgatccgccgcgcgctcgcgctctatcacgacgatcatgacgcctactgccgcgtacagcggcaggccatgtcgcaggacttcagcttcacgcgctcggccgaggactacgcgcacctgtatctgctcctgctgccggaggacaccacgccgaagcacgacgcggccgacgaggccttccgcagcccgatcggcgcgctcgagaccggtgcggccgtgcgcctcgctttcgcggacacggaggcgctcgtgttcgacgccgccgtggagctctacggcgatgcgtacagcgacaccgtcgccatgacgcagacggccgccggctttgaagcggccgtgaccatgcccgccgcgccgcaggcgctgcgctaccgcttccggctcgcgtgcaacgacggcggcatccgctggctgtgcgccgcgccggacggccggcacgcccggctgtgcgacgcaccgggtgacggctggcgcctgacggtctatcgcgccggattcacgaccccggcgtggtttcgcaccggcgtgatgtatcagatcttccccgaccgcttcgcgcgcgacagctccgccaccgcgcagcgcggcatggagcaccaccgccgcatgggccagaccgtgcactgccacgccggatgggacgaacccgtcgagtggcaggccaacacgccggagggcgcatacgcaccggtggatttctacggcggcactctgcgcggcatcgccgaccggctgcattacctgcagaagctcggcgtgacggtgctgtacctcaacccgatcttcgagagcgcttccaaccaccggtacgacaccggcgattaccggaaggtcgaccccatcctcggcacgaacacggacttcaagaagctctgcgcggccgcggcggactgcggcatccgcatcgtgctcgacggcgtgttcgctcacacgggcgctgacagccggtacttcaaccgcttccggcattaccccggctgcggcgcgtacaacagccgcagttccgtctatgcgcgctggtacagcttcgcgcactaccccgacgactacaagtgctggtgggatttcaaagacctgcccgccgtcaatgccgccaatcccgactggcgcaaatatatgatcaccggcgagcgcagcatcgtcaagacctggctgcgcgacggcgcgtccggctggcggctggacgtggccgacgaactgccggacgatgtgctgcgcggcatgcgcagcgctgccaaagaaaccgaccccgacagcgtgctcctcggtgaggtctgggaggacgccgtgacgaaggccagctacggcgagcggcggcagtacgcgctcggcgacgcgctcgacagcgtcatgaactatcccctgcgcgacggactggtgacgttcctgaccgggcgcagcacggcgcgcgcgcttgccgacctgctgctgagccagcggctgaactatccgcggccgctgtactacgcgctcatgaacctgacggcaagccatgacgtggcgcgcacgcgctcggcgctggcgctggactttgacccccgcagccgcacgcgcgcggagcttgcggcgctcgagatcacggacgccatggccgcacgcggcgcgcagctgcaggttctggcggcagccgtgcagttctggctgccgggcatcccgtcgatctactacggcgacgaggccggtatgcagggcctgtgcgacccgttcaaccgcgcgccgctgcagatgtgcgacacgcagatgctgcagtggtacgcacagctgacagccctgcgccatgcgcacccggcgctcacgcgcggcgaggtcgccgtgttcgccccggcgggcgacgtgctgtgtgttctgcgcgtcatcgcgggcacgcgagacgccttcggcgaggaagcagaggacgaggcgctgctgctgatcgtcaaccgcgcggcgcacccggtgcgctgccacgtggagctcacctgccccggcgccggcctgtgcgaagagacaaggctggccttcgtgcgcagcgaatacgactgcgccgccgactgcaccgacgatacccacattgccatccacgacggcgtgggcgcatttgacctgccgccctatgccgcaaaaatctacagattggagaaccgacatggaactgaaactggatcgtaacaaaacctatggtctggcgctcgagggcggcggcgcgaagggcgcttaccagatcggcgcgtggaaagcgctgcgcgaggcgggcatccacttttccgccgtgtccggcacgtccgtcggtgcgctcaacggcgccatgatcgtcatggacgacctggaaaaggccgaaaacgtctggaacaacatccacttttcccaggtcatggacgtggatgacgaggaaatgcgccggctcatgaaccgcgacatcccgctctccgagctcaagagcacgctgcgcagcgtggccgacatcgtgcgcaaccgcggctttgacgtgacgccgctgcgcaactgggtcgctgaggtcgtggacgcggacaaaatctgccattccgacatggactttttcatcgtcacctactccctgtccgaccatcaggagctggagctcaaagcctccgaacttgacgaggacgaactgtgcgatatgctgctcgcaagcgcgtacctgccggcattccggttggaaaagcttggcggcaaatattacgccgacggcggcgtacaagacgtcgtgcccatccacgcgctggtggaaaatggctgcaaggacatcattgccctgcgcatcttcggcttcggcatcgaaaagcgcttccgcattccggacaacgtgcatgtgacgacgatcgggccgacggtcgatctcggcaacattctgaacttcgacgccgagcagagccgcaagaacatgcgcctcggctactttgacgcccagcgcgtgctctacggtctctacggcagcacgtattatatcgaccgcaccatgtccgaggacgcggcgcgccagcagctgctcgaatacctcgggacggatgatggctcgctgcgcacgttccacgaaaagacgctgccgcagatcgccaaggcgctcaaatgcgatggtgattactacgacctgctcatcgccgtgctcgagcacgacgcaaaggagcttggcatcgcgtccgagcgcatcatgacggacatggagctgctacaggcgatcctcagccagccggaaccgccggaggccattctgcccgcgcagggatctgacaccccggcggaaacggagccggaggccgccgatgacacgcaggccgccgcgcccaaagccgccgaagaagtcgcggccaaggccgccgagctgtcgcaggacattgaaaagcacatcaaccgtctcctcggcaagatacggccgcgccgcaaccggcccggcacggcggaaaacgctgcgccggaagccgacgcagacgtgccggaaaaagaatgaacgcaccggggcggccgcacggccgccccatttttgagctgcggagcgcccgaaaccggttggaaatcatggattttcacgggccgcgggtttccgcttgcaaatgttgatgatctctggtatgatgcttattagttagagctatctaacttacgaaaacaacctaatccatagcaaaaaggaagctgtcttatgcaaacattttgggggatcctgatcccgtttctcggcaccgcgctgggcgcggcgtgcgtgttctttatgaagaaagcgctcagtgacgccgtgcagcgctcgctgaccggtttcgccgccggtgtgatggtggcggcttcggtctggagcttgctgatcccggcgatcgagcagtcggcaggtatggggaagctctcgttcctccccgcctttctgggcttctggctcggcatcctgtttctgctcgcgctggatcacatcatcccgcacctgcacgcgaacagcgcccaggccgaagggccgaagagccgcctgcagcgcacgacgatgatggtgctggccgtgacgctgcacaacatcccggagggcatggccgtcggcgtggtatacgccgggtaccgctccggcagcgcgcagatcacggcggccggtgcgctggccctgtcgctgggcatcgccattcagaacttcccggaaggggcgatcatctccatgccgctgcgggcggagggcatgaaaaaaggcagagccttctgcggcggcgtgctttccggcgtggtagagcccatcggcgccgtgctgacgattctggcggcacagctcgttgtccctgcgctgccgtatctgctcagttttgctgccggagccatgctctatgtcgtggtggaagagctgatcccggagatgtcgcagggcgatcactccaatatcggcacggtgtttttcgccgtgggcttcagcatcatgatgatgctggacgtggcgctcggataaacaacaaaaaccacatccgccggtccgaatggaccggcggatgtggttttgctttcggtatctcttacttcgattccggcaggttttccgtcgcaaagagcgtgatcacgttcttcagcgtctcctgatcgtaatcctcggcgatcgcagatgcgttccagtaagcataatcgccctcgaaccagctctgcaggtcatcgagatcctccgcatagcggaactccaggtgataggtggtcgccatcgtgtccggagagaaggcaaagtaggtgaattcaccggagttttcgtcctcgctctgatagaaaatgaagccgttttcattttccttgtccagctttcgataagtgtgggagaaaacttccttgccctgcgcgtccagaccggtgatcttgtggccgtccatcacgaacttcgaaaccccgcccaggaaatagcagtcgaaggccatgctgtccggatcggccgcatatttttcggcagcgtctgcgccgtagatctttgccgtgcacatcccgagcagcttgtccgtggcggcgtccgcattgtcctcgcccaccagcggcgcggtggcatcatgccagatgctccggtaatccgccttcgacagctccgggaacagctccacatacgtcccgctgatggtcgtcaggtagtcatccgtgaccgtctgctgattggccgccgagggggtgttcgtgtccgctttggtctgtccgcagccgacgaccgacagcaggcagatcacgcacatcaaaaatgcagcaattctctgtttcattgtatacctcctgttattagttagtctcgtctaaccagcaggaagtctaccatattgtgccgccccgggctactccgttttggtttcactgctccgttttgacgcatgctttgcatgggcgcggtactgcgacggcgtcgcgccatagcgtgccttgaagcacgcggaaaacttactggcattgtcataccccgcagcctgcgcgatctgtgtcaccggctttgcgctgcgcaccagctccactgcggcctgttccagccggtactccttgatatagtgatacaccggaacgccatagacccgcttgaaaattttttgcaggtgggacaccgagatctcgtgctccgccgccagctgcgacagcgagacatacccctcccggtcggtcagcagatgatcccggagatgccgggccagctctgcctgcctgactgagcagtacgggtcggctgcggattcgcggggaacacggccgagcagcatcagcagctccagcaccttgagctgcaggaagccgggatccagataggcaatgctttcatacaattcccgaaacacgtgctcacagcgcggcccggccgggccgtatgtataccacttactgcccaggaggttgcgattgagcgcggaaaagtccacggaaagcgccggcgcgttccgcgcgatccagcgccgggcggcatccggagctacctccaggcagatgccttcgtaatagcccagcggaaagtgcgactccgacatcgtgccgtgcacgccgtcgtaacagctgatggccatatctcccggcttgagcagaacatgatcccgcagagaaaaccgggtctcaaagcgcccgttggcgcagaaattgatctccagcatcccgatctgcgtgcggatctccgtataggagcccatctccagccgcaggcacatggcgctcacaccgtccagcagcggatagaggtggatctctccgtttccgtccgcgttttcaaagccgccggcctgcccgtccgggccgaaagcggcggccgcctcgccatgatacacgatctcgatcacgcgcgctcctcctttccttgcgtactctgtcatgaggccgtcgggcggcccgccgggtcatctcagcgtacaggatcttcacattccccgcgcagcgtccggatcagcacggtataggagatgccaaggcaggtgcacatcgccgcataaatgcagaccaaaacggccggaatgcaaaaccacgcgctgactctgactgctagcgccacaagcgccgcaaatacgacccaactgagcacgctgcccacgagcatggggcggcagatggtctcgctgatcgccaactcctccgccggcgtgtagagccggaaggcgtgctcgctacggatgagcgcccaggcataggcgtcgtgcatggcgctgtcgatgtccaggccctcatagagcaggtggttgagcacgacgttcgtgcgcgcctcataacaggccgcgcgcgcccgcccggcctccgtcaggcaggggcggcgcgggtcgctccggtcgagcaggccctcgcgctcgagcgccatgaagatgcggctgaccttctgcttcccctcgccgagcacaccggcaaggcccgtgaccgtgcaggttttgggatcttcattgaggaagctgagtaggacgcgaagtttcagaatatcagtgattccggcataaaaggcttgactccttttcagatttgccccggaacagggcgttttgtgcccccaaaacgcagttagatacaactaatcatgcataatgtgccacatcggccccggtttgtcaagccagtgcgcgcaaaaatccgatcgcccgctcccgcgcggacaaagaaaagcccgggatccagcggatctcgggctttggaaacgatattcggatagatcagcgcttgctgaactgcggagcgcgacgagcggctttgaggccgtacttcttacgctctttcattctcgggtcacgggtcagcaggccggcagccttcaggggcgcacggtagctgtcctcgacctgcagcagcgcacgggcgatgccgtggcggatcgcgccggcctggccggtcacaccgccgccggtcacggtggcttcgacgtcgaacttgcccatggtgtcggtcgccgcgaagggctgacgcacgatgagcttcagggtctcgagaccgaagtactcatccagcggacggccgttgatggtgatgctgccggtgccgttcgggaacaggtgcacacgcgcgacggaggactttctgcggccggtgccatacatataggctttcttgctcgtataagttgccatgttctatttcctccttctcagcgatcccagacttcgggcttctgtgccgcatggggatgctcggcgccgcgatagatcttcaggcgcttgagctgccactgggcgatggtgttcttctgcagcatgccgcgcacagccagacgcatagccagctcgggcttgtccttcatgagcttcttgtactgcgtctcgtgcaggccgccgggataaccggagtgcgtgcggtagtacttctgctcgagcttcttgccggtgagcactgcctgctcggcgttgatgatgatgacaaagtcgccgcagtcaacgtgcggggtgtagtcggtcttgagcttgccgcgcagcagatcggcagcgagcgctgcggtcttgcccatcggcttgccggctgcatccagaacgtaccacttgcgggtgacggtgtccttgttcagcaaagtagtggacatattcgtgcctccaatttgaatgtgttgaaaaacattttgacatttttcaggcgcgaacgtagaataggtctcacattcgcgcttatcttttataccacaatcggtggtacctgtcaacggaattttgatttagatattacttttctctcaaaatctccgtttttctccgttttacgctcgaattcacagtttctattttcattttggaggtcccgctatgaatgacctgaacgcgttcaccggtctggtgcgccggtgcgtggaggattatgacatgatcgcgccgggcgacaccgtcgccgtcggcgtctcgggcggcaaggattcgctcgtgctgctcatggcgctcaacgagctgcgccggtactatccgaagccgtttgcgctcgaggccatcacggtcgagctcgggttcgacggcatggatttcacgccggtggcagagctgtgcgaaacgcttggcgtgccgtacacccgcctgaaaacggacatcaaagaggtcgtgttcgacgtgcgcaaggaggacaatccctgctccctgtgcgccaagatgcgccgcggcgcgctgtgtaccgcgctcagcgcgcgtggcatcacaaagctcgcgctcggccatcactttgacgacgcggtcgagacgttcctgctctcgctcgtgtacgaggggcgcatcagctgctttcagccggtgacacacatgacgcgcacgggcgtggatcagatccgtccgatgctctacgccggcgaggggcgcatcgccaatctggcgaaggcgctggcgctgccgatcgtcgaaaacccctgccccgaggaccgcggcagcaagcgctacgagatcaagcagttcatccgcaccatgagccagacctaccccgatctgcgcagcaaggtgttcggcgccatccagcgcgcaccgctcgacggctgggaaaaggcgcgctgatttttaggaaaagcgaaaacaggacaagcccgatgggaagatcccatcgggcttgtgttgttgaagtgaagtctcagaggacgttctggcagaagcgcatgatgatcgtggcggtctgcgcacggggggcgtcacccttcggctgaagggtgtccacgccgttggaattgccgacgccgaggatcaggccctgtgcgaccgcccaggacagcggcgtgcgggcataatcggaaatggagctgtagtccggataaccggtcaggtcagcggtatcgtacacgtccagatccagaacattcttggtgtagttatagaggatggtcgccatatcctggcgcgtaatggcatcattcggggagaacgtggtggggctcgtgccgttcacgacacccttctcgaacgcccagttgaccgcatcgacagaccagctgtcggtcacatcggtgaagggactggacttggcagccttcggagaaccggcctgacggtagagcatcgtcacgagctgtgcgcgcgtggtcgtgccgttcggcgcgatggtcgtcgcgctcgtgccgttcaggatgccgttctggatgcagtaatccaggcccttatgcgcccagttggtgtaggcgggcatatcggtgaagtgagcgcccgggcagacatgtgcaccggtcgagctgctcaccgggatgctgttgagcatcttggccagctcgaagaacttttcctgcagcatggcgtgcgtggacttctgcatctggccgaccatgttgatgtggtcggtgttgtcgatcttctcgatgtagttccagacgcccatcttggtgccggccttgaaggtcatcttgccgtcagcgccgacgccgtagttttcattgtacttatccgtggaattctcgtgcggacggatcgcggagcggacggagacgatgccgtcattctcccaccagtccggcgtgatgttcacatggccgaccgcgtagttgacgtgtctgcccatgtaggtgctgctcttgaccatcatcgggttcatgctggcattcggcagatagtggccggtcagcggttcacgatgggtgttcgagcaggcgacggagaagtaatagatatcatcctgcgccttggcatagccgttgagcacggccgcgccgtcgacgtcaaggtcatagacgctcaggtcgttggtgtgctgcgtccagatcttgctgttgatcacacggttgaagtagctggagtaagactcgttgggctggcgcaccagaccccactgatcgagcttgaagtccaggccgaagttgttctcattgacattggtgccggtaaccgcaccgatgatgcccatggcatactgggccagatcgccgatgttctgatagaccttcgtgtcatactggctgccgtcgtgcggcgtgcagagcgtcgtgatgctctcgatccagtggcggcactcgccggtgaacagtgggctgatatcaccgccgcggctggcgttgcgctcatcggcatcgccgttttccagcagctgtgcgagcatacggatcgtctcgccgcccatgctgtggccgaccagatgcactttcagctcactgtcggggttattcagctccggcagaacgcccgggaacgtgcggccatagcgcgcatggccgttggtggcggagtggtatgcgccgtagtcgaccgtgccgccgacgaggtaggcatacagctcacaggcacggtcccagttgctggcaacggggccgatggacggggtgtagaccttgtagccggcattgttgagaatgtcgcgcaggctgctgaagccgccccagtagttcaggccgagcacttccgtgccgccccaaccgaacaggccgtgcaccagcacgatcggatagtggttgccgctcgccgacaggagctccggcagatccgcgtccgtcagttcgtcagcagaggtcgcacgatcggactcgaagtccgtcgtatcggcaacgcttgctgcgaaaccgggcatgcaaagcaccatcgccagaaccagaacggtggcgagcactctgctccacgttttcttcatgaaaaatccctccaatagatttgggacagcatcgaaatctgtcccctttttatggttacactatattgccgctgcgagaaatgcacaatccccactgcggtacaaatgtaacacttttgcacatttcccagcgcttgatgaaacacacgtcaccattatgtgcgcccagatacagaatgcgtatggacaaaaaaagcctgccgtccgtgggatacggacagtaggctttgcactgcgggatcagatcataatgccgcgctttttggcctcgaaggtcagctcgtcgcggaagtcggggtgcgcgatggcgatcagctggcgggcacgctcgccaaggctgcggccgcgcagatgcgccacgccgtactcggtgacgatgtagtcgacatcgttcttgctcgtcgtgacgacggcgcccggggtgaggatggacttgatcttgctgatcgtgccgcccttggccgtggacgtaaaggcgatgaagctcttgccgccgcgggactggcaggcgccgcggacatagtcgatctggccgccggagccggacatgtgcttcgtgccgaccgactcggcgcagacctgaccgaagaggtcaacctcgaccgctgcgttgatagagatcatgttgtcgttctggcagatgacgtccggatcgttgacgtattcgaccggcaggatctcgacggccgggttatcgtcgatatagtcataaatgcgctgcgaaccaaaggcaaacgtcgtgacggtcttgccgcggtggatctgctttttgctgttgttgaccgcgccgcactcgataagctcgaccatggagtcggtgaacatctcggtgtggatgccgaggtcgtgcttggccttgagcgccatgccggtcgcgtccgggatcgcgccgatgccgagctgcaggcacgcgccgtccggaatgcgctcggcgatgaggccgccgatcgtcttgctcacctcgtcgagctggaccgggggcaggaccggcagatcgtggttatactccacgatggcatcgacctgcgaaatgtggatcagcgagccgcacaggccgcggggctgacggtcgttgacctcgaggaagatccgcttggtcttgtcgagcatggcgtcgatatacgagccgttgagcgccaggctgaagtagccgtggcggtccatcggcgcgacctcgacgcacacggcgtcatagtcgtactccgtgcggatgcgggtcgggaaatcgcggtaatatgccgggatgatatcggcatagccggcgttgaccgccttgcgtgccgcgctgctggaaaaccagctgtagccggtcatcttgccggccagcgtggggtcggtataaaactcgaacgggtacgcatcgagcagggcctgcaccttcacgcccgtaatatcgctgttgcggatgcgctccgcgattgcggtcatgatggccggcgtctgcgaggtcgccgtatccatgccgagcagccagccggactgcacctgctgggcaatcttatccggcgtcgtcagcttttcctgatacatcttctgatagtctgtcataatttgctctcctaaaacaaaaaatatgaacacatgggtacaaataatatacacgattcgaaaacgtaattcaagagggcgcaggggcgttttacgatcatcgcaaaaaatccgtcacattttcaggaaaatgagaggttttctcacgtgagaaagtatgatatgatattgtgagatttgtttgaattcttgaatgaatggatctttatcctctatttttcatgcggctctcattttttccggttacaatgagcaatgtcgcatcatgcggcgggacgctcctgccaattcaaaaaacaaggaatgatacgacaacatgacgatcacgattgtctgtgatattctgggcgaagaaaacaatggtaccacgatcgcctgcatgaacctcatccgcttcctgcgcgcgcaggggcacacggtgcgcgtggtctgcgccgatcaggacaaggccggcaatgagtgcttttacgtcgtgccggagctgaacctctacctgctcaacccgatcgtggagcgcaacggcgtgacgctgccgcgcctggaccgctccctgctcgaggacgcgatccgcgactgcgacgtcgtgcacacgacgttcgtgctgcagttgtcgcacacggcggtgaagatcgccaaggcgtataacaagcccatcacctccagcttccactgccaggccgagaacgtcacggcgcactttctgtgcaaggatctcgatgcgatcaaccgcggcgtctaccgcgcctgctaccagatggtgtatcagtattcggacatcatccattacccgacgcagttcatccgcgacacgtttgaggccgtcgtcggcccgacgaacggccgcgtgatctccaacggcgtcaacagcatgttcacgcccggcccggccaagcgcccggcgggactggaaggcaagttcctcatcgtctcgaccggccgcctgtcgagcgaaaagaatcaggagatcctcatcaaggccatcggccgctcggcccaccgcgagcagatccacctgatcctcgccggtgaagggccgcgtgaagagcattaccgtcatctggccgaaaaatacggcgtcgacatggagatcgcgtttttctcacggcaggacctgctgaatctgctgcgctgcgccgacctctactgtcaccccgccgaggtggagatcgagtccatcgcctgtctggaggccatcgcctgcgggctggtgccggtcatcgccaactccccgaagagtgcggccaaggcattcgcgctcgacgagaaatctctatttaaaaataaggaccccgaggatatggccgccaagatcgactactgggtcgagcacccggccgagcgcgcggactacagccggaaatatctcgagagcggcacgcagtttgaacagcagagctgcatgcgccagatggagcagatgctctttgacgccgtcgccctgtgcagtgagccgacatgagccgcaagaccatctattatcacgacccgctgcacgacgacttcgcgccgacgaacggacacatccggccgaagccgatcggtgccgactttccttatgagcaccccagcccggtctggcaggcgctcgcgttcgtcgtctaccggctgatcatgacgccgtttctgtttttgtactgcaagctcgttttcggcctgcggatcgaaaaccgcaaagtgctgcgcgagctgcccggcggctattttctctacggcaaccacacgaacacgctggcggatgccttcatcccgacgctgctggcgttcccgcgccgcgcaaacatcgtcactgcggcggacacagtctccattccgggcgtgcgcaacatcgtgcagatgctcggggccgtcccgctggccgacacgatcgacggcacgcggcagtttctggccgcgatccaccggcggctcgagcgccgccaggccgtcatgatctacccggaggcgcacatctggccatattataatggtatccgcccgttcccggacacagcgtttacctatccggtgcgcgagcaggtgcccgccgtcggcgtggtggtcgtctaccggcagcggaagctgctgcggtttctgccgccgtgcatcaccgtcgttgtcggcgagccggtctacccggacgcatccctgccgccgcgcagcgcccgccgggccctgcatcaaaaagtctatacattcatgtgcgataccgtcacccggcggcacagctatgcgcacatcgaatatctccccgcacaggacacacaaccggccgcgcaatgaccgcgccgcacgaccagaaaggtgggatcccgcttggcacatttgactgaagccgccatccaggatgcgttcctgaagctgctgtccgagcagccgtttgacaagatcaccgtaacgcagctcgtggacgagtgccagatcacgcgccggacgttttactaccattactccgatctgtacgagctgctcgataccatcctgcgccgcgagaccgagcgcgcgctcgatgaatttgaggccaccggcagctgggaggaatgtatgatctccgcctcccgcttcgcgcgcgagcacaagcgcgccgtgtaccacatctacacctcctcgcaccgtctggagctggaaaagcatgtggaccgcatttccggggaaatgatgcgcagctatgtggaggcacaggcccacggcttgcgcgtgagcgaggcggacaaaaagctcgtgtgcgacctctaccgcttcggcatcacggacattttctacgaatggctcgaaaacgggatgaaagaggatctcgaggcgcagatccgccgcctgagtctgctgttcaccggcaacatccgcgcctccctgtcccgggtgcagatcccggccgaatcgtaaccatccccggcgggcacagcagcgtgtccgccgggtccatttcaccagcaaaggagatttgtcatgccgattctcgatcatctggagccgcgcgctgtcttttcctgttttgagcagctgtgcgccatcccacacggctccggcaacacgaaagccatcagcgattaccttgttcgcttcgcagccgaacatcagctgcgctgcattcaggacgcgcacaacaatgtcatcatcttcgcgcctggcacgccggggtatgaatccgccgccccggtcatcctgcaggggcacatggacatggtctgcgagactgcgccggactgcacgaaggacatggcccgcgaggggctcgacctcttcgtggacggcgatacgatcggcgcacgcggcacaacgctcggcggggacgacggcatcgccgtggccatggcgctggcgatcctggctgcggacgacatcccccacccaccgctcgaggtcgtcatcaccgtcgatgaggagaccggcatgctcggcgcggccgcactggacgcctccgtgctgaaggggcgcacgatgctcaacctcgactccgaggacgagggcgtgctcaccgtcagctgcgccggcggcaacgtgtccgtgtgcacgctgccggtcacgcgcgcgccgttttccggcacagcgctgaccgtaacggtcggcggtctgctcggcggccactcgggcgcagagatcgacaagggccgcggcaacgcaaacctcctcatgggccgcgtgctgtacgccgtcggcgcgcacacgccgctgcggctcgtctccgtcgccggcggcctgaaggataacgccatcccgcgcgagagccgggccgtcatcgccgtggccgatgcagccgccgcgcaggcggcgatcgcggacatggacgccgcgctccggcacgaatacgcggccgccgacccggatgtgtccgtgcgcgttgacgcagcccaggcgcagcagccgccgatggacgaggcgtccacgcagcgcgccgtgtgcatgctctgctgcctgccgaacggcattcaggccatgagccgggacattccgggtctcgtgcagacgtcgctgaatctcggcatcctgacgacggatgcggacaccgtgcaggcgtcgttctgcgtgcgcagcagcgtgtccacgcaaaaggagatgctcgtcgcgcgcctgcgctgcctgatggcgcagctcggcggcacggtggccgtctcgggcgactaccccgcatgggaataccgcaaggactcgcctctgcgcgagcggatggtagcggtcttccgcgaacagtacggccgcgatccgaaggtggaagccatccacgcaggcgtcgagtgcggactatttgccgggaagctgccggggctcgactgcgtgtccttcggcccggatctgacggagatccacacctgccgcgagcggatgcacattgcctccgtgcagcgcgtctggcgctacacgctcgaggtgctgcgccgctgcaaataagcgaacatgcaaaaaccgccctgcaccgatcggtgcagggcggtttttctgttgggatgttacttgcgcagttcgtgctcgtcgctgcgcttgcgtgcggccacggccacgatgccggacagcgcgacgagtgcgatcatgttcggcagcaccatgagctggttgaacatatccgtcagctcccagaccagatcattggacaggcaggagccgaggaagatgaagataatagcgatgatggagtaggcaaggtttgccttcttgccgaagagatagttgacattgatgcggccgaagaggttccagccgacgatcgtcgagaacgcgaaaaacagcaggcagatagccacgaacgcattgccgagcgtatcaccgaacacgctcgagaacgcgagctgcgccatgttcgtcttggagatgccgtcgaccgcgccgtgggccagcgggccgttgccggcgtagagcgtggagatgacgacgagcgccgtcatggtcaggacgacgaacgtgtcgatgaacacgccgatcattgcgaccgtgccctgctcgtgcgggctcttgacgttggccagcgcatgcgcgtgcggcgtggagcccataccggcctcgttcgagaacaggccgcgcttggcgccctggctgatggccgtcttgagtgcgtagccgatgccgccgccgatgatggactgcggcacgaaggcgtacttgaagatcatgccgaaggtctccggcacgtagcggatgcgggcaaagagcacgatcaggccgccgaccagatacaggcaggccatgaccggcacgatcttctccgtgacggaggcgatgcgctgcacgccgccgatgaagatgaacgccgcgatggcggaaacgatcaggcccatgacccagctcgggatatggaatgcgttctggcacgcctcgccgatggagttggactgcaccatggagcccatgaagccgagcgccagaatgatcgcgaccgcgaagaaaccggccaggaacttgccgaagccgttcgggaacgcgcgcttgatgtagtacaccgggccgccgaggaccgtgccgtccgactcgaccacacgcgtctcctgcgcgagcaccgcctcggcatagatcgtcgccatgccgaaaaacgcgatgatccacatccagaagatcgcgccggggccgccgatgaggatcgcgccgcaggcgccgacgatgttgccggtgccgacctgcgccgcgacggccgtcgccagtgcctggaacgagctcatgccggatttgtgcttctcgccgttgagactgaactcgccgaagaagcgccgccagccctcgccgaagcagcgcacctgcacgaaccgcgtgcggatggtaaaatacagacccgcgccgagcagcagaatgatcagcacatagtctgacaggtacatgttgatggtctgcacgattttgagtaaggtatccatgttgtttctccctctgcattgaatttttgcaaagcaaaaagctgccggtcgttttgaccagcagctccagagaacaaacagcgcttgaacgcccgcacacatcgggcactcgctctgtccttttgcctgagagattcggctttcgccttgcaccttcggcacccgctttcatgcgggattctccagagttcctccgcctccagtctcggccgggccgatccttgaggtttcgacggatatttatttgattgcgtcgagtattattacatacacacgcagggcttgtcaagccccaacttcaaaaaaagtttacaaattgccggtgccgtacatcagcgccgtgagcgcgacgaccggagccgtctcgcaccgcaggatgcgctcgcccatggagcagatgtgcataccgagcttgcgggccatgtcggcctcgaactcggcaaagccgccctccggccccgtgatgatggccgccgatgcgatcggggacgccgtgtgctcgatcgcgtcgcggatcgtctcgcgctcgccggtctcgtacatgaacagcggcagatcggtgtgcagcgcgtcgttgagcacagcgacgaagtccgcctcatagcgcacctgcgggatgatgccgcggccggactgcttggccgcctcctcggcgatgcgctgccagcgctcgagcttcttttccatattgacggccttggccacacagcgcgtgcaggagaaaaacacgatctcggcggcgcccgcctccgtgcacttctgcacgagaaagtcgctgcgctcccccttcggcaggccggcaaacaccgtcgagcgcacagtgggctctgccttgcacggcacgacctcgatgacctcggcctcggcctcgtgctccagcgtctgtaccaggcggcacttatagtcgcgccccgcgccgtcgcagatgacaatgtcgtcgcccgcgcgcagacgcagcacgcggatgtggtcggcgtcgcggccgcggatgatcgcccggccattcgggaaattcgtacctgctatgaaaaatcgagccataatggtcgcctccgacggaaaagtctctgccgtgattatggcacacttcgcacgtttttgcaagccgggccatagcatggtgtgggggtatggacgatgcaggattccgtttttctcgataaccgcacatttcagcgcgtctggcagcgcgtggcgggcagcacaggtgcgcccgcagccgcaccaccggaggccgacacgctgaccgatctgcttgccgagtgcatccgcgccaaggcggccggggctgcgttttacacagcgctctcgcagcgcatccgcgccgggcggcagcagctgctcggcatcgcggcgcaggagcgggcacatcagaaggagctgcaggtagagtattttctgcgcacgggcgagcgctgcgtcccgcccgccgcctgcccgcgtctgggcacggccgcgcaggatctgcgctgcgtctatacgcaggagcttaagctggcggagcggctcgacgcggcggcgaacaccgcgccgtccccgctgcaccaaacgctggccgccatggcgcagcaggaccgctgccacgcccaagccgtgcgaaacctgctcgcctgtctgctgggctgagacaaatccgcacaaaaaatgcgtttctttcaaaatggtacttgactttatgacgaatcttgattataatgtgcaagctgacaacttaaaatgtaagcaacccgaacagaacgtggagaagtcgcgtagcctggtcgagcgcgcacgattggaaatcgtgtataccccacaagggtatcgagggttcgaatccctccttctccgccaaataagaaccgtaattttgatacaaagcgtatcggggttacggttcttactttttggcaaaaacggcgtgtttgcggcacttttgcacccagcggccccaaaagaaaacccggccaggttgttttcatggtcgggtttttgcctttgcgtgggcttcgtggtcctcgtaatcgttgaaagagcgtaaatcgttgaattacaagggcaatcgttgttttagtggggtattcgttgaattacagagataatcgttgatttacagcattccctattgataaaaggtgtgggaatttataatgtggtctcgctcaagtcgctgcctttttcagaatctcaaaggctgccttgatttttgccgccatcaatttcctgcgctcaatcaggaagtcctcgtaggccatattttcccaaccgtgaggcagagcgttctcctcttccataacacggatctgctcgtcagacaatccggcgcagacaatcggataatacacagacggagcatcatccaggatgtccatgttgtccttccagtcaatgaatgcgtagtttgccatctggttaatcttcgcatcagagtatccttgggacttcaagtaagccttcgggaaaaggtggtgcttttccagagacttgcggttaccgtctgttccgggctcgaacagctttgacacaagcagattgctcttggagaagagaatttttgcgttcataatgttcagcgatgccacataggcattccatgcattattacctcgtcccgaaacagccaggccctccgaaccgaccagggtgatgtcaaagtagtcattcgtcaaacgctcgtttactctggacaggatgaactccttgtactcatccagagttttgaggcttttgatggtattcagatggttttccaccgtagactcaaaggagcccgtgtacagcgaaatgagcgaagcatagaagaaccacagcgaggtaaggtgcatattctcattatacgatgcattgaagcggtgcttcgcaatcaaatacaaggcataggtgtagaatattgcgttgccagacagaatcaaatccccggacaaatatcctgcgttcatgatggctttgataaactcatgccagctgtgtacatcgaggacatccggtagtttctccttgagagtattgaaacgctgaacacgaagattatcatccacggcaccctttttatcaaagtcggcacctctgagcagtttatagccatacttcaaacgggctctgtcaaatgcatatgccataacaacgcggatgacatcctgcgctgacacggtggtcagctgattgtaagaggtcgttttaccttttgccggagcggtggaatccttgctgaattgctcaatctcacgacgtccatcatcccaatacaaggacaacaaggtgaggatgaagtcgttctgtttcagagaaacaccaccagagtttacacggacgaatatttcagagacatcctcttcctctgcggtggactttatgtcgaacacaggaagcgtatggcttttcagattgaccacactgttgatgcgatccgcaattaagccctgttcttcatctgtaagctcgggccctttggtggatctatagtcacccagtttcttgatgaaatcaccgatgaacttaaaggtgttcgtggaagtgaacaggtcactaatattataaatccattctgggtcgttcttcgtggcttggtaaccaacctcaaatttgttttgcagcgggcaataggagataacaatactcttctcatcgaactttgagttgataaccttcttgcccttcataacggcatagagcgaagtcaaacgctgctgaccgtcaatgatgacttccttgggtgagtcgtagctgtgggcatcgacaccgatggattttttcttatcaagagacggacactcccacagcataaggtagccaatggggtagcctctcatcatggaatcgaataagtcacgcacctttgaatctttccagatgaaggggcgctgtaattccggcagtccgagttcgcctgtgtcgatcttttctataagctgattgaccgtcagcgttgtattactgaatatttccggcatggattactctcccttcattttcaggaatccctgcttgaaagcatccgggaagatgaatgtcttttcgccaataccaaaggtgacacggatgtgtttctgcgctttgtcaatcttggtgaccgcaccttctccgaatgctttgtgcagaacaatggagccatccttaacatcgggtgcgacaaactcctcttgcttggctgccattttcgctgcagcagaggcagcaggcttgacaccatactgcgcggtaacggagggcttttcagcagcataatgattcatagattttttgaaagcctccctgctattcgacgcggagcatccgatagccgattccg

SEQ ID NO: 666 - DNA, 22136 bp, unidentified
  source 1..22136: mol_type = unassigned DNA
ccgcttattttctcttttcatccgcggcatttgcttgctatctgcttcggggcgcggtataatggatacaacaatgtgttctcacatcgttacggtataaagcaacgactttttaggaggagcgttatggaacactacaatccgatccttggcagcgaggccagcggccagaagttcatcacctgcggtgagatcatgctgcgcctgaccccgccgaactacgagaagatccgcatggcatccagcttcgaggccagctacggcggcagcgaggccaatatcgccttggctctggcaaaccttggcgtggacagcaccttcttcagcgtagtgcccaacaacagcttgggcaagagcgccgtgcgctggctgcgctccaacgatgtccactgcacccccatgattctgaccgagccggacgagaccccctcgaaccgccttggcacctactatctggagaccggctatggcatccgtgcctccaaggtcatctatgaccgcaagcacagcgtcatcaccgagtacgatttctcgcaggtggacctcgacgctctgctggacggcttcgactggctgcacctgagcggcatcaccccggcgctggcccccaactgccgcggcctcatcatcgacatgctcaagaccgccaagaagaagggcctgaccgtcagcttcgacggcaacttccgctcgacgctctggacttgggaggaagcccgcgacttctgcaccgagtgcctcccctacgtggacgtgctgctgggcatcgagccttatcacctgtggaaggacgaaaccgaccactccaagggcgactggaaggacggcgtgcccctgcagcccagctacgagcagcaggatgagattttccagcacttcatcgagcgctatcccaacctgaagtgcatcgcccgccatgtgcgctacgcccacagcggcagcgaaaatagcctgaaggcctttatgtggtacgaaggccacaccttcgagagcaagctgttcaccttcaacatcctcgaccgcgtgggcggcggcgacgcttttgccagcggcctgatctacgccatgctccacgattacaaggccatggatatgatcaacttcgccgtggccagcagcgccatcaagcacaccatccacggcgatgccaacattaccgacgatgtgagctccatccgcaacctgatgaatatgaactacgatatcaagcgctgagtttcgccccagcgcctccgtctgccgggaaccgaccattgcacgtcggctcccggcttttttatgccgcaatgcaaggcaagaaaataacggttccaagaaaaaagcagcgcccgcatggagatctcccggcgggcgctgcttattgtatgttgttagattccgaacgatttgcctaaacggaaggccgcgcagagcgcttctggcgttccttttccctgtacatccggtcgtcggcctcgcggaggaaggcgggcagatcttcgaccagcggctgccagaacgagccgatggcggcatcgacgccgtggcggacaagggcttcccggagctggtgcaccttgtcggcaaagtcctcctgcccgatggggcagcgcagcaccacgaattcatcgccgccgatgcggtatccttcgccggggaagacttcgtttagggcgtcggcagtgcggcggatgagggcatccccggcctcgtggccgaagcggtcgttgcagtgcttgagaccgttcaggtccatgtaaatgccgccgatctccgtcagcgccgctttctcccagccgctcaggtcctccatgtagcggttgcggttgaaaaggcccgtcagcatatcgatataacagagcttatacagccgctcctgcgtctttttctgctccagactgttggtcacgaagaactggatggaggacagcagcgtggcatcctccacatgctccttggggttgtccacccccagaataccggtcacgacatggtcccgcagcagcggcaccgccagcagcgtatgaatattctggggtgccagcacgtcatagatgagctggccctttttctgttcgaggtcgggcaggaagtagacgccctcccgctcgaacgcttcgatccactcggccactgcttccagcgggacttcctgcagattgtccttttcctcgctcacgccctcccgcaccgcctcgtgggtgttgacgatgacgttccgctcccggtccagttcgaagatatagctgcggtcggcggcaaagtaatcgctgatgacccccagcagctcgttggtggccttgtcgaggtcctgcccgccgggggaaagcttctccacgcagcggttcagcaccgtggcgatctccagcttttcggcgatctgggcccggctggtctccagccggagcatcgcctcgttctgctccttgatggagaccagaaacatcaggaccattgcaacgccgatggcaagatccaccagcgccagaccgtagtgtacgatctggatcgagatcgcgagcagcggcagcaccagataagaccccgttgccagaaacatgccgcggctgatgcgcgccctgtattgcagcagcaggctgccatccagcgccatggccaccacgggaacgatcatggaaatgggataccatgcggtgcggtggtagacattggacgcatcgaacgtataatacagcccggtgaactgggacacgaccaccagcgcaaggcccacacagcaaacggctcgcaccgccttcacccgcttgagggctgcgttttcctccggcgtcagaagcattgcacagatgtaatagtgaaaaaacagcagcgtcagttccacgagaaaaaagttgaaaaaattgctgatgcggaccatccagaaccccagcaggtccggtctgccccggaacaggttcgtcatcgcatcccagaacagcagaaccgatgtggagacctgcatccggtagatccagtcacgcttctccgtccgataattttttgtgatccagaagtacagactcgacaccgcacagaacagactgccccacaacagtagcacactgtttacgatctcgcggctcatccggtctcctcctttcatgcaattcttgaaatctacccttattgtacacgttttcccctacgattgcaatccgggcgcagaaaaggggctgttgcaaataactccctcagtcacggcttcgccgtgccagctccctctcggagggagccttggcgtaacggttagctgtgaaagcctccctctcagagggaggtggcatcgcgtcagcgatgacggaaggagttgttcaacagcccctttgtgttatgattccattaagacaggatcatccggtcgttggcgaactcaccgccgctggcgatctggaacttggccagcaggtcggagacctgcagcttctttttctcctcgccggagacgtcgtagatgatgtggccctcgtacatcatgatgaggcggttgccgtacttgatggcatccttcatattgtgggtgatcatcatggtggtcagatggttttcttccacgatcttggccgaaagggtcagcaccttgagcgcggtcttggggtccagcgcggcggtgtgctcgtccagcagcaggagcttgggcttgttcatggtggccatcagcagggtcagagcttgacgctggccgccggaaagcagacccacgcgggcggtaaggcggtcctccaagccgaggtcgaggctcttgagcagctcgcggtagcgctcccgctccgccttggtgatgccgatgcgcagcccgcgccgcttgccgcggcgggccgccagcgcaaggttctcctcgatctgcatggtggcggcggtaccggtcatggggtcttggaagacgcggccgatgtagacggcacactggtgctcgctcagcttggtcacatcgatgccgtcaatgaggatcttgccctcgtccacgggccagacaccggccaccgcgttcagcatggtggacttacccgcgccgttgccgccgatgacggtgacgaagtccccttcgttcagtttcaggttcaggccgttcagcgcggtcttctcgttgacggtaccggcgttgaaggtcttggatacgttctggatctcaagcattttttgcaccctccttcttcttggcggtgggcttggcaaaatacttgcccttccaatacggcaccgcgaggaacacggccacgaccgaagcactgagcagcttgaggaggtttgcgtcaaagccgagggtcagcaccagctggatgacgatgtagtagatgatcgcgcccagcgaaacggacacgagcttgagggcgaagttgtggaagatgcggccgaatacggcctcgccgatgatgacagcggccagaccgatgacgatggcgccgcggcccatgctgacatccgaaaagccctgatactggctcagcagcgcaccggacagggccaccagaccgttggacacggccagacccagcaccacgttgaggttggtgttgatgccctgtgcgcgggacatggcgggattggagccggtggcgcggatgccgcagcccagctccgtgccaaagaaccagtacagcacaccgatcagcacagccgtgacgatgatgaccatgatgatggggttgtgcagggcgaactccttgacccagcgcagggagatgagcagatcgtacttgtccacattgatggactggttcgccttgcccatgatcttcaggttgatggagtaaagggccaactgggtcaggataccggcaaggatggccgggatgcccataaaggtgtggagcagaccggtgacaaggccggtggcaaggccggccagcagcgcgatgaagagcgctgcccagacgttcatgccggagagcagacacatgacgcagaccgcgccgccggtgccgaaggagccgtccacggtcaggtctgccacgtcaaggatgcggtaggtcagatacacgccaatggccatgatgccccagatgaggccctgcgcacaggcaccgggcagcgcaccgggcagattggcaagtctagcaagcagttccaaaataaaacctccaaacgatacacttttttaggacaccaaagcggagaagagccaaaaaccgccctcctccgctatatttcaggtgtttatccgaggaattcagccctcgatggcctcgtagccttccggcacggtcacgcccagatcatcgcagatggtcttgttgtacttcttggtcacgctggtgtactcgatgggcatggtggagatatcggcctcgccggtcaggatcttagctgccatctcgccggtggtgtggcccagatcgtagtagctgatggacagggtcgctacgccgcagcccgcgcagatgccctcctcacccgcgaagacgggcttcttggccgggcggcagatgccgtccacgatgccggtgttggcggcaacggtgttgtcggtgggaagatagacggcgtcgttctcgtcggccgccttctggcagacggaagcgaggtcgttggagtcggagaaagcgtactgggtggcggtcacaccggcagcttccagatacttctgaacctcatccacctgatactggctgttggcctcagcggagcagtagagcagaccgaccttcttaacgtcgggcagccactcggtgatcatctcagcctgctgatccagcggagccagatcggaggtgccggagacgttgccgcccacggtgccgtcgaagtcggtcaggcccagcgccacgccgtactcggtgacggaggtgcccagaatggggatgctgttggtggctgcctgtgccgcctgcagggcgggggtggcgttggccatgatcagatccacaccggcggaaacaaagccgttggcgatggtggcgcaggtcgcggaatcgttctgtgcgttctggaagtcgaacttcacgttgtcgccgaacgcctccgtcagggcgtcctcaaagccctgcgtagcagcgtccagcgccgcatgctcgaccaactggcagatgccgacggtatagctctggccgtccgcagcagcggaaccggcagcggaggccacggaggaagccgtggaagaagctgcggcagaactggaagagccgccgcaagcggtcaaggctgcggcagcgccgcagacagcggcggcagacaggaacgaacgacgagtgattttacgcataatcattactccctcaattttacatttcgcggccacaggctgccgcgggaaagcgttttgacaagcggtttttctcgttccgctttacactcgtgaagtatagcacatttcctgcccgaatacaatccggcaacagcccaagttatcgatggaagtaattttatttatcagttttttcgatcgattcatgaaaatgaacgttccttcgcccttgcagtgcggacagtttttccagttctgcgtccaatccgcgcagattttcttccaactgaggcagaaagggcgcggcgaagtcgtaccgataataaagcgcttgccagagtttttgctgcatccgccggataaacaccggctcgaacaccgcttccagcgcctccacccggtcttccaacgccatgcacacctgcgcccagcgcacatccgtagcctcccgcgccgggatgtcgtaccgggccagatagtcccccactttggctgagatgacctgcccgccgcaggaggtcggctgcaaaaagtagctgacgctcccctctttggtgatctcctgcgccagcgggtagagcgcgcagaccagcggctcggcgtcatggatggcgcagcggctttgggtcaggaaggggcagttgttcccctcctcccgcaccggggccagccgcagcacgggcagacggctcactgccccgatggacgccttgcagaacgcccgcgccaccgtccggggcggcagacgcagccgcgccgcgatccgccacaggtcaaaccccgacagcacgatgtcctctcgcccccggcagcagtccccgcaccccgcgcacgcaaacgaaaacccttcgtcccgtcccaacagtggcacctcgcgcgtaaaatccacccgcccgcaaaggtcgagctgcgattgtttgagcatagagtggcctcctttggctcctgaaatagaagtttcccctattatacaagaaaaccgtccgtgtggaaacacacagacggcaaatgttttagaatccttctttttcggctgtcggctcggtcagaagctccgggcggtattctcgcaggatgttgacggctgctgctaccacatcatccgtcatctcggtgcgtttggcttccttttgtgcgttcgccagcgatttcgcaagcttttccttgcgggacgcctcggtgcgaatcttgaaatccgctgccaatttctgcacctcctgctcattcttgggcagctttttggtattcagaaactcctcataggcatcgcagtacagctccacttcgtcggtaaaggcgatctgcttgccgtggtccagccacaggatcttgttgcacagctcccgcacctgcggcaccgagtgggacaccagaatgccggtcacgccgcttttcaggatggacttcatcttatccccgctcttcttgcggaatgcgccatcgcccacgctcagcacctcgtccagaatcaggatgtccgggttgaccagacaggcaatggagaaggccaaacggctcttcatgccgctggacagctgtttgaacgggcggtcctgaaaattctgcaactccgcaaattcgatgatctcatcatatttttcgtccatgaatctgcgggtataacccagaagcgcgccgcgcaggtaggtgttctcgcggacagtcagctcgccatcaaaaccactggccagttccagcagcgcagccacgctgccgttgatctccatgtggccctccgtgggcaccataatgccggaaacggccttgagcagcgtgctcttgcccgcgccgttggagccgatgatgcccagcatgtcccccttttccagcgcaaaggacacgtttttatcggcccagaattcgtttacatggtacttgcccgacaagcggcgcaccacatactccttcaggccaatgtccttgaaatcgcccgtcatgtaacggatggataccccttttgcttcaatgatcgacatggtacccctccttacacataatacaggaacttatggttgttctttttgtagatcagcattcccatgcacatagctgcagccgcatagaacgcgcacagcagatggaagccgagcgacggaatattcccatccaaaacaataacacgaaagtacttgatgtagcaatagatcggatttaaaaggaaaagcttctgcatgacacccggaagaatatccaccgtatagaagatcgccgacatataagtcagcagcattgtaaagacatcatacaaatagctaacatcacggaaaaagacaaataaagccgaaagtacaaggccaataccgacattaaatacaaccaagcaaagaatcggatacagtaacattaaaaatgatacgtgaaacatcacaccatctatcagaacaaacaaaaagaaaatacacagcgtcaagctaaaattgattaaagcagaaacatttttggaaatcacaaacagatattttggaacgttgatcttactaaaaatatccgcgtttgccatcagcgcgttcataccgcccatcgttgactcacgaaaatagttaaagaccaagttgccacaaaacagataaatcgtataatgttccatgttgcttccgaaaaagtgggaaaagaccacagacattaccaacaatgacagcaatggtgacaaaatgctccatgccatacccaaggctgtgcgtttatatttttgcttaaaatctctcttgactaattcttcaaatatgaaccaattcttttttatatttttaacgatttcttccagcatgggttctccttaattgaagtttgcgttccactttttcataaaaatgaattatggtataccgaattccgttaggcaatgttctggattgtactgttcattcccgttctccttcaatctaactcagcacatcttttttaacttgcgccagagcgccttgacctcactcttttccttcggaacaacttcatccagctcataccgacagacgagctccaccaatgccctagcatgttcgtctgcttgtttcaactttggacttgtcaaatccggaaccatgaaattcagcatccatgccagatattcgggcgcatactcatctaaaagttttttgtcttgccagtaacgagtgatttcctctattatcaacaagtgctgccgcatcttatcatcttgttgatttttcatttttcccattagtgaatcttctcgataccagcgataattataaatttcatcctcaataaaggagaaattttcagccatggggaatacttccatttgataaatcaaatcctccccaaatcgagtaccctcataaaagcgaatgttattactactcagtagcttttttgaaaaagcttgtctccaaacaaatggcgttgagccaatcgtggaaaaaaggacctctggcttaaacgtatgaaaccgctgtgtcgatggatgcaaaactctttcataccacccatttgcctttggaacactcggaaacgtccttgagccaaagacaacaatatctgtatccgcttctaatgtttcaagccaaactctttcacaggcattttcttccagaaaatcgtcagagtcaagatacataatccacttccctgttgccgcattatacccagcattacgtgccgacgacagtccaccatttaacttgtgaataatatgaattcgtgcatccaacttttcatatgtatctaaaatctttccagactcatctgtacttccatcgtctacgcagatgatttcaatgtcatatagagtctgctgtatgcagctttctaaacatctcggcaaatattccttcacattataaactgggacaattatcgaaacctttgctgcaccactcatactccgagtacctttctcttgactttacccaaaagatttttcagcgtataaatgaatccatgctcccgatagcaatccatagcgcctctccactttcgccgcagtttttggccaaagctctctttcccataaagttcttccgtcagatcaaatggcgccccttctttttccgccaagcgccatttatgatataactccggattgcgaataatcgcttccaacatattccacttataccacggaaagtatttcttctcgcaatagccttccagcatatctttcttaaaatcttgggaagcaaacttaataaattctcgttgcagcggttcgctcagacgctcatagttccagatatagctgtcatatttcagacgcagccgtattccttccatttttcctttcagaaccggatgttccttcaggaaccgctccatttcttcgtattcgtctgcaatgcaatatactttacccggtgagtttatggatgatgtttcattatcctgccgataatgaaggaaacactcttccatcagctttgcccgttttgcgcagcaccacactttaaaattaaagcttgcatcttgataagacgctccgggcgtctcatgaaaccggattgcattctctcgaataaactctcttcgataaattgcagaccaaattgacggcttaatattaaagaattctgcctgttccatcgcggagcggaagtccgttgtcgggcagaaaacacggctgcacatcacttgcgaagcaatgggcgctggaatatttttttcttccggaattgaataataaaagtaaaatccagatttcaccacatccagacggtttacttttgcgcagttatacaatttctcgaacatatctaaatctgcatagtcatccgactcaacaattccaatatattcaccacaagccatatcaaaaccacggttcatcgagttgccatagccgctgttcggcttatcgataaccttcacacgtggatccatttgcatatattcctgaataattctcagtgaaccatctgtcgatccatcattcacacaaataacttcaatgtctttcagcgtctggttgataacgctatccaaacattgccgcaaatatttttctacattataaatcggaataacaatcgatacctttggtgttttcatcaatgaatcctcctcatttcctcatgcactctattccacttcctcagcaagcccgccatttcaaatccgttcctgcttcgggtaaaacgcaagtcccttccccacgccgcacaggagcacgccaagccgtttcagccggtgatcttttgcgcgggtcagcacccataaaaaatcacgcccgcgcttggcaatgtaataggcgatgccctttgctccctcgcggcggtaaatataggcttcgttgcggaaagccagtttatagcggcccagacgctccacggaatccaccgccagattgcttccgctgttgtttttcatagcatggacgactcggctctggcccaccacatagcacggtattttctcctgtatcgtgatgcgccgggtatattcgatatcatcaccccaaataaagaactctttgacgggcagacccactgcgcggatcgtttccgctttcaggaacagcgagacaaatgtcgcctgttccgccagcagaatgccatcccgcagcagctcgatgcggtcatagaagttcttcttgatcttggggcggttcatgcggcattccctgccgtccgtccaaagcgccacactgctcagccagccatactcgccctgcaaaagacggtctgcgtccagaagcttctccaaagccaccggttccgggaagcagtcgtcgtccatgacccagacgaaggcatagcccgcttctaccgcccagcgcatcccaaaattgaagccgccggcgccgccgaggttctcgcccgtgttccggtagaagatcgacgcatcgtgttgcgccgcacgctgcacaagggcttgggtatcgtccgtgctggcattgtccacgaccagaatatcacagggcatcgtctgcttttgcagagacatcagacattgccgcagcatctctgcgcgattataggtcacgaccactgccgcgacccgatcttttatttcgtccattggttttgtcatttttacttttacgtccagtttttccgaaacttgcgctcaataaatgccatgccctttttcagccaatgctggctttccatgaacaccaccggcatttcggtataggaaatatgattcgtctcgacccacacatccagcaaccgctccgaaagaaaaccgaagacgcgcttgttgtattcatcgtactccgacaggttgatctgccgctccgcacgatccagaacatcaaagagccatgtacagtagtgatccagcagatcccggcgcatgatgaacatattgaaccggtgccctgccgtccgctccatcacatcgtcgaacgcgcggacatactccgggtaacgctcttccagaatcgaccgtacaagatccatatcttttttatggtgcgcatgggcatactgcgaataggtcgtctcgatccagtaatttcgcttttgcggcaggatcaccggtgccttttccaatgcctcttcgatctgcgaacggttcgcgatccggctttccttgcggagcgcgaaccgctttccggcaaagtagcgccggtagtggaccagtccgatgcagtccgcgtccaaatttttccacgcccaatagagcgccgtcatctcgcaatagtacttgttctttgcggaaatattctccccggtatcgtcacgcagagcattttccattccggggatccggaccccgcccacctgaatgggtgcataaatatcttctcccggcagtgaatacgccttgtgcatcgccaccagtattttaattgtctgcattcctttatgttctccccaatcagtccgcacttctagcctcataacagtactattttagattatatcatgctttgggcttcctatcaagcccgaatcagcgttccagcacacaataaggaagcacaccatttttattatagatccccacagccaccagtgtttccaacgcaaaagccaccgtcagcgccgccgtcatcaatttgcggcgtttgaagtcctcttctgcccgcagtgcttccggcagaagcagaaactgcggtgctgcgtaatagtaattgacccgcttcatcagcggcagcacttcggaaaaagccagcgccaaagttccgaggagcgtcatgttataccagatcacgtaatacgggttctccaccttggctttggcccagtaatgaccgcagaaaagcagcacgcacagattgatggcaaagaacatccattcaaatccgtcctttgaccatgccgaaccgagatagcgggcatagtaagccagcccgacgcgcggcatgagccacgctgccagcgctcccagcggaccggagagcaccaatgtcacccccaccgccgcaaacgcacagcgaggcttgacctcgatgcggcagagaaaatagcacggcaaaagcagcaccgccgttgtgtgaaaaaacattgccgccgccacgcaaatcagaaacggaagcagccgccgttcccggatgaagcggacagcaaccagaccaatgccaattgcaacgtactgccggatgatgttcaggctcaaaaaataattactggtcgccacataaaggtagaccgccagcaccgggctgctgctttgggtaaaaatcgcatagaacacgcagcccgccacgagaatcgaagtgagaacgatcaccacgcggaagtttccattcagccaaacgcccagttccatcaaggcgcgataccccgcctcgctgttatccagaacgacgcgaaaaaattccgccgcttcctgcgtagttccgggcagcccccactggctcaaccatggcaggagcgggccaaacagttcatcccgcagcacctctcccccgccgccccggatccattgcagctcccggaactccggcaggtatgtataataaaagtctgtgccgacaccccagcgggccgcactcacgatcagcagcggcaatgcgcagatcatgttttgaaaaaacgcctgaagtgctgtttcctgcaccatctgagcctgtagtcttttttgtctgtgccatgtcaaaaggcaggacagaagcgttgccgccgtataaatcagcatcgtacctctccgatttttctcatattggatcacaaatatttctcttggaacatttttgccaaaaagaaagcccccgaaaggaaacgatcactcgttttctttcgagggttcgtccgcgttgcggatggtggaggcgatgggagtcgaacccatgtccgaaaggagttcagtgtaggtgtctccgggtgcaggcgatctacaacattcccgccgcgtcacgccgatcgtcaggctaacgctttggtagcttcatgagttcctgccggtccgcaaagcttaggtccgttcaggtgctgtgtctaaaggacgccccggccccacacgacacaagagtgggcggaacgcgcagcactcaggctgcgagcaactgataattgttgttgtcagttaattttttggaggagtttagagcaggtcccccgctgctacccgctgcccagacctcgctccccccgtcgaaacctttacgcccccttataacgcacaccttgtgatgtgcggaaaagcgaaaagatcctgcggcaggaagtctgcctgaatcaataatagacgccgttggatttaacggcccggtcgatggagcgctttgcgtcgcgcttggcggcgtcggcacgcttgtcgtagagctttttgcccttgcacaggcccacttccatcttgacgcggccatgcttgaagtagagcgaaaggggcacaagggtgtagccttgcagcttgcactgctggtgcagccgccggatctcgctcttgtgggccagcaaacgccgcacccgcatggggtcctgattgaagatgttgccgtggtcgtagggggtgatgtgcattcctttgaccagaagctcgccgttttcgatatcgacccaactgtccttcaggttgacgccgccggcgcggaggctcttcacctcggtgcccttcagctccacacctgtttccagcgcttccagaacaaaatattcgtggcgtgcttcacggtttgtggcgatggtcttcgtcgccggacgctctttggtcggtgccatgggcacgcctcccttctgctctggtatcgtcttgttagtatatcatatttttatggttttgcaaggcccgtttttgaagaaagtgtaaattcctcccaaaaatcaggccgtcacagttccccgcggccggacaaggcccggtacagcgtcgtttcgtcggtgtactccaagctggcacccaccggcagaccgtaggccagccgggtggtcttgatgcccagcggcttgatgagcttggccagatacatggcggtcgcctcgccctcgacggtggggttcatcgccatgatgacctctttcacctcgccgtcgcccagccgggccagcagctccttgacggtgagctgctcggcaccgatgccgtccatcgggctgatgaggccgtggagcacatggtacatgccgtggtactcgcgggtgcgctcaaaagcctgtacgtcgcggggggtctccaccacgcagatgatggaatggtcccgcttggcgctggcgcagatggggcacagctcggcctcggtgtaattctggcagacgcggcagcgatggagcttggtgtgggcgttctggatggcacccgccagcgcggcggcgtcctcatccgacatgctcagcacctgatacgccatccgggtcgcgcccttgcggccgattcccggaaacttgccgaactcttcgatcagcttttccagcggggctgcattataacccatgacgatccctcctgccggatcagaggcccggaatgttcaggccgccggtcagcttgcccatctcggcttccgccgtctcgtccacctgcttgacggtggcattgatggccgctgccacgaggtcttccagcatttcgatgtcatcgggatccacggcttcgggcttgatggagatgctcagcacctcgtgcttgccgttcatcttgacggtgaccatctcgccggaggcgctgccggtgtactcggcggcttccagctcggcctgtttggccttcatgtcatcctgcatcttctgtgcctgacgcatcagggcgttcatatcggggcggccaaaacctgcgggcattcttgctttcataatcgtatctcctttggattgtatctcaatttttagaaatccttcgtacaacctctcagtcgggcttgcgcccgccagctcccctagtaggggagcctttggcataaagatgaactaaaatcggctgccaaggcctcccctcattaggggaggtggcatcgcgtcagcgatgacggagaggtttcgcggaatcttcaatgctgacgtccagccccagctgctccaatttgtgcagcgactcctcggcgttggccgaggggcggtggacattcttcggctcgtatgggccaatgggcaccgccacgccggacacctgtgcgatcagctttttgatgagccgctggctgtccttgttggcgcggatgaaatcccggaaggtctttcctccgtcgatcagcacacgggtgccgtcgaaatagcccttcgacttcttcagataggtgtagagcatggggtctttttcttgcagcagcttgaccacctcgctccactgtggaaaggggttgatgccctccgccgccaccttgcggggcgtgttgagcttggggtctgcggggttcgccggggcgggtgccgtcggctgcggccggggttccggtttcggctgcggagccggtttttgctcctgcaccggctgggtgggctgggccggttcgttccacggcagcggggctgcgtcggcgaccggcggctcttccggcagcgggggcaggtcgtcctccacaggggctgggacgctttcctgcggcgcgggagccggctttgctggctcctctgccacgggtgctgccggttccggctgcgaggtcggaatggtcggctgctggaccggctccggagcgggcgcagtcggcgcaacgggttcgctggcaaagggctgcaccggagccgtcgcaaaaggacggggtgcctccggctggggagccgctgcgcgggccggtgcggcagctgccgcatacaccggctgctgggccggttccgacaggctgaacagggccaattccagctcgatccgctgatcgctgccgcgggtcatgtgctccaaggcgttgcccagcgtgcggatggcacggatggcctcccgctggcccagacgcggccccttttcgaggtactgtgcctcttcctccggcgacacaccggacagcagcgtctgcccgccgggcagcgccgccagcatcaaagcacggtaatgcgcgatgagttcttcggtcagccgcttcacgtccaccgactgctggcgcaattgggccagttgagccagcgccgccgccgcatcctgcgcctcgatggcgtccgagatgcggaacagatagctccggtcggtgacgcccgccatccggcggaccacatcggcgtccaccttggccgtcacgcccgcgcaggtgtccagaatggacagcgcatcgcgcatggcgccatcggccagccgggcgatcagctctgcgccgtcgccggtcagctccaagccctcctgcccggcgatgtactccacccgcttggcgatatcttcgggtccgatgcgggtgaaatcataccgctggcagcgggacaggatggtggcggggaccttctggatctccgtcgtcgccaagatgaagatcacatgggcgggcggttcttccagcgttttcagcagcgcattgaaggctgccgtggagagcatgtgcacctcgtcgatgatatatactttatattggcacgcactgggggtgtaggcggtctcgtcgcgcaggtcgcggatgtcgtccacgccgttgttggacgccgcatccatctccaccacgtcaaggatgctgccgttgtcaatgccgcggcagatctcacactcaccgcaggggtcgccgttgtgggggtgcagacagttgaccgccttggcgaagatcttggcgcaagtggtcttgccggtgccgcgcacgccggtaaacaggtaggcgtggcccactctcccggtggcgatctggttgcgcagcgccgtcacgatgccgcgctgggccaccacatcctcgaacctctggggtctccacttgcggtataacgcgcgatacatcccgcttctcccctttctgcaataaaaaacggacagcgctgacggggtttgacccccgccttgcgtagctcgacatacgaatgcaggctgactgaaacgcacggggcacaccgcttaaggctgcttggttccccacctgacctggttcacggcggccccatcgtacagggcccgcatccgtatgtcgaaccgcgcagcaggcgctgtccgacaaggcacaatttgtgcttgattattatagcatgtttccggggagattgcaagaggaaacgtaagccgccgcacgaggggagttttaccggcgagtatccgggggtggggacccgacgcgaagcgttggggagggcatggaatgccctttgactcgccgggaaaagctcccggagatgcggcagaaaaacttacagagtagcaaaaagcccctgccgggcataccgacaggggcagatcgcttgattcagagagactcaggactggcaggcagtgatcaggctcatcttatagacctcgtcggcattgcagccacgggacaggtcgttgatgggagcattcaggccctgcaggatggggccgtaggcagcgtagccgcccagacgctgtgcgatcttatagccgatgttgccggcctcgatgcaggggaagatgaaggtgttggcctgaccggcgaccttgctgcccttgcacttgacctgtgcaacttcgggggcaacggctgcgtcaaactgcagctcgccatcgacagccagctccgggtccatctcctgtgccttgatgacagcatcatggctcagggcgacggtaccgcccttaccggagcccttggtggagaagctcaggacagcgaccttcgggtcgatgccgaacagctttgcggtcttggccgtctcaacggccacctcagccagcttggaagcagcggagaccttgacctcaccggtggccttatcaatggtatcggtgtagtcgatgttgacagcgcagtcgcccatggcaatgcgcttcaggccctcttcgccgccctcgcggtccagaataaagcaggagctcaccagatgagcgcccttcttggtcttgaccagctgcagagcggggcggatggtgtcggcggtggagtaggtagcgccgcccaacagacagtcggccttgcccatcttgaccagcatggtgccgaagtagttggacttcttcagcagagcggtgcactcctcagcggtctgcttgcccttgcgcagctcgaccatggtgttgaccatctcatcgaaaccggcgtagttctccggatcaatgatctcggcagcggaaatatcaaaaccaccggcggcagcggcagccttgcactcagcctcgttgcccaccataacgaccttcagcacgccctcagccagcagcttgcttgcggcctccagaatgcgggggtcattgccctcggtaaaaacgatcgtcttggggttcgccttcagctgggctaccagcggtgcaaacatatcagccattgtgattacctccgaaattactttgcaatatgatagggcaccacagatgtgcccttcttttttattttagcacagagtctggaaacttcaagacaaatccgaaattttgtggtatattttgtaggaagaaatcccgcgatcagttgttaagaaattgtcatttagtttgtgagaggtttaacgaaatatggattgggaaacactccgggccaactgcctttcctgccgcagctgcggcctgtgcgagacccgcacgaatgtggtgttcggccaaggctccgaacacgccgaggttctgttcgtcggcgagggccccggccagagcgaggacgagcaggggctgcccttcgtgggccgcagcgggcagcttttggataaatatctgttcgccatcgaccttgaccgcagccagaactgctatatcgccaacatcgtcaaatgccgcccgccgaaaaaccgcgacccgctccccgccgagagcgaagcctgtatgccgtggctgcgggagcagttccgcctgctgcggcccaagatcgtggtctgccttggccgcatcgccgcccagcggatgatccggcccgacttttctgtgaccaaggagcacggcaccttccttgagaagaacggcatcctcttcatgggcaccttccaccctgccgccctcctccgccagccccagaacaagccggaagcctttgcagacttcgtggcgctacgggataagatcaacgaagtatgtgaacatacctactaaagagcaatatggctgacccagccgcacgaggggagttttaccggcgagtatccgaggtggggccccgcttgcggggcgggcatggaatgcaacgacagcgaccgccgccagtggcggaagcagggagctgttgttggggccgcggccagcgagacgcaagcgaagcgaggcggctgctgggagccgcaacccgtgccggactcgccgggaaaagctcccggagatgcggccgtatcacttcgcctttgttttgcatatcctaaagcaaaagtgaggtgttttccatgacgaatcttcgaagcgattccgttgattttttccttggggccacgacgcccgccgggttcaagggctattttgaaccgctgcgccacgaaccggggatgcagatgtatctcatcaaaagcgggccgggctgcggcaaatcgaccctgatgaagcggctggcccaagcggcagaacagcagggccagcccattgaaaagatccactgtgccagcgaccccgacagcttggacggcgtggtatttctgcaaaagcacgctgccatcctcgacgccaccgcaccgcatgtggtggagccggatgcccccggcgcggacgagatcgtggtcagcctgtaccacaccatcgacgccgaaaaactggctgcccaccgggacgaggtgaaggccctgttcgcccggaacgcggcgctgcggggccgggcggcgcggtatatcgcctccgccgggagcctgatgctggacagccgccgggccgaggcgtgcagcgccaactttgaaaaggtgcgccgctacgcgaagcggctgtgcacccggatgctgccccgtctgccggagccggcccgcgccagcgaggagctgcggctgctgtcggccatcacgcccaaggggctggtcttcttccacgggacggttcaggcgctggccgaccggtacgtgatcttccgggacgactacggggcggtgtcccggctgcttctggagcttattcgggccgaggcgctggcgcggggctaccacatcatcacctgcccctgcgccatgcaccccgaagaccagatcgaccacctcttcatcccggctctgcggctggcctttttaacggataaccactggcaccccatccatatccccggcgttcaggctgtgcgctgcacccgcttccttgaccgggagaatctggccgggttccgcgcccgcctccgcttcaacgagcgggccgctgcagaactgctcgaccaagccgtcgccctcatggcccaagccaagagctgccacgatgagctggagacttactaccgcacctcggtggattttgaagaggtggagcggctgaccaaagagacagaaaaacgcattttgagtgaaacgtagcacttgccccggcgcgaaaaagctcccactctggggaagctgacagcgcgaagcgctgcctgagagggcaaggacgtgaagagtgaggtgacccctatgccgaccatccatctccccatccggcagttggtggaatttctgctccgcaccggcagcatcgacag

SEQ ID NO: 667 - DNA, 9153 bp, unidentified
  source 1..9153: mol_type = unassigned DNA
atgggaaaattcagtgtcaaaaaaccgttcacggttctggtggctgtcatcatggtgctgatgctgggcttcgtgtccatcagcaacatgcagaccaacctcttaccggacgtgaacacgccgtacctgatggtggtcacggtgtatcccggtgcgagcccggagcgcgtggagagcgaagtctctgacgtcatggaaaacgcgctgggcaccgtggcaggtgtggaatccatcacggccacctctgcggagaactacagccttctgctgatgcacttcgccgagggtacggatatgaacagcgccttggtcaaggtgtcaaacaaggtggaccagaccacctccagcctgcccagcagctgtctgtcgccttcgatcattgaatacagcctgaacatgaacgcctttatgactgtggccgtcagccgcgagggcagcgatgtgtacgacctgtcggatttcgtcagcgataccctcgtgccttatgtggagcgcaagggcggcgtgtccagcgtgtccgccaacggcctgatcgagaagatggtgcaagtccagctcagtcaggagaaggtggacgccatcaacgaacggctgctggaagtcatcgacgcccgactggccgatgcgcgggctcagctcgacgccgctgaggcccagatcgaagccggccgtgcggagtacaaccgccagttcaagaacttcaataagaccgtttccaacaccgtgatgcagcagtacagcggcgaggtcggcaatgcggtggagaccgtccgcaaacaggcacaggccctgctggacagcgtcaaccaactcatcgccgtggtgcaggagccggagatccaacaggccctgatcgacgtccgggacggcttgcagcgcgtcatggacaagttcaacgagacgggcatgaaggacatcgactccctgattgagatcgtggctgagctgcgcgagatcaccgataagttgaccaccgccttgcagcaattgcaggagcgcctgaacacggagaccggcaccgagggcagcaccgccaccgatctggtcgatgacctgcaggtgcagcagagcctgagcaccgtttacaacaccctgaacgacgtcatcaaggctatggacgatgtccccggcctgatgagcaccttctcggacgccttgggcacctattcccagcagcagctggaagcctatatgcagttcaccgaggcccgcgagatgctgaacgagtacgaaaagcagctcgaaaccgcaaagcagacctatgaggacgccaaggagaaggccatggccagctccgacgtctccaagatgctggacatcgacacgctggcgcagctcatctacgcccagaacttctcgatgcccgccggttacgtcaaggattccagcggcaaatcgtggctgctgaaggtcggcgaggagtacgacagcatcgacgatatctccggtgccctgctgctccatgtggacggcttcggcgatgtccgcctgtcggacgtggccgatgtggaggtcatcgataacgccgaggccagcttcacccgcctgaacggcgagcgcgcggccgtcctgaaaatctacaaaggctccagctccagcgccagcaccgtctcggacaactgcctgtccgcgttcaaggagctggaagctcagtacgacggcctccatgtagtcgtcctgtccaaccaaggcaactatatcaccatcatcgtcaagagcatcctcagcagcatgatcatcggcgcagcattggccatcatcgtgctggctctcttcctgcgggatatcaagcccaccctcgtggtcggcttcagcatcccgctgtcggtcctgttcgctgtggtgctgatgtacttcaccggcatggacctgaacgtcatgacgctggccggcctgtcgctgggcatcggtatgctggtggataactccatcgtcgtcattgaaaacatctaccgtctgcgcagccgcggcgtgcccgccgcccgcgcggccgtgcagggcacaaagcaggtgggcatgtccatcgtggcatccaccctcacttcggtctgcgtcttcctgccggtcgtcttctcgtccagcctcgtcaagagcctgatgcagcccatgtccctgtgcatcggctactgcctgatggcctctcttctcgtggccgtcaccgttgtcccggcggctgcctccaccgttctgaaaaaggcggagccgaagcagctcaagtggttcgacaagatccagaacaagtacgccaagagcttggagtggtgttttcagcaccgcgctctgccgctggtggcagcagtggctttgctggtcttctgcggctggcgggtcgtctccatgggtgtggagctgctgcccaccatcaccagcaatgaggccatcgtcaccctgaccaccaccaaggacctcagcaaggaggactcctacgccattgccgaaaaggccatcgacgccatgctgaacgtggacaacgtggaggaagtgggcatcaccaccgacacccgtgtggccggcatggatgtgggccagttgggtctgcccagcgccatcaccgacctgctgaacgccgccaacagctacggcacctatcaggtcaacgtcatgctgaacgagtccctctcctccacccagatcgaagcggcccgtcaggcgctggaagatgccctctccggcattgaggactgcaccgccaccgtcgagatcagcgggatgcaggagctgaccagccagctggccagcggcctgagcgtcaagatctacggtgcggatcccgataccatgacccagctctccgagaaggtcgtggagatcgtcaacgacaccgagggctttgccaacgccaccaacggtctgggcagcggcgatgccaccatcaatctgcagatcgaccgcgacaaggtccgctcctacggcctgaccgttgcgcaggtctaccagcagattgccgccaagctgaccaccaccaccacggcgcagaccccggtctccgtggacggcagaaccatgagcgtggagatcagcgacaacctcgatcccgtgaccaaggaaaacatgatggatatcacctttgagacctctgtcatgtccgccgacggcaccaccaccaccggcacctgtaagctgagcgacatcgcaacgtgggtcaccggcagtgcgcccaactccatcaccagccagaaccagacccagtacgtcaccgttacagccaacacgctggacggctacaacaccacggttcaggcccgtgagctggaaaagaagctggaggccttcgccctctccgacgagatgccggagggctgctccttctccatgggcggcgagtccgacagtgtcaactacatggtcaaggagatggtgcagtggatggggctggctctgcccttcgtctacctcgtcatggtggcccagttccagagtctgctctcccccttcatcgtcctgttcaccgtgccgctggccttcactggcggtctgctgggtctgctcctcaccggccagcagctgaccatgatctccctgatgggcttcatcgtcctgatgggcaccgtcgtcaacaacggcatcgtcttcgtggactacaccaaccagctccgaatgggcggcatggagcgccgcgcggccctcatcgccactggcaagacccgtatgcgccccatcctgatgaccaccctgaccaccgttctggccatgctgcagctcgtcttcagcaacgatatggccagccagctcatgagcggcatggccatcgtcatcatctgcggcctgacctatgcgaccatcatgacgctgtatgtcgtgccgctgctgtatgacctgctgttcaagaagccgccgctgaacatcgacgtgggcagcgatgacctcgacgatatccccgacgatgccgccgagtatatcgcccagtcccacgcacagccggaagcataattctcagacgacaaagccgtccactttggaagtgggcggttttttgtttcaacctctcagtctcgctgacgctcgccagctcccctaataaggggagcccttggcaaaaccggaaactctacctatacgccagagcctcccctactaggggaggtggcattgcggagcaatgacggagaggttgtacagagaaaaaactgccctgcgcaagcaaggcgtgtttttacgttgcaaaatgcccaaaaaatatctcgaaatattggctgataaatctaaaaagatgtccacacaggagacgtaaactgtgatataatcataattataaaggatataaccgagagtgtggtatccaatcatttcgaaaaaggaggcgaagccctatggcacagtttcgctccaagccctttggcgtgaccaagaatggcgaaaaggtcaacgagtacatcatgtcgaaccccggcgggctggcggtcagtgtgctgaattacggctgcgtgatcaaaaacatctttgttcccacaaaacatgggccggtggatgtcgtggtgggccacgacacctttgccgactatgaaaatgacttcaattcctccagcagtacctgctgcggcgcatttgtggggcggtacgccaaccgcatcgagaacgccgagttcagcgtgggcggcagaaagtaccagctggaaccgaacaacggcaaaaaccacttgcacggcaccttccctcgcaaaatttacgacgtcaaggccttcggcgataccctgctgctggagaccgagagcccggcgggcgaggatggtttccccggaaatctgaagatctcggtgcgctacatcctaaccgaggacaacgccctgcggatggattaccgcgtctcctccgacgccgacaccatcctgaacctgacgaatcacacctacttcaacctcgacggcggcggcgatgtgctgaaccagaagctgcgcatctacgcttcccgctatctggagggcaacaatgagacctgccccaccggcagcatcctgcctgtggacaacacgccgatggatttccgggcgggcaaggtcatcgggcgggacatcgacaccggctttgcccagaccaccatggtgggcggcggctatgaccactgcttcgtcatcgaccggggccgcggtgccagccagagcctctgcgcgtgggcgtccagcgataagaccggcatcagcatgaaggtctacaccacccagcccggcgtccagctctacaccgccaactttttgcaggactgcccctctcccggcaagggcggcgtcccgatgcagaaatatggcggctttgcgttggagacccagcacttcccctgcagcccttcccacccggagttcccctccacggtgctgcgggccggcaaggttttccgcgccaacaccaccctgcgcttcttcacaggcaagcagtgcgggaaattatgagctttgagggagctgccgctgcggctccctttccctttctcccatttgcacaaagggccgcttctctccatgtaaaatcggagaaaaatcttcttaaatcaaaaagttgaatttcaaaaaacaacaaaaatccatcttaataaaattccagatacttgattctgcatccaaaacgcggtattctttaggcagagcgcggggcacgcccgcatcggtattttggtgataagcgaggtactttgctatggcaattctggtttccggcggtgccggttatattggcagccacacctgcatcgagctgctgaatgcgggctacgatgtcgtggtggcagataactattacaatgcttctccggtggtgcttgaccgtgtcaagcagatcaccggcaaggacttccgcttctacaacgcggacatgaccaagcatgaggacgtggagaagatcttcaccgagtgcccggacatcgacgccgttatccagttcgctgcctataaggctgtgggcgagagcgtctccaagcctatcgagtactattacaataacctgaactgcaccctcgtcattctggatgtgatgcgccgccacaactgccacaacttcgtgttcagctcctcggccaccgtctacggcgacccggcctccgtgcccatcaccgaggacttccccgtgggcaagaccaccaacccctacggcaccaccaaggccttcaccgagcgcattctggaggatgtctgcaaggcggacccggagctgaacgtcgccctgctgcgctacttcaaccccatcggtgcccacaagtccggcctcatcggcgaggaccccaacggcatccccaacaacctgatgccctacatcgccaaggtcgccatcggcaagctggaaaaggtccatgtcttcggcaacgactaccccaccccggacggcaccggcgtgcgtgactatatccacgtcgtcgatctggcccgcggccatgtctgcgccatcaagaagctggagaccaagtgcggcctcttcatctgcaaccttggcaccggccacggctacagcgtgctggatgtcatccacgccttcgaaaaggcctgcggcaagaagctcccctatgtcatcgacccgcgccgccccggcgatatcgccgagtgctacgccgatcccaccaaggccaagaacgagctgggctgggtggctgagtacggcatcgaggagatgtgcgccgatagctggaattggcagcagaaaaaccccgacggctaccacactgtgaagtaaaaaaccaaacaaaacgcaaggctcgcctcgtccgctccgcgcggatgaggcgggctttttttcgcttcctgccttgacaacgccgggcagttagcatatattaaaactgtttctataggctaacaatttgtcgaaatggaaaggcagactgccatgacattaaaagaactgaagatcggcgaaagtgccgtgatcgatacggttggcggggagggtgccctgcggcagcattttctggatatggggctgatccccggcgagcgggtcacactggtgaaatttgcgcccatgggcgacccgatggaattgcagatccatgggtacgagctgacgctgcgtctggacgatgcggcccggatcgcagtcaccccggcggcgagtgccccggccgccgcccatgcccggcgggaaagcaaaatggtggagcatccgggtctcggcgagggcgggcgctaccacaccaagaaaggggaacacccggtgccggagggcacgactctgacctttgcactggcgggcaaccagaactgcggcaagaccaccctgttcaaccagctcaccggctccaatcagcatgtgggcaatttccccggcgtgacggtggaccggaagagcggcgccatcaaggagcacccggagaccgaagtcaccgatctgcccggcatttactccatgtccccttactccaatgaggagatcgtgacccgtcagttcatcatcggggaaaagccgactggcatcatcaatatcgtggacgccacgaacatcgagcgcaacctgtacctgaccatgcagctgatggaactggagacccccatggtgctggctctgaacatgatggatgaggtgcgcggcaatggcggcaccatccgcatcaaccagatggaagccatgctgggcatcccggtggttcccatttccgccgccaaaaatgagggcgtcgatgagctggtggatcatgccatccatgtggcaaaatatcaggagcggccgggccggatggatttctgcggcgaagaagatcacggcggcgcggtgcatcgctgcatccatggcatcatccacctgatcgaggatcacgccaaagcggcggggattccggtacggttcgcagccaccaagctggtggagggcgatgcccgcattgagcaggcgctgaagctcgaccagaacgaaaaagaaatgatcgaacacatcatcgtgcagatggagcaggagcgcgggctggatcgtgctgccgccatcgcggatatgcggttccacttcattcaccggttggtcgatcagaccgtcgtgaagcctcaccagagcaaggagcagctccgcagcagcaggatcgaccagttcctgaccggaaaatatacggccatcccggcattcgtggggatcatggcgctggtgttttaccttaccttcggggtcatcggcgcggggctgcagggcttgctggagaccggcatcgatcgactgaccgtccttgtggacgacgccctgacgtattggaacgtcaacgaggtcgtgcactcgttggtcatcgacggcatcttcaccggtgtgggcagcgtgctgagctttttacctatcatcgtgaccctcttcttcttcctttctctgctggaagataccggctacatggcccgcgtggccttcgtaatggacaaactgctccggcgcatcggcctttcgggccgcagcatcgtgccgatgctcattggctttggctgcacggttccgggcgtcatggccagccgcaccctgccctcggagcgcgaccgcaagatgaccatcctgctcaccccgttcatgagctgctcggccaagctccccatctatagcttgtttgccgttaccttcttcccggaccacgcggcgctggtcatggtggggctgtacttcctcggcatcatcgtaggcatcctcgcggcgtttgcgctcaaggggaccctcttccggggcgaggctgtgccctttgtgatggagctgcccaactaccgcctccccggcctgaagaatgtctgccagctgctctgggaaaaggcgcgggatttcttggagcgtgccttcacggtgatctttatcgcgaccatcgtcatctggttcttgcagaacttcgatccgcagctcagcttgacggcggacccgcaggagagcattttggcgctggtggcaagctgcatcgcgcccctcttcgcgccgctgggcttcgcggactggcgggtgtccacggcgctgatcaccggcttcatggccaaggagagtgtggtttcgaccttgaccattctgtatggttcctcggctgcgctgggggcagcgctttccccggcggcagcggctcccctgctggtgttctgcttgctgtacaccccctgcattgcagcggtggcttccgtcaaacgggaactgggcagacgctgggccaccgttatggtcgtgaatcagtgcgttgtggcgtgggtcgcggccctgatcgtgcggctcatcgcacgggtggtcctctga

SEQ ID NO: 668 - DNA, 9821 bp, unidentified
  source 1..9821: mol_type = unassigned DNA
atggacgatttccagtttttgatctaccgttccgcggaagaaggcgctaccgtcaaagccgtgatcaaggatgacacgatctggctgaccatcagtcagatggctcttctttttgataaagaagagtccaacctgcgccgccacatcaagaatatttttgacgacggtgagctttccgctgagaacagcgtgcaaaaaatgcacgttgatggcgtcaagcagcccgtcgccttctacaacttggatgttatcatctccgtcggttaccgagtcaattcccgccgggctacacatttccgcatctgggccaccggcatcctcaaagagtacatgacgaaaggctttgtattggacgatgagcggttgaaacagggcaaggatgctttcggaaaggattacttccgtgaattattggagcgcgtccgctcgatccgcgccagcgaacgccgtatctggcagcaagtgacggatatttttgccgagtgctgcatcgactacgatcgcaattctccgaccacaaaagagttctacgccatggtacagaacaaattccattacgccatcaccggccagactgcagcggagatcgtctacagcaaagctgaccataccaaagaacatatggggctgtccacatggaaaaacgccccggaaggccgggtgctcaaatccgatgtttccattgcgaaaaactatctgtccgaaaagcagatccgtcaattggagcggaccgtttccggctacttcgattacattgaagacctgatcgagcgggagaacaccttcacgatggaacagtttgccgccagcatcaacgagttcctatccttccgacgctacgatatcctgccggacaaaggcaaaatctccgcccgtcaggccaaagaaaaagccgaagcggaatacgatttgttcaaccctacccaaaagatcgtatcggacttcgacaaagtcttaaagcagctggctccgtaatgcgggcagcgcacgcatctactcatgcgtcgcttttttctacagcaaaaccccacccccggcgcagaaggttccgcgccgggggtggggttcatcctatggttctattttcgctcatttgagcatgcagtacacataaccggcggccgtgccgatattggcgaggcccagcagagcgccgatgggcgaagagaagtagacaagggccgaatcccggatcagggtgccgttgagggtggtgccatcttccgggtactgctccggatatgtcttctggatctggccggcgatggcaccgatgctggaaatgttcaggtaacccagcacagtcgtgccaaggccgcacaccgttgccatcaggccggtgatcgagccgctgctgatggcgttcccgacggttttcacgatgcccactgttgccagcgcacccatgccgatattgaatgccgtccggatccagctgcctttgttttcgccttcggcatcgccgcctgtggtatacgtcatttcctccatggtgaggagtgcataattttcaggatatatcaaagtcatcattgttctacctccagaatgatacggtacgaaggtcgtcttttcttttattatagaggcagtggaaacttctgtcaagagacgaaacttttccgtacagacgcaaaagcaccgcacagcgatggttttcacatcgtgcgcggtgcttttcaccagaagttcacttcttctggtcttcttgttcttttcgcagcttcttgatccgctttttctcgctttccacatggggccacggccacgagaagccctcgttctcgcggcaccacttgaccagcggggagaaagagaacgccagcccgaacaggtacagcagaacgtacagcaccgcgtccagcgtgaacagtgcatccagcgcggcaatgactgccatgatgcagcccgctttcaggaagaacaggccgttctggcggcagtattcggcaaagttctccgccttgaccgcctgtcggccttggtcgccccagacacgggggttcttcatgaccgaatagccgtagaagaccatcatcaggccgcaggtcaattgaaatccgaaaaacatagcgcacctcgtccgtgtttagtcgtcgtactcctcaaacaggggcttcatcatgggcaggaagtccagcgttgcaaagtagtcgcgcggggtctcggcgcggcggatgagacggtgggagccgtcctcgcagagcaggacctcggcgctgcgcagcttgccgttgtagttataacccatggccgagccgtgagcgccggtgtcgtggatgtagatcaggtcaccgatgtcgatcttgggaagcatccggtcgatggcgaacttatcgttattctcgcacaggccgccgaccacgtcatacttgtggtcgcagggggcattctccttgcccagcacggtgatgtgatggtaagcgccgtacatggccgggcgcatcaggttggctgcgcaggcgtccagaccgatgtactccttatagatgtgcttctcgtggatggccgttgccaccagtgcgccgtaagggccggtggtgaagcggcccatctcggtgaagatggccacatcgtccatcccggcggggacgaggatctcctcaaacttcttgcggacgccctcgccgatggccatgatgtcgttttcggtctgctccgggcggtacgggatgccgacgccgccggacaggttgatgtaggagatgtgggcaccggtcgccttctggacccggacggccagttggaacaggatgcccgccagctccggataataggcatcggagatggtgttggaggcaaggaaggcgtggatgccaaagttcttggcaccctttgccatcagcttcttatagctgtcgatcatctgctcctcggtcatgccatacttggcgtcgccgggcttgtccatgacctgaaagccttcttcgctcgcacccagttggaacgttccgcccggattatagcggcagaagatgttctccggcacaccggccacacggtcgaggaagtccaccatggtggcgtcgtcgaggttgatgtaagcgcccagctcataggctttcttcatgtcctccacgggggtctggttggaggagaacatgatgtcgccgccggtaaagccgcagacttcgctgagcatcagctcggtcagagaggagcagtccacaccgcagccctcttccttcaagatctggagaatgatggggttgggcagcgccttgacggcaaaatactcccggaagcccttgttccagctgaaggccttattgatgcggcggacgttctcgcggatgcccttttcatcgtagacatggaacggggtaggaacatcctgaatgatctcctgcgcctgttcttcggtcagaaacggtttcttttccataatatacttccctctcattttatagcgtcaccgccgtgcggtgcgggttcaggtcttgaggttgctgcgggtgggggtgaaggtgggaatcatctccgccagctgcttcaccacgccctcgtcgttgtgttctgccgcagcggtcagcgtctgcaattggctgtagaattcggcaaggtcgatctggcgcggcggagccacaaagatcttgttgtgctcggtgcggcgcatcttgtcctgctcctcgtccatcatcagctcttcgtagagcttttcgccggggcggaggcccacgattttgatctccatgttcacgcccggctcatagccgtaaaagcggatcagctgcttagcaagatccatgatcttgaccggctcgcccatatcgaggacgtagatgctgccgctctcggccagcgcaccggcctgcagcacgagctgagccgcttccgggatggtcatgaagtagcgctcgatgttggggtcggtcagggtgacggggccgccctttttgatctgcgcctcaaacagcgggatgacgctaccgtggctgcccagcacgttgccgaagcggacagccacacacttcatgtcggtgttgcccgcgaaggtctggatcagcatttcgcagatgcgcttggtgcagcccatgacgctggtggggttgacggccttatcggtggagagctggacgaaccgctccaccccgtgctcgctggcactggtgagcaggttcttggtgccaagcacgttgttcttgaccgcctccgccgggctgacctccatcagcggcacatgcttgtgggctgctgcgtggaagaccacggtggggtgataggtctcgaacacttcatcgaggcgctttttgtcccggatggagccgatgagcaccgtgaccgggatatcccggccgtacttctgctgcagctccatcagcagctcgtaggcacagttctcgtagatatcgaagatgagcagtttgccgggctggaaccgcatgacctgacggcagagctcgctgccgatggacccgccgccgcctgtgacgaggacggtcttaccggtcaggtagccggagatcttctcgatgtccagcgtgacctcctcacgggagaggaagtcggcggtgttcagttcgcggaatgcctcctgctgcggtgcgccggccccgaccagctgcgggtcgctcaagatctggaccgcgcagtgggtggagacacagaggtcgatgacatggttcagcttgctgccccccagcgtcgggatggcgatgatgatgctgtggatgttgtacttttcgcagatctgcgggatctgctccagcgtaccccgcaccggcacgccgtggatggtctggccgaacttggcgggattatcgtccacggcaacaacggggtggccgtagctttcgttggacttgcagacgttgatggcccacgcaccggcttcgcccgcgccgacgatcagcaccgggcggttggggtccttggcagggacgccgcgcatccgctcgccgatgggatggttcaggaagagccgccacgccagacggctcccgcccaccagcaaaaagataagcaccgctgccatcgcgttggcggagtcgaacagcacgccgtggatgaggccgtggttcacgaaatagacgatgccggtgggcacggcgatcatgccgccgaggcggatgagatcccgctcgcccgcgtacttccacaaggtcgagtacagcccgcccaccagaaagctgatgaggtaaagggccacgatccacggcagattatcatagagcagcgcccggttatggggccaccacgccgcttccaccgcaccatcggcacggagcagcagcgcaaagtaaaagctgaacaggatgagcgccgcatccagcaccaccagaatcgcccggcgcagccagacctgcggcgtgatttttttgatatccttcacaaaaagtcctctttgccttcggcgtcttgtccggcgccggtttattcgccacagcggcagaaaagagcctgttccgccatggtatccattgtattatactcgtttcccgccgctgtgtccagaagatttcatctttcgggcggatttccccgctttttccgcaccgaggatggcccgcacttcctccccaaggcccagcggccacgccgccgcagccccgacgagccccatcccgccgccgcccgcagccagcgcggcgagacggagcggcagctctccggcagaccacgctgccagcatttcccggaaaaccatccctgcccctgccgagacggctgccgccagcaccggagcccccagccagcgccacaccgccgggcgcaccccgctgacgcgcagcagccgcccggtgttcgccagacaggtataaacgctggacagcagaatgacgaagagaaagccccgcatcccgaagcggggcagcagcagcatgacccccgcaatgcggagcacagcgtcccacaggctgtagcggaagacggccttctgctctcccatccccttcattgcgccgtccaccatgctttcaaggtacatcagcggcatggccgggccgaggactgtcagataaaagcccgcctcggccccgttttctccgtacagaaggtctgccagcgggccgccccacacccagaacaccgcccccgccagcgcagagaagtaacccgtcagccgcagcatccggtccagcaaagccgaaagccgctttttctcgccccggatgtgggcttgggtgatctccggcatcagcagaacggataagctccccagcagcccgaagggaaaggtcagcagcggcagggccatacctttcaaattgccgtattgggccacggcggcgctgcggcccccggcggccagcagatataccgtcaggcacgcgggcaccagcatgttttcggcggtatggagcgcgctggcaaggcagcgcccgccctccaccggccacaggatctcccacagccgcttcgccgggtccgccgggcgtcgggcagggcccgcaccgaatgcggacaccgcctcctgccggtaaaacagggccatcatcccgcaggagacggcttcactcagggccgttgccgcgaggacggcggtgcatttgccgcccacgtccagcgccgcgccccggctcagggcgaaccagatggccccgatccggaccgtctgctcggccagttggctcaccacgttgggcgacacccgccgcctcgcaataaaaaagccgcgcagcaccgccgagactgccatccacggcatcccgaaggccgatacccgcagcgccccagtggcccggacatcccccagccaccattttgcggccaagcccgccagcccgaactgagcggccagcgctgcactgcccagcagcagcgccgcccccagcagacgcaccagcatcccccgcgcttcggcccggctgcggctcagctcctcggccatcaggcgggtggccgccaccgaaacgccggacgtcgccagcgtgacaaagagcgaatacaccgccagcaccaactggtacaggcccatcccctcgccgcccaaggcgttggccagccagatgcgcaaacccatccccgccagccggagcacgatgtccgcccccgtgagcaaggccgcgtttttcaggtagctctgccgcattgccgcacctcccccatcttcgcttttactatatgaaggcggctttgcaaaatatgagttgggccgtgggttgtttctttcctagttttatgatatgataggagccggtcaagactttttgtccaaacatcaacgaaggaggaaaggccgctgcccctgtccggcccggccttatgagagtatgagcgaagaatgtacccatgactgctccaactgcggcgcagcatgttcttcccgcgatgctgccccgcagcatgacgcccccaaccccaacagcagtgtcaagaaagtgatcggcgtcgtgtccggcaagggcggcgtcggcaagagcatgaccagcgccctgctggcctgtgctatggcccgccgcggctaccactgcggcattctggacgccgacatcaccggcccgtccatcccgaagctgttcggcatccatggccgggccatggccgacgagaagggctgctggcccatccagagccggatgggcatcgacgtgatgagcatcaacctgctggtggagaacgaagaggaccccgtcgtctggcgcggcccggtcatcgccggtgcggtgaagcagttctggaccgatgtggtctggaaggacgtcgatttcctgttcgtggacatgcctccgggaaccggcgatgtgcccctgaccgtcttccagagtctgcccgtggacggcatcgtggtcgtggcaagcccgcaggaactggtcagcatgatcgtggccaaggccgtgaatatggccgagatgatgaaggtgcccatgctcggcatcgtcgagaacatgagctatgtcgtctgccctgactgcggcaagcacatcaacgtcttcggcgacagccatgtggacgaggtcgccgccaagcaccacctgcccgtgctggccaagtgccccatcgacccccagttggcctccctgtccgacgccggtctgatcgagacctatcccggtcagtatctggaaggtgctgccgacgcctgtgagaagctgctgaagaagtaaagcaatcgatccttcccctgtctgtgttcctcttgagcacgcaggggatttttttatttgctttccgctcatttcatgatgcaatgatgcgctcctgttgggctcctatgcccccggtgaagcattatcgcaagtcaagaaattagcgcaacattcaaacagcatatttgcgatatgcaattcaacgttgttgctgttgcattaaaaagttgaattgctatagaaagcaagatgttacgcagtttttcgggagagcaaactgtttttgtgaagtaggttcatcttttcttctgtttttttgaaagattttctggttccgctctcttgtaaatccgtacagaaagctttataatggtaaagcgttctgtgatattgggacagaacgggtgaaagtataaatgggaaaaggagtattcgattatgttgacgaatgaatacctgaaacgtgtttatgatggtctggctcagcgcaatgcaaacgagcccgaattcctgcaggctgtccgcgaggttctggagagcatccagcccgtcgtggagaagcaccccgaatacgaaaaagctgccctgatcgagcgtctggtcgagccggagcgcatcatcaccttccgtgtgccttgggtcgatgatgcaggcaaggttcaggtcaaccgcggctaccgtatccagttcaacagcgccatcggcccctacaagggcggtctgcgcttccacccctctgtcaatcagggcatcctgaagttcctcggctttgagcagaccttcaagaacagcctgaccaccctgcccatgggcggcggcaagggcggctctgacttcgacccccacggcaagagcgacatggaagtcatgcgcttctgccagagcttcatgaccgagctgtaccgccacatcggtcagttcgtggactgccccgccggtgatatcggtgtcggcggccgcgaggtcggttacctgttcggccagtacaagcgcctgaccaacagcttccaaggcggtatgatcaccggcaagggcctgaccttcggcggttctttggctcgtaccgaggctaccggctacggcctgtgttacttcaccgctgaggctctgaagtgtatgcgcaacgacagcttcgtcggcaagaccgtggtcatctccggttccggcaacgtcgccatctacgcttgcgaaaaggcaacccagctgggcggcaaggtcgtcaccatgtccgactccaatggctatgtctacgatcccaacggcatcgatctggcttacgtcaaggatctgaaggaagtccgccgcggccgcatcaaggagtatgccgagacccacgagggtgcgacctatgttgccgattgcagcaaggtctggactgtcccctgcgacattgccctgccctgcgcgacccagaacgagatcaacaaggagtccgctgaggctctggtcaagaatggctgcaccgtcgtctgcgagggcgctaacatgcccagcaccccggaggccatcgaggtctacctgtccaacggcgtcctgtacggacccgcaaaggcagccaacgccggtggtgtcgcaacctccggtctggagatgagccagaactccgagcgtctgagctggacctttgaagaggtcgatgcaaagctgaagggcatcatggagggcatcttccacgcttcctatgacgcttccgttgctgccggttccgagggcaacctgatggtcggtgcaaactgcgccggcttcttgaaggtcgctaccgccatgatggcacagggcatcacctactaa

SEQ ID NO: 669 - DNA, 21832 bp, unidentified
  source 1..21832: mol_type = unassigned DNA
cggtcaataagagtagtaaaagtgtaattgctatatagactctcgtcatcccgtctttttgaatcatgcgaaaacagctttgctccggcctttttctgccggtgggctttgttcgtgtgcattcacagctttttgaaagcgcaggtctgcatcccagtgtgcaggacctgcgctttttgttttgccaaaaggagccaaggacggaggaagagtatgaacgagagcagaacgcggaccaagcttgaccagcgccgcgcgcccatttacgaggcgctggaacagttccgccagatgcgggtggtcccctttgatgtgcccggccataagcgaggccggggcaacccggagctgacggcctttctgggccagcagtgcgtgggcgtagacgtgaacagcatgaagccgctggacaacctctgccatccggtatcggtcatccgggaagcggaggagctggccgccgacgcctttggggcggcccacgcctttttgatggtgggcggcaccaccagcagcgtgcagagcatggtgctgactgcctgcaagcggggggatgagatcatcctgccccgcaatgtgcaccgcagcgtgctgaatgcgctggtgctctgcggcgcggtgccggtctatgtcaacccggaagtggacaagcggctgggcatttcgctgggcatgaagcgggagcaggtggaaaaggccatccgggagcaccccaacgccgtggctgttctggtgaacaaccccacctactacggcatctgttccgacctgcgcgccatcgtgaagatggcccacgacgccgggatgctctgccttgcggacgaagcccacggcacccacttctacttcggcggcgggctgcccgtctccgccatggcggcgggggcggatatggcctccgtctcgatgcacaagagcggcggcagcctgacccagtccagccttctgctcatcgggcccaatgtccaccccggctatgtgcgccagatcatcaacctgacccagaccacctccggcagctacctgctgatgtccagcctcgacatctcccgccgcaacctcgcactgcgggggcggcaggtgttccatcaggtcgcggacatggccgagtatgcgcgggaggagatcaacgccgtgggcggctactacgctttcggcaaggagctgtgcaacggcaactccgtctttgacttcgacaccaccaagctcagcgtgcacacgctggacatcggccttgcgggcatcgaggtctacgatatcctccgcgacgagtacgacatccagatcgagttcggcgacatcggcaacattctggcctacctgtccatcggcgaccgtccgcaggaagtggagcggctggtcagcgccttggccgagatcaagcgccgctaccgcaccgacggagccgggctgctcagtcaggaatacatcgacccggtggtggccgccagcccgcaggaggcgttctacgccccgaaaaagagccttcccttacgggagaccgagggcatggtgtgcagtgagttcgtcatgtgctacccgccgggcatccccattctggcccccggcgaacggatcaccaaggagatcctgaattacatcgagtacgccaaggccaagggctgcagcatgaccggccccgaggacccggacatcctgcacctgaacgtactggcataagggggaatgaaccatggaattttggttttcggaatttcacaccccggacgtgaaacacagcatccgggtgagcaaacagctctactccaagcagagcgactaccagcgcatcgacatctttgagacgccggagttcggccgggtgctgacgctggacggcaacgtgatgctgaccgagcgggacgagttcatctacgacgagatgatcgtccatgtgcctatggccgtccacaaagaggcgaaggatatcctcgtcatcggcgcgggcgacggcggcgtggtgcgggagctgacccgctacgaccgggtggagcggatcgaccttgtggagatggacccgcaggtggtggaggcgtgccgcgcctacctgcccggcaatgcctgccggatggatgaccgccgggtgcacatctacttcgaaaatgccctcaagttcatccgccggtgcgaggaggagtacgacctcatcatcgtggactcctccgaccccttcggcccttccgagggacttttcacccgcgaattctacggcagctgcttcaacgcgctgaaggccgacggcatcatggtcaaccagcagggcagccccttctacgccgaggacgccagcgccatgcagcgcagccacaaacggatcgcgtccaccttccccatcagccgggtgtatcaggcccacatccccaccttcgccgccgggtactggctgttcggctttgccagcaagaagtaccaccccatcgacgacctcgacgccgccgcatggaaagcactgaacatgcgcacccgctactacaccgcccggctccacgtcggagccttttatctgcccgccttcctcgaagagatgctgcgggaagtggaggaacactgatgcgacccaacattgaaaacttcatcggctgcgacagcagctaccgcgccgccagcatcgtgctgtacggtgcgccctacgattccaccaccagctaccgccccggtgcccggttcggccccgctgccatccggcacgagagctacgggctggagacctacagcccctaccagaacgccgacctgaccgacttcgacatcttcgacagcggcgacttggagctctgcttcggctccagcgagtcggccctttccgacattgagggccgcgccgccgagattctggcagacggcaagttcccgctgctgctgggcggcgaacatctggtcacgctgggggccgtgcgggctgcggtagagaagtacccggacctccacatcgtccacttcgacgcccacgccgacctgcgggacgactatctgggagccaagctcagccacgcctgtgtgctccgccgctgccacgagcttgtgggggacggccgcatccatcagttctgcatccgcagcggcgaccgcgccgagttcgactttgcagcccagcacaccgagctgcacaagttcgacttcaccggcctcgccgagctgacggaagcgctctgcgaaagccgggtgcccgtctacctgaccatcgacctcgactgcctcgacccctcctgcttccccggcaccggcacccccgaagcgggcggcgtgagcttcttgcagctgttggacgccatccgcaccgtggccaaggcgaacatcgtcgccgccgacctcaacgagctggcccccacgctggaccccaccggcgtttccactgccaccgcctgtaaggtgctgcgggagaccctcatcgcgctggacaagggctggcccggcttccaagcataacgcctgaaccaaaaacaacgcagcggctggggcgcagaccccagacacgctgcgcgatcaaacattataaaggagagacttaccatgagcaaagttctgatcatcggctgcggcggcgtggcttccgtcgccatccacaagtgctgccaagtgcccgaagtcttcaccgagatctgcatcgccagccgcaccaagtccaagtgcgacaagctggccgccgaactggccccgaagaccgccaccaagatcaccaccgcgcaggtggacgctgacaagaccgaggaagtcatcgccctcatcaaggcctatcagcccgacctcgtgatgaacatcgccctgccctatcaggacctgaccatcatggacgcctgccttgcgtgcggcgtcaactacatggacaccgccaactacgagccggagaacaccgacgacccggcgtggcgcgctgtttacgagaagcgctgcaaggaggccgggttctccgcctacttcgattacagctggcagtgggcctacgccaagaagttcgaggaggccggcctgaccgccctgctgggcagcggctttgatccgggcgtgacccaagcttactgcgcctacgccaagaagcacgagttcgacaccatcgacaccatcgacatcctcgactgcaacggcggcgaccacggctatgccttcgccaccaacttcaacccggagatcaacctgcgcgaagtgtccgcccccggcagctactgggagaacggccactgggtcgagatcccggccatgagcatcaagcgggagtacaacttcgacaaggtgggccagaaagatatgtatctgctccaccacgaagagatcgagtccctcgccaagaacatcccggaggccaagcgcatccgcttcttcatgaccttcggccagagctaccttgaccacatgcgctgcctcgaagatgtggggatgctctccaccactcccatcgaattcaacgggcaggagatcgtgcccatccagttcctcaaggcccttctgcctgaccccgccagcctcggcccccgtaccaagggcaagaccaacatcggctgcatcttcaccggcaagaaagacggcaaggagaagacctactatatttataatgtctgcgaccatcaggagtgctacaaggaagtcggctctcaggccatcagctacaccaccggcgtgcccgccatgtgcggtgccctcatgctgctgaccggcaagtggaccaccaagggcgtgcacaccgtggaggagttcgacccggatccctatctggacgcactggacaagtacggcctcccccgctccgagagccacgccccggctctggtggactgatgcggctggctgacacccgcccgcccttcgcggggctggcgaggctgccggaggaagccctcgcttccctgcccaccccctgctacctgctggacgaaagccagctgcgccgcaacggcgagatcctgctgggggtgcagcagcgcaccggctgcaagatcctgctggcgcaaaaggcgttctcgaacttcgacctctacccgctgctggctccgtacctcgcgggcaccgaggccagcggcctgtacgagagccgcctcggcaaggaggagctgccggacaaggaaaatcatgtcttctgtgccgcgttccgggccgacgaattcgacgagctgctgtgctgcgccgaccacatcgtcttcaactcgccccgccagctgaaaaagttcggccccgccgccaaggctgcgggcaagagcgtggggctgcgcatcaacccggagtgctctacacaggagggccacgccatctatgacccctgtgcccccggcagccgccttggtaccacccgcgcccagtgggacgccgcagcggaaaaagatcccgccctgttctctctgttggacgggctgcacttccacaccctctgcgagcaggacgccgacgcgctggccgcaacgctggacgccgtggaggcgcgtttcggcgacctgctgccgcagatgcagtggctgaattttggcggcgggcaccacatcacccgcccggattacgatctgcccacgctggagcgctgcatcacccggatgcagcagacctacggcgtacaggtctacttggagccgggcgaggcgtgggcgctgaacgcgggctatctcgtgacgaccgtcctcgacacactgcagaacggcgaaacgagccttgccatcctcgacatgtccgccgcgtgccacacgccggacgtcatcgagatgccctaccgcccgcccctgctgggcgccggggaaccgggcgaaaaagcttgcaccatccgcctcggcggccccacctgccttgccggggacgtcgtgggcgactacagcttcgccgcccccctcgcggagggtgacaagctcatcttcggcgatatggcgatctataccacctgcaaaaacaataccttcaacggaatgcccctgccccccatctgggccatggacgagaccggctcctgccgcgagctcgtgaagtttgggtatgaggagtttaaggggagactgggaagaatttgaataaaaatggccgtatccgaattctgcatgtgcagagaccggacacgatcgttttttggctctataataaatatcggggtcgggagaaaatcccggccccatttttcaaagagatggttattgtttcgggtattccgctttgatattgctggcaccggaaatatagtccatcgaaacattatagaactgcgcaaggatcagcagattatcaatgggaatgcgggtcttgccgctttcatagtcggaataggtgcgctggccgatatgcagcaggtcagcgaccctttgctgcgtcagagcgtgatcttcccgaatctcgcgtattcgctcattgtatcgcatgacctcaccaccttacacagtaagtataaggaaatcggaaagaaacttgacaaatagagttataaactctataatggacgcaaacatagagttatatactctaagaaggcagattcattaaactttagttgggaggaagcaaaatgttacagtatcccaaagagtacaaccttttgaatgaggaagagctggaatataccggcggcggcagcgatgctgactttatgttggcgctggcggcaggaggtctggcaggtgtgatcgtatcctcggtcgtttacatcctgaacggcgagaatatcagaaaccgaaaaaaggcagaaaatccggaaaagtatctgccggatacggatgccgcaaagcgcaagctgctggctgatgatagcaaggaagaacttatgacctctccgctgggggcgatctcgctggcggggtttgcggtatccggtgtgtgcattgcagtgggtgccggtatcagtatagcaaacatgttcgatggcctgaagagacagtaagggaggaactgatatgaaatatccagaaaactacacggctttgcaaacagaagagatggagtatatttcgggcggcagcgacgccaatgttgctctggtggggatcggctttgtgggcaacatcgtatgtgcgctggcatcgaatgcttatcggggagccatcagcaagaaactgaaaaaagaagatcctgagaagtatcagcccgcggcagatggaagcgtctggccattggcacaggataccctgaaaacttattttacttccgttggcggtattctgatcacatttggaaccattgcatcgttcggctgcattgcggcaggtacggttatgcagtaagacgatgccacagagcgcaggatcatcacttgtatataaaaacgggattcgctgaaaagcgtttcccgttttttctgtgaaatcccaacttcagtccttgcccgcgggggcggggtgtgttaaactggaatcaaaaggcgcgggccgggggaggccccggcccggcgctgtggaatgaaaaactaggggaggaactgacacgtgaaacatctcgctcaaattgcccgccgggcggcggcgctggtactggcggcggtgctggtctgcacgctggtgcccgcagcctttgcagaggaggagatcgcccacccgaccaccatcggcggcgcggacaccaccctcgtcccggtggaagaggaaaactgcctgagctggctcttcggctccaaagataagatcaccatgccctaccttaacatcaagggcaagggtctgcgccggaacgtcaccctcaacctcgtggactgccttgtgggcatcacttacaccgagctggggtctatcggcagcttcgtcagctcctcggcagcgcagcaggcgtggaaggcacaggctgtggccatccattcctatctgctgtaccaaaaacagtacggctcgtcggccaacgccctcgtctacacccccgtggaccagatcccctcttcggcgcgggaagccctgcgcaaggccattgagccggtgaaggacgaggtgctgacctacaacggctcggtcatcgacgccgtgtggtcggccagcgcgggctataacacccagaccggcgtttacggcacctgctccggccttgatgcgtggggcaccgacgtgccttatttgcagagcgtggaaagcccctacgaggaacagtaccacaacctcatgcgccggatcatcggcaaggattaccgctacaccgagtacaacgacagcaagaccggccagccctacgagagcgccgacaccacccacaaggatctcggcggctatgtgcagtacaacaccttcgtctccaacggccgcagctaccgctacatcggccagttcgtcagctcccgctactgcttcgatttctccgccgatgaaaacggcacgccggtcatgaattactacggctacggccacggcgtcggcatgagccagtgcggcgcggtgggctacgccagcgagcaggggatgaattataaaaacattctcaagcactactacaccggcgcctccatcagcacctccggcagctcgtccggcgggctgttcagctggctctttgggctgttccgctgaggaaaaccccggaaattcgaaggaattgtagaaaatcgcttctcaaatggggcggaatttggtatactatattagtttgtagtatcgcgggcagtcacaccccgcagagaagtggagaaatcagacatgcaattggagaaggaaaaggaatcgagacaggacgccgagcgctgccgtttgctggcccagcgcattgcggaggagctggttccggagtcagcggctgtgctgggggacgatgaagcctcctgcactgcgctgcaaaaggccctgcgcaaggcgggcgtccgggcaaacgagtggacggctgcagcggcccggcagcccgacctgctggtggtggaggaccccaccttcgtggaactgcccgcacaactggccgcgaaggtgctgctggtctgcaccgacaccaccgctctggccaactgggccgagcagctggcccagcgcggctactaccgcgatatgttctggcgcagcaagggccgcacccagcagtcggccctcttccgggccgcccaacccggcgctctggccgtggtcaagggctacgagcaggaactggacaccctgcgggaccggatggtgcgggccgaacggagctgcggcgaacaggccgccctcattgaacggctccgcagcgaccttgccctgagccgcagccatgaaaagcagttggaagagaccctcggcgaggtcacaggctcgaccttctggaaactgacgtggcccgcccgctatgtcgtcagcaagagccgccagctctggcacaccctgccgctcttcgtcttcctgcacgagctgcggaccgagggtatttccgggatgcgggaaaaggcccgcgcccgccgcgagtatgccgccctcttccccggcaagaccctgcgggcggatgcctttgcccccgtggagctgctggtgaagcagttcaatgcccagcccgctgccccgaagatcagcatcgtggtgccgctctacaacaccccgctggagttccttgaagagctgctggattccgtccagaaccagacctaccagaactgggagctttgctgcgtggacgccgggcaggacgccgccgtgggccagaaggtacaggaccgcgccaaggcggacccccgcatccgctaccagaagctcgaaaagaacgagctcatccccggcaacaccaaccacggcatcgagatggccaccggcgattacatcgccctgctggaccatgacgatatcctccacccctgtgcgctctggtacacggccaaggccatcgccgagcagggggcagacttcatctacaccgacgaagccaccttcgagggcagcgtggacaacgtggtgctctaccacttcaaaccggacttcatgctggacaacctccgctccaacaactacatctgccacctgaccaccttcagccgcgccctgatggagcgcagcggcggcggcgagcggatggagtacaacggcagtcaggattacgacctcttcctccgcctgaccgaacaggccgcgaagatcgtccacatcccccacgccctctattattggcgctccagccccggcagcacggcggcggacatctccgccaagacctactgcatcaacgcgggcatcgcggccctcaaggcccattatgcccgctgcggcgtcgcggtagacgaggtcagcctcatccccggcacgcccggctattacaagaccgattacaccatcgcccatccgggccgggtcagcatcctgatccccacctgcgaccacatcaaggacctcgaactctgcgtcgagtccatctatgaccgcaccacctacccagatttcgagctgatcctcatcgagaacaacagcaagcagccggagaccttccgcgcctacgagcggatggagaaggagcacccggacaacctccatgtcgtcacgtggcagggcaagggcttcaactacagcgccctgaacaacttcggcgagaccttcgccaccggcgagtatctgctgctgctcaacaacgataccgaggtcatcaccccgaactggctggaagagatggtcatgtacgcccagcagaagcgggtgggctgcgtgggtgccaagcttctctacccggacgataccgtccagcacgccggcatcggcttcggtatcggcggcgtggcgggccacctgcacaagtatttccccgccacctcggatggctacatgggccgcctgaactacgtgcaggacgtctacggcgacactgccgcctgtctgctcatccgccgtgcggtctacaacgaggtccacggcctcgacgagagctatgccgtcgccttcaacgatgtggacttctgcgtccgcgtccgggaggcgggctacaccaacgtcttcacccccttcgcccagctctaccactacgagagcaagagccgcggcatggaggacaaccccgaaaagcagaagcgcttccaaggcgaagtgctccgcttccaagcccgctggggcgacctgctcgccaaaggcgacccctgcaccaaccccaacttcgatatccagcgggaggatttcagcctgaagatcttgccgctggaatgagatggtcagtcccattgcaaaggagcattcattgaaactttcagcttgtatcgtcatctacaacggcttcgacgaggccctcaaggctgcgcagaccattttacagtatacccgccgctacccgctcaccctctatctggtggacaatgccagccccgacggcagcggggaaaagctgcgcgcagcggcggcgtccggtgcgctggcggcaggggcgggccaacaggtcgtcctccactgccgcaccgaaaacggcggcttcggcaccgggcacaacatggtcctgccagagctggacagtgacttccacttcatcctgaacccggacatccagctcacggcagacaccctcagcgaccttgccgactggatggcgcagcaccccgacgccgtgatggcccgcccgtccctcgtcttcccggatggcagcccccagcagctgccgctccgccggtgcgctctgcggcccatgatctaccggcagcttccctgcctcaagttctgggcgaagtacaacgatgcctacctcatgaaggacgccgacctgtccaaacccacctccatcgagttctgcaccggcagcttctccggcgtgcgcaccagcgcgttccgggccgtcggcggcttcgacgagaactatttcatgtacgtcgaggatgccgacctcacccagaagatgctcacgcagggcaaagcctacctcgtgccccagtatactgccatccacgcatggcaccgcgccgcccatcgcagcctgaagcccgccctctggcaggccgggaacctgatgcggtatttcaagaagtggggattcaggtggtaaaggttgtacaaagcagaagctccaccgagaaaataagcctaacacccccaatcaaaaatatttccagcaagaaagaacccgttccagaattttttccggaatcctccgttctttcttgctttttttgtgatttgatagtagaataaggtgtaaaactatctgcggcattcaacggcgggcggttttacacccactttgttgacagcggacgcagctccgctttgaatattacgcggttctcggcagcgagggcttcgtatagctgcacaacttttttcatttcaattaaaggagtgcgcaaattatgaaaggcattattctcgccggcggcgccggcacccggctttacccgctgaccatggtcaccagcaaacagctgctgccggtctacgacaagccgatgatctactatcctctgtccaccctcatgctggcgggcattcaggacatcctgattatttcgacccccaccgacacgccccgtttcgaggcgctgctgggcgatggcagccagtacggcatccatctgcaatataaggtccagccctctccggacggtctggcacaggcattcatcctcggcgaggagttcatcggcgacgactgctgcgcgatgatcctcggcgataacatcttctacggcaacggcttctccaagatcctgaagaacgccgccgccaacgccgagaacaagggccgctgcaccgtcttcggttactatgtctcggacccggagcgcttcggcatcgtcgagttcgaccagaacggcaaggtgctcagcgtggaagagaagccggagcacccgaagagcaactacgccatcaccggcctgtacttctacaacaaggaagtcgtcaagatggccaaggaagtgaagccttccgcccgcggcgagctggagatcaccaccctgaacgacatgtacctgaagaaggacgagctggatgttcagctgctgggccgtggctttgcatggctggataccggcaccatggacagcctcgtggaagccgccgacttcgtccgcatgatcgagaagcgtcagggcatcaagatcagcgccccggaagagatcgccttcaagtatggctggatcgaccgcgacaccctgctggagagcgccaagcgctacggcaagagcccctacggccagcacctgaagaatgtggccgacggcaaactgagatactaagaggaaatgcacatgaaaatcatcgttaccggctgcaagggccagctgggcaccgagatcatcaagcagctccgcgagggccgcagtgagatcggccccatccccgaaaagctgcaaagcgccaccgtcatcccggtggacctgcctgaactggacatctccaactacaagatggtggacgacttcatccgccgccagcgcccggatgtcatcatcaactgcgccgcctacaccaatgtggacggctgcgaggtgaaccacgacgcggccttcaaggccaacgccctcggcccccgcaacctcgcgcaggctgccaccaagaccggggcccgtctggtccatgtctccaccgactacgttttctccggccgcgagaacggcggcatcgcgcaggacgaggccaccctccccggccccatcagcgcctacggctccaccaagctcatgggcgagaagtacgtcgagcagttctgccaccgccacttcatcgtgcgcaccgcgtggctctacagctactacggcaagaatttcgtcaagaccatcgtgaacgcaggcaagaagttcggcaagctggaggtcgtcaacgaccagtgcggcaacccgaccaacgccgtcgatctggcccacgaaattctgcagctctgcgtgacccacgaatacggcctctaccactgcaccggcgagggcatctgctcttggtatgatttcgcctccgagatcatccgtctgtccggcgtggacgccgccgtagccccctgcaccagcgaggagtataaggccaagcaccccgaaagcgccgaccgtcccaagtggagcgccctcgataaccggatgctccgctgcaccgtcggcaatgaagtgcgggactggaaagccgccctcgcctgcttcttcgagcactgggatggggaaaatgggatgaagtaaacgggcaagcccgctggcagggcagcagtttcctagtttagcaacatctcgcagtggtgcgaggtccagctcgcgaaaaacaacaacattcaactttgaggaaaaatcaaattatgaaaaaatatctgatcaccggctgtgccggctttattggttcgaactttgttcactatatgctcaaaaagtacccggagatcctgctggtcaacctcgataagctgacctacgcgggcaatctggagaacctgaaggacgtcgagggcgatccccgccacgtcttcgtgcagggcgacatctgcgacaaggagctggtcgagagcctgttcgcaaagtacgatttcgattacgtcatcaactttgccgcggagagccacgtggaccgctccatcaagaacccggagatcttcgtccagagcaacgtcatgggcaccgtgaacctgctgcagcgcgccaaggaagcttggtacgacgccgaggcaaagacttggaaggaaggcaagaagtacctgcaagtctccaccgacgaggtctacggcgctctgggtgccgagggcttcttcatggagaccaccccgctgtgcccccacagcccctactcctcctccaaggccagcgccgatatgttcgtcatggccttccacgacacctacggtatgccggtgaacatcacccgctgctccaacaactacggcccctaccagttcccggagaagctgatccccctgatgatcaacaacgtcaagcaccacaagcagctgcccgtctacggcgacggtatgcagatccgcgactggctgtacgttgaggaccactgcaaggccatcgacatggtctgcaacggcggcaaggtcggcgaggtctacaacgtcggcggccacaacgagcgccccaacatcttcatcgtcaagaccatcatcgagcagctccacgaccgcctgaaggatgacggcatcagcgaggacctcatcaagcacgtcgccgaccgtctgggccacgaccgccgctatggcatcgaccccaccaagatcaagaacgacctcggctggtacccggagacccccttcgagaagggcatcgtcctgacgatcgactggtatctcgaccacgaggagtggatggagcacatcaccagcggcaactatcagaagtactacgaggaaatgtacaagaataagtaagcttgtacccgccctcagcgcataaaccaaaaggagcactcccctgcacgatgcaggggagtgctcctttgtttctatccggtgccccttaaccgaggctcacgcccatgcgtcttgcgacagtgagcagctcgcagccttcggggacattgcgggtcttgccggcgatgtcctccaagcggttggcggtgacgtggccgttgagcagggccacggtgacgccgtagcgctcgatctccacgagcttagcggcgtagctgccgaactgggtggccagcacgcggtcatacgcgctggggctgccgccgcgctgcatgtggccggggatgcagacgcgggtctccatgccggtcttcttctggacggcggcggcgatgcggttggtggcggtggtgtagcccgcctcggcgcgcttggcggtccactccttccgcttcatcttggcctcttcctcgttcatggcaccctcggccaccgcgatgatggagaagttggagcccttcttggcgcggcgctctacggcgtcgcagacgcggtcgatgtcgtagggcatttcgggcagcaggatgatatccgcaccgcccgcgatgccggagtagagggtcagccagccagccttgttgcccatgatctcgatgcacatcacgcggctgtggctgcctgcagtggtgtggatgcggtcgataacgtcggtggcgatgtccacagcggtatggaagccgaaggtgacgtcggtgccgtagatgtcgttgtcgatggtcttaggcaaaccgatgatgttcagcccctcctgcgagaggaggttggcggtcttgtgggtgccgttgccgccgaggcagagcagacaatcaagctttgcgtccttataggtcttcttcatagccgcgaccttgtcgatcttgtcctcttcgaccacccgcatcagcttgaagggggtgcgcttggtgcccagaatggtgccgcccagcgtcaggatgccccggaagtcatcctcgttcatctctttgtagtcgccggtgatgaggccgtggtagccgttcaggatgcccacgatctccacattgtcgcccatccgggcatacagcgccttggccacgccgcggatcgtggcgttcaggccggggcagtcgccgccggaggtcaggatgccaacacgttttttcatcttgcaaaatccctctttcctctgatcttcccgcattgcgggagcaggttgtcactattagagtattcccaaagggggccggtgtcaagagcgggggagaaaaaactgttcaaatctcggctccgataaacaaaaagggggctgttgcacggacttctagccttgggtaactttcattttccagtctcctcacactgttgctgccccattgccgtagtcgcaccttctgccacgccctctgtgctctccggcatgaacaaaattcaatgctggtcgcagagcaaacagctatatctagtattcattgcttttcttcgtgtcaatatatagtgttttgagcgaaagaaagaaaggggtgacatcaggaataaacatccgtttggacatgaggaaggttgctctcctctccccggctccgtcaattcaggcgcgaggaaataggtgcggtcagtcataaacatcctttcagacacgaggcaatcttctcagaaaaaagcagcccaacgggttgtatttccgttgattccgagccatcttttcttgtctcctgtttgtccttttctatatattggctccttgagtttcctgtgtcaacttttattgtacaacaccactgtgagcctttttatttgactcgtccctttctctgttgtcactctgcctgtatctcttccaccagcggcagatagtcggcacagtatttccggtacagaggctgtacaagttgccggaagttctgcatttcttcttcgggcagcggcagttcgatgcagccgcctgcaagggctgctttgcgggcggcggtttcctcctgtgcccagagttggcgctcgtactgcgccgatgcccgggcgcacgcttgcagggtctgccggtattcctccggcagtgcatcccatgtgcggctggatgccagctgcacctccggtacgcggctgtgctcatcggccatatagtaccgcgccaccttgtagtgctccatggaatagtaggccggccagttgttttcggcggcatcgatctgcccggtctcaagcgctgagtacacatcgctgtacgccgtggtctccggcactgcacccagtaggcggatcatgtcgatcacgatctgcgaatcctgcacgcggatggtcttgccctgcagatcgttcaggctgcgcaccggctgacgggcatagaacgagcgggcacccgcgtcgtaccaactcaggcccacgcgcccctgtgcggtaaagtcctgcaaaaactctgccccgatgctgccatccagcacacgccacatatggtcggcatcccggtagagatacggcagcagcagtacgttgagccggggcagatcgtcggtggccactgacagcgacacacgggcaaaatctacgccgccaatggcaagctgctcccacacttgctgctctgagccgtactcgccgttcgctttgacctgaatgaccaccttgccccctgtctgctgctgcacaaggtccgcaaaatactgtgcgccctgcgtggtggggtatccggcgggctggttgtcggcataggtcagcacatagtccggtgtagtctgcggctttgcggcacagcctaccagctgcaaggctgcaaagcccagcccggctaaaaaagtccgtctgcgcatggtgccctccctccctttgcagatagtataacgcacaaggctgcctttgtgcaagagacagaaaaaggcggtgcccgccgcaaagcaggtaccgccttttcaggagaagaaagggatgtctcagttacatcagacccattgcctgcggcagtgcggtagacactgccgggataaaggtgaccagcagcaggccgccgatgatggccacatagtacataagcatgtacggcatgaccttggaaagcgaggtacggcccaccttgatgccaacaaacagggcgttgcccacaggcggggtgatgttgccgatgcacaggttatacacgaggatcagaccgaactggatggtgctcatgccaaagctctggcagatgggcaggaacagcggggtgaagatgaggatggccggggtcacatccataaaggtgccggacaccagcaggatcacgttcatgatgagcaggatgatgtacttattgctggtcaggctcagcagggctgctgcaaccgcatccgggatctgcaaaaaggccatgacccagcccagaatgttggaaacacccacaaggaacaccaccatgccggacatcttggcagagtccacgatgatcttccacaggcttttcaggttgatggagcggtagcagaaggcaaggatcagcgcatagacaacggcaatggcagagccttcggtggcagagaacacaccgccgatgatgccgccgatgaccacgatgatcagggagagcgaaggcagggcgcgcagggtgcagacgccgaggtttttccagtcaaatttgccgggggtgcccttatagcccagcttgaccgccagcagcacgcccaccacgcagcagcacagcgcccagataatgccggggatgtaaccagccatgaacagcgcagccacagaggtgccgccggacgccagcgagtaggtgatcaaggcgttggacggcgggatcagcaaaccggagcaggaggaagcggcattggtggcagcggtcacggcggggtcgtagccctgctcgtcggcaccgtcgcggatcatggagccaaccgcagcagccgcagcagatgcagagccggagatggcaccgaacagggcgttggtgccgatgttggtcaccagcagtgcgccgggcatcttgcccagaatggccatgacgaaatccaccagacgcttggcgatgccgccctgattcatgatgttgccggccagaataaagaacgggatggcggtcaggctgaacttgctcatgcccacaaaggtgcgctgggcagcggtcagcacggcaacattcagatcaatggaagaaagaatggcagtcagggaagagactgcaatggcgtacgagatgggcacgccgaggaacagcagcaccagcagcactgccagaattacgagtaacgcttgaattgccacagcttagtcctccttattttccttgtcggcatcggcagccatttcggcttccacctttgcaaagtctgcatcctccggggtatccagacagatggagccgttggcgatgccgataatgttcagcacggaatacaccagaatgatcacgccgcagatgggcatgacccagtagaacacacccacggcaacgcccagcgaggaggtctgctgtcccatagccagctgggacacctgaaaaccgccgaacaccagaatggtcgcagagaagatgaaggcgatgacctcagcaaagatgtggaacgccttgcgcatggtggggttgaaccggtccaccagcacgggaatgttcatgtggccgcgctcgccggagacgatggtggcgcccagcatggtgctccagccgaacagataacccaccagttcttccgaccatgtggagggagagttgaagatataacgtacgatgacctgataggtggtcagcaccaccatgaccgtcatgctcagacctgccagcaggttgagcaccttgttcagggtatttctcagtttttccatgatgctcctcctcagtccgcagtatgggcagcgttgtgctgctggatcaggtcataaatgggctgcaactccgggtttgctgccagcacggaatcgtgcaggggggccatagcctcctgaaacggtgcagtgtccgggtaaataaagttgacgtgctgctcattctcggccttgtcttttgcctcagccacagcatcctcccaagcgtcctgctcggtgcgcttcacgatctggaagccctcttcaaagatcgcgcgctcctcgtcgctgagttcgttcaggaaggcgtagtttgccaccagcagatcggggaccatctggtgcatatcgtaggagtaatacttgcagatatcgccgtgaccgttatcggtcagagccagctcgttgttctcggcaccgtccagaataccggcctgcagtgcggtgtacacatcgccgaagcccatgggcgtagcggtgccgcccagcagacgcatcatttccacattggtgggcgactgctgcacgcggatcttcagacccttcaggtcggagggctggttgatgggggtcttgatggtgtagaagttgcgggtgccggcatccagccatgccaccgtctccagaccggccttggaagtggtcttgaaaatggggtccgtcacctcggggtcgtccatggcctcgtggtaggcttctacgctggagaacaggtaaggcaggttgaagatttggtatttggcactgaaggtctccatgatggcagtggacgccaccacaaagtcgatggcaccggtctgggtcagctgcaccatttcggtctgggagcccagcagctcgctggggtacacctccacacggtacttgtcgcccagcttctcgttgatgtagttggcgaaggcttccagtcccagatgatccgggtgggtctgggactgcacatggccgatgcgcacgatcttgcggtcgtcaccggagccggcaccgcagccggtaagcatcatgctgctggtcagtgccgctgcgcccatcagcgacagaaacgttcttctcttcatgaatggcatcctctcttttcgcgttttttctatgattatattttaacaactcgttcatttttgcgaaaccggattattttgtgaaacgcagtacgattttgtctttgttgtatccaagtacaatttttgtgttttttggacgaaaaaaactggcaaaaacaaaaaagcacccgttcctctcctgctgacaggcaggaaagaacgggtgcttcctgtaatccgatttatccttgtgccgctttttccgctgcggctacgcggtattccgaaggggtctggccggtcaggcgcttgaacacccttgtaaaatagttggcgtcactgtaacccacagcagcgccgatatccttcaggctcaggcgcgggtccaaaatcagctggcgcgccttgtccacccggtattcgttcaggtaggccgaaaagtttaccttaaagcactgcttgaacagcttgcagaagtaggcgtccgagtagcgcagcgcagcggcggcatcctgcatggagatatcctccctatagtgggcgttgatgaagcggctgatctcggcacggatgatggcggtacgcatatcctcgtcctcttcccggcggacaggctgttcaggcgcagggggctgtgccgggcgggcaggcagcggcaccgacacctgccggatggcatcttccaccgcgaataccagttcctgctcgttgtaaggcttgagcagatagtccatcgcccgtacagagatcgcttgccgtgcgtagtcgaacttatcaaagccggtcaggaacaggatggcgcaatttttgtctgtttcgcggatgctgcgtgccacctccagcccggtgagacccggcatttcaatgtccagcacagccacctgcggcgcttcgcg

SEQ ID NO: 670 - DNA, 6697 bp, unidentified
  source 1..6697: mol_type = unassigned DNA
ctattttttctccagccccggccactcctggtctttctctgaaagtgtcagcaacgttccatccgtcatgcaatacccttccgccgatggggttccctgatactccccctgcacatccggccactggataccgattgccgggtcattccatgccaggccgccctcgtcgttcggatgccagaagtcattgactttatagcagaactctgcctcatcggacaggaccagaaagccatgcgcaaagccttccggaatcaaaaactgctttttgttttcctcggaaagttccactccgtaccattttccgtaggttgcggagccttcgcgaagatccactgccacatcaaatacgcttccgcgcacggcacggacaagtttgcactgcggatagttgatttgaaaatgcagtccgcgaagtacacccttgacggacatggactggttatcctgtacaaactggatatcgaatccggcttctttcatttccctctcattgtatgtctccatgaaatatccgcgggcatccccatgtacggccggtgtaatcacacacagcccttcgataccgccgacatttttttccactgttatctgtcccactgttttttcctctttcatgctgatttgtatctattcagaaccccctcagaatagttacgctgtttttaatatttcaccctgccctctgcgactgctttcaaatgctctccatacggactctttccgtagcgtgcggccgagtccatcagtttttcctttgtgatccaatgattgatatatgcaatttcttccggcgcggaaatggtcacaccctgacggtgctcgatcatctgcacaaatgccgccgcatccagaaggctgtccatcgttccggtgtccagccatgcaaacccacgtccgagcagctgcacatttaagtttttctgctgcagatacaggtcatttaaggtggtgatctccagttcgccgcgggcggatggctgtacctgttttgccattttgctcacgcctgccggatagaaatacagtccggtcacggcatagttgctctttggctgtgccggtttttcttcgatggatacggcttttccgttctcatcgaaatccacgacaccgaaacgctccggatcgttgacataatagccaaagacggttgcctgtccttcctgtgcatcctttgcggcatttcgcagaatttttccgaatccgtttccgtagaaaatgttgtctccgagcaccatggcacaggcatcctctccgataaattcctctccaagcaaaaatgcctgtgcgagtccatccggagacggctgcactttgtaggacagatgaagcccgaactgatttccatcccccaaaagtgcttcaaatctcggggtatcttccggcgtggaaataactaaaatatcgcggatgcctgccagcatcagtgtagacagcggataataaatcatcggtttgtcatataccggaagcaattgtttactggttaccatcgtcagcggatacagccgtgtccctgcgccgcctgccaatataattcccttcatcttaaagttccccctgtctctttaattcctgcagataccgccccagtgcgtcctgccaggttggaagcggtgtaaatccattttctttcagtttctttttttccagtctgctgttaaacggacgcgctgcctttgacagaccgtattccgcggttgtcacgggctgcacttcggtagaaatccctgcctgccggtaaatttcttttgtgaaatcgtaccaggatatgtaaccaccctcgtttgttacgtggtaataaccatatttttcggtttccatcatgtcaacaagcagtcttgccagatcgtaagtataggtcggtgtgccgatctggtcatttaccacgcgcacctgcgggtgattttttgccacttttaacatggtcttaataaaattttttccgtttaatccaaacacccatgcgatacgcacgatgaaatacttcccgagtgtctgtgctactgccagttccccgccaagtttcgtctgtccgtatacgttaagcggtgcgtatgctttgcagtccggctcccacggagtctcgccctgtccgtcaaacacatagtctgtgctgatatagaccattttggcatctgcttttttcgctgcgtccgcaatatgtttcgttccatctacgttgatggctctgacttttgcctgattttcttcgtcctctgctgcatccacagcggtccatgccgcacagtgcacgatggcatccggctgtacttgcatgattgtctgttccactgctgccgcatcggtgatgtccagcggcacatacgatgcacaggattccagtgtcggtgcaatatccgaaccgactgcctgatgtccgcgctttgtcagttcgtttaccacgtcatgtcccagctgtccggcaacgcctgtcacgaatactttcatatttatatgcctttctttatatcccttttttcccatacatttctttatagtaattttgatactctccgtttacgatgttctcccaccattccttattgtccagataccattggatggtcatgcggataccatctttaaacatcgtctccggcagccagcccagctcgttgtgaatcttggtcggatcgatggcatagcgcatgtcatgtcccttgcgatcctgtacgtgctcgatcaggctctccggcttgccgagatattcacagatgagttttacgatatcaatatttttcatctcattgtgtccgccgatgttgtagacttctccgacggttccgttgcgcaggatcaggtcaatcgccttacagtgatcctcgacatacagccagtcgcgcacattgagtccctctccgtataccggaagcggcttatctgccagcgcatttgcaatcataagcggaatgagtttttccgggaactggtatgggccgtagttgttggaacagcggctgatcgtcaccggcaggccgtacgttctgtgatatgccataacaagcagatccgcagatgccttggaagtgctgtaaggactggaggtgtggatcggtgtatcctcatggaagaacagatccggacggtccagtggcagatctccgtatacctcatccgtggatacctgatgataccgtgaaataccatacttcctgcatgcgtccatcagcacggaagtaccgataatattggtctgcaaaaagacttccggattctcaatggagcggtccacatgggactccgctgcaaaattgacgatcacatccggtttttcttcctcaaaaagggtatatactcccggacggtcgcagatatcgagttttacgaaacgaaaattcggctgatccatcaccggtgcaagcgtggacagattgcccgcataggtcagggaatccagacaaacaatgcgatcctgcggatgttcctttaacatatagaaaataaagttgctgccgatgaaaccggcaccgcccgttacaataatggtcatgagcatttcctcctgtgtgcatttacgatttctatatttatttccattataaaaggtgacgctaggtcaccttcaagtcttttttatagatttttctaattattttctgcacaggaagattccggcatcttttgtgatatgaaatccatctgccacgcgggcagaaacaaattcccggaactctttgtactggttcaaaagcagctggttctgatttccgtgacaggaaagaatataggaaatcagcggttctgcttccgctatttcaatcgcatcctcgtatcttcgcatctgaatttccgaaaaatacggtgctaacaggttttctccgttttcaagcccgaaccgctcatacagcacctccgctgacaaaacgatttctttatggaactgctgcaccagatcggtaatttcccgcatatgctgctttccgtaggtactgcatagaaaccgtcccccattttttaagactctccgacattctgcaagcacctgtgggatatcttcacagtaaaacagcacatgatccgcgatcacaagatcaaacatttcctcctcgtaaggaatttttccgcagtcaaattttttataggaaaaacggctgtcctctcccagtgcacgccgggcatcctttagcattccttctgatttgtccgagagaacgacccatagatccgcaggcagctgttctctgttttcagtccataatgctccatttccacagccgagctccagaatccgcatccccggctgcagattacactgctgcataatccacggaaaccacccctgcggattgacggaatactccctgtgcaggcgaatccgggcggaaatatttgccgcattctggtactggtttttcaggcttcgttctactgccgtcaaatggatcagatccagcatactgttccagtcaatcgcctgttccgtctggctggcttctatggtgcggtcaattgcctcatccatcgcctgcatttcgtccattttctgccgcagcagcttcttctgtatccgcatggattcaagaagatactgctgatctgccgcagcaagtgtcatctcccggatatcttccagcgaaaatcccagatattttaataaaaggatctgctggagttttgccagatctgcatccgtatacagccgcgctcctgcggcagtccgtgcacttggttttaaaatattctgtttatcataataccgaatcgcgcgaagtgtcacatgtgctttttttgcaaattgtccggatgtgtaatacgcatcctttttcatctacagttctttcacctcatcccgcatttcttctgtcatattctgtacataggtcgtctgggaagtaatttcttccgtgtttgcggcaatcgttgacaccttctgcgtcatggtattcatgctttctaccagatctttgatcgaatccatgctctgtgtaatctttggaagaattgcctcggctttctggtcgttctgtgtcagaagatccttcgtggaatcagacagtgtacggatttcctccgctaccaccgcaaagcctcttccgttctcaccggcacgcgccgcctcaatggaggcattgagtgaaagcagatttgtctgtcctgcaatggcagaaatatcttcattgctctttttatatacactgatgaaatccgacataatgcggatggattcattcagttcatcgcacaggcgggaaatatcctgaatatactgcgcaagattagtcgcttcatttgcagactcctcatttgccgtattcaattctgcaatgttatcactcagggtaataaaccggtctgtgatatctgtaatcttctgctggcggatttcctgttccgtccgctcctgattacgaagttctgcaatcttttttgtctcttcctctgccatgccccgcacatagtgcacacagttttcttttacgttgactccattgtggatggcacgtaccatgttggtgcagcttgaatatccacaggattcgcagtccctgtgctgttcctcataggtatcttttttcatttctgcaaacaggcggttcttctcctgttcggacggttcctcaatatgtactgcgcgattggtgtagctgcgcataaaatcgttgatgtccagctttccaaaagcgtccatgaagtttttcagacgttcctccggtgtcagtgtatctgcccacggactcctgcttttgctcttcctgccaaagtgtgccttctcctgttttgcactggttttgctgttccgcagttttgcgattgtcagcatgacatcatccgttccccgtttcggatctgtggcagttccgtagagacagcccttcgcacagtttaaaatgtctaccataaatggaagttctttgttctgctgaatgcgctgtgcataggaacgcagatattcataggcctcatgctcgccctctacctgacgcactacctgctctttcccaagaaaatgttctacattctcccgcagtccaccaggcatcggatacaaagaacccagtccgtattccagttcatcggtatatggttcacatccttcataatcgtttccgatatacttcatcatcttttcaaaagttacattataagaaacatatccgccgcaattgggatcggtaatctctaattttttggcaatacacggactgataaaagcgatttcatctgtgacctgcatgtattttttcatataaatagcagtacacatcatcggactgtgtaccggcatcagacgcggaatcagctccggtatatatttttccacataggtgactactgccggacacggctgggaaatgcccccgaaaaatttgtgttccataatgtatttcagatatccccaggttgtgatatccgcaccgaacgatacactgcagatatggttgactcccttactctttaaatagcccagcacacgctggtattctttgggataatttgccagaaatgccggtgccagtatcacggaaattttctttcccgatgcaaggtcttcaaagaagcggtccgtatcatcataatagtctctcgcttcatgtgggcagacatcaaagcattccccacatgcaatacatttgtccgggtctaccgttacataaccttcctgcgttgcaatatttgccgtaagtacaggacagccccgcacgcatttgttgcatccggtgcataaatcatttgtgtaaatcagttccat

SEQ ID NO: 671 - DNA, 8750 bp, unidentified
  source 1..8750: mol_type = unassigned DNA
atgaaagttgtaattcttgccggtggctatggcacgcgcatttcggaagaaagtaagttcaagccgaaaccgatgatcgaaatcggcggtatgcccattttgtggcatatcatgaaagagtattcttactatggcttcaatgattttgtgatctgcgccgggtataagcagcatatgatcaaggaatggtttgcggattatttcctgcataccagcgatgtgacctttgatttcacccagggcaacaagatgatcgtgcatgaccagcacgccgagccgtggcgcgtgacggtggtggataccggcctgaacacgatgacgggcggccgcatcaagcgggtgcagaaatatatcggcaacgaaacctttatgatgacctatggtgatggcgtctgcgatgtgaacattgccgaactggtcaagttccataagcagcatggcaagctggcaaccctgaccgccgtggtgcaggaacagcagaaaggcgtgctggatatcggccaggacaattcggttcaggcgttccgtgaaaagagcgtcaacgatggggctatcatcaacgcgggctatatggtgctggaaccggaagtgtttgataccatcagcggtgatgataccatttttgagcaggccccgctgcgcgagctggcagccaaaggccagctgatgagctatgtgcaccgcggattctggcagtgcatggataccgagcgcgaaaaaagtatgctggaaaaaatgtgggcgtccggctgtgcgccctgggaagtgtggaaccaacaatgaacttggaattttatcgcggcaaacgcgtgtttgtaaccgggcataccggttttaagggcagctggctctgccgcatgctggtgggggtcggtgcggtggtaacgggttacagcctggaaccgcccacaacccccaacctcttctctctggcagggctggaaggcaaaatgaccagcgtgatcggcgacatccgcgattttgccagcctgaaagcggcctttgatgccgcccagccggaaattgtgctgcacctggcggctcagcccattgtgcgggacagctacaaggacccgcgctatacctatgaaaccaatgtgatgggcaccgtgaacctgttggaatgtgtgcgtaccgcccaaaccccaccgcgctctgtgctgaacgtgacgacagataaggtgtaccagaataatgaatggtgctggggctaccgcgaaaacgaaccgttggacggcttcgacccctactccaacagcaaaagctgctcggagctggtgacccacagctataaaaacagcttttttgcggatggcagcgtggccatctccactgcccgcgcaggtaatgtgattggcggcggcgattttgccaatgaccgcatcatcccggactgcgtgcgtgccatggcaaaaggggagagcatcggtgtgcgcaacccgtattccacccgcccataccagcatgtgctggaaccgctggcggcgtacctgctgatcgcccagcgccagtatgaggataaccggtacgccggctattataatgtcggcccggatgactgcgactgtgtgacgaccggcaccctggtagacctgttctgccaggcgtggggcgatggtgctgcatgggaaaaccgcgctgaggcaaacgccccgcatgaagcaaactttttgaagctggattgcagcaaattgaaatccaccttcggctggaaaccgcgctggcatatggcggaatgtatgcaaaagaccgttgcgttcagcaaggtatggctttccggcggggatatcccggcggagatggacaaagagatcaaggaatttttgagtgagtaagggagcagacgatggcaaattggagcaatgaggccgaagcccgcgagcagatcaaggcgctggtggcagaatattaccatgactttaaggagaaaaagacggatttcaagcccggcgaccgcgttacttatgcatcccgcgtgtttgatgaaaaagaaatgtgcgccctgaccgatgcaacgctggatttctggctgaccaccggccgctttgcggatgaatttgaaaaagagtttgccaagtggatcggcgtaaagttcgccaacttggtcaactccggctcctccgccaacctgattgcctttatggcgctcaccgccccggaactgggcgaccgccagatcaaaaagggcgatgagatcatcactgtggcatgcgggttccccaccactgtcaccccggcgctgcagtatggcgctgtgccggtgtttgtggatgtgaccgtgccgcagtacaacattgatgtgaccaagctggaagccgctctttcccccaagaccaaggcagtcatgatcgcccataccctgggcaacccgtttgacctgtccgccgtcaaagccttctgcgatgcccataacctctggctggtggaggataactgcgatgccctgggcacccagtacaccatcaacggcgaaacccgctttaccggaacctggggtgatatcggcacctccagcttctacccgccgcaccacatgacgatgggcgagggcggctgcgtgtatacaaacagcccgctgctgaaccgcctgatcaagagctaccgcgactggggccgcgactgcatctgcccgtccggccatgataacttctgcggccaccgctttgacggtcagtatggcgaactgcccgcaggctatgaccataagtacgtttacagccactttggctataacctgaaagtgaccgatatgcaggccgccatcggctgcgaacagctgaaaaagttccccagctttatcgagcgccgccgccataactgggaccgcctgcgcgcagccctggaaccggccgctgataagctgatcctgccggaaccggccgccaacagccgcccgtcctggtttggcttcctgatttcggtcaagccggaatccggcctggaccgcaacgccgtgacccgctatattgaggaccacaatgtccagacccgcctgttgttcagcggcaacctgatcaagcacccttgctttgaccagatccgcggcaccgacgcctaccgcgtggcaggggagctgaccaacactgactttatcatgaacaacaccttctgggtcggcgtgtaccccggcatgaccgatgagatgatcgactatatggcgaagatcattattgaagcggtgaaccagtaaaaagcgctgataagatgaatcaataagaaaaagcaaagccgtgctgataagaaaaaatggctgctgcactgcggtaaattatcaatacaggctttgctttttgattgcttataaagaataataaaggaacgggatccatgcagaaattgttggcactgttgggagcaaaaagcaaaaaggaatttgttgcgctgcttgcacagtttatcaagtttggccttgttggcgtaagcaacacggcggtatcgatggcggtgtattatatctttttgtggatcagcccggacctgtatatggtaggcagcgttctgggaacaattctgagcattgccaatgcctttttttggaacgataagtttgtgtttaccgggaatgcaaacgattggcgcagtaaactgaaacgccttggaaaaacatatgtcagctacggcggtacgtcgatcctttctaatgttttgctttggatagaggttacgttcttcagcgtaagcaaaacgatcgcgccgattgtaaatttgctggtcacgattccgctgaattttatcatcaacaagttgtggacatttaaggaaagataaacgacaaaatgtttcctgtcaacgatgtggagcttatccggcacggaaaagtgcggtatcgggatccctaaccatcatccgactcaacaaggttggttggcggtgctttattgttgaaaataagactgcaaaatatatcggtaaaaaatatgggaaaccagggaatatctgatacataaccgggaacagaaatagggcaaggctgtgtatggacaacatgacaacaaataacgagaataaatctggtatcagcattggattagatcagctgttgccggaagataacaaatcggtgcatctgggactgaattatggccagaatgaatgcaacagccagcgcgtgctgaaagagaataacacgaaacggggaaaaggcctttttggtaaaaaaggaagtgggagcaatccgttctggaaaaaaacggccaagctgtactgtgtactcagcgcagtgtgtgccattgtggttatggtaacgctgtatgttacccatggtgattttctttcgtactttttataccatgatacactggatgccggcatggattttttccatagcattgaatatgttcgtggacgccagccgtatgcggtgtttgacacactgtatccgcccttggcaaatttgttcttttatgccctgtttttactggtgcctgcttcggtatctgataactggacctatgactttgaggcgtcagttgccatgcgcggcacagaaactgatttacgcacaacacagtcgtgctttttgctatacgtcttttttgtggtgctggcggttcttttgctggcggttttgctccgtgacgtgatgcaaaatgcccagtgggccagggccagtacgttttttgccttgttcagctttggtgtgcttaatgcggtagaccgcggcaatattattttgctggcggcggggctttcgctttttttcgtcatgtatcaccgttcaaagcgcgcatgggtgcgggaactggcattggttgcactggcagtagcagccggacttaaaatttatcccgcattcttaggtgttatgcttttaagaaaccgggatttcaaagcagcaatccgcacggtgttttatggcattgcagcgttggtgctcccggtgtttgccttccaggagggcgtgtacggcttgcagctttggctgaagattttgttctcttttggaagtaaaagtaaaacaccttgggcaggcaatggcatcaacagcatgttcgcacatggggcgcatctggtggacctgattgccggaaccagcaatgcaacggtatctttttttgcagcagcctttgctgtggcggcggtactggttgtgtgtgctctgctctgccgccaagaatggcaggcgttactgctgattaccgtggctatgatgtaccaaagccagggcaactatatttactgcatggcgctgattccgctggcgtattttcttgcacaggaaaaggtgatgacacgtcaaaatatattgccttttgtggttttgatggtatttaatctgccgcttccaatctttgaagagcgtaactcttatattcgcaacaccattgtacagttggcaatactgacagctatcatctggggcgttgtacaggcagtaaattgtgtgttggcagcgctgaaaaccaaaaagcctgaacaatcaaaactagataaaaaagctgcacgcagcacgctggttactttcggcgcttcactgggtgcattggcagtttcccttgccgttttctatggcgtgtgggtgctgtataatgcgccgtctattaccatgcagctgggggatggcatttataacacagaatattatactcctgaaaactccaacaaagagctgccgttttactggtgcaagaaaagtgcggagatcaaactggtaaacccgcagctgaatacggaaaggtacacctttacctttacagtgggggattatttctttgatatttctgaccgccccagcattaccattaccttcggtgacagtagccagacctttgtggtcagccaggaaaacatgaaaatccgctataccgtggatgttccttttggtgaaagtacaatcgatattagctacagcggcaagcgggtcgatgccccgcaggattccagaactttgtattttgtaatggttcagccgcagcttgaacggattaaataaaaggaggacactctcaatgaaacagcgtctggccgattatgtggccgattttcttgcggcgcacggtgttacggatgtgttcagcgtggtgggcggcggcgccatgcatctgaatgatgcactgggccaccacccggcgctgcatgttacctataaccatcacgagcaggcaagcgccattgcggcggaagcatatgcccgtattgataacaaaattgccgccctgtgcgttactaccggccccggcggcaccaacgccctgaccggtgtggtgggcggctggctggattctatccctatgttcgtgatctccggccaggttcggtacgataccacggcccgctatgccgcgcagtttaccgatggcctgcccctgcgcgcggtgggcgaccaggaatacgatatcaccaaatctgttgcccccatgaccaaatacgccaccatgctggaagacccgaaccagatccgttatgtgctggaaaaagcctggcacctggcagccaccggccgccccggcccggtgtggatcgatatcccggtcaactatcagggcggctacattgaaaccgacagcctgcccggctatgacccggcgcaggacgatgcccggctgccgcccccggtggacgatgccaccgtgcagatggtgctggaaaagatccgcaacgccaagcgcccggtgttccacgccggatacggcatccggctttccggcgggtacgcagcgttccgcgccgtggcggaaaagctgaacatccccattgtgacctactggaacgccgtggacctgatcgaggacgaaaacccgctttactgcggtcgtgccggcaatatgggcgaccgccctggcaactgggccatccagaacgcagacctgattctggctgtgggcacccgcatttccatccgccaggtgggctataactggaaaacctgggcccgcgcggcggaagtcatcatggtggatattgaccgcgccgagatgaaaaagcacaccctgcatgtggagcaccccgtgtgggcggatgccaaggactttctgcaaaagctggatgccgccgcagcgccgctgacccctgtcagccaggcagcggactggctggcaacctgccagcgatggaaaaaagattaccccgccgtgctgccgcgccagtgggaagaaaacggcaccaccgccaatgtgtacgcctttgtgcgctacctcagttcccgcctgccggaaaacagcctgaccgcagtttccaacggcgcctgctgcgtggtgggcaatcaggcgtatgtcatccaaaaaggcagccgcatggccaacaacagcgccattgccagcatgggttacggcctgcccgccgccattggcacttgcattgcaggcggccgccgtaccaccatctgcctggaaggcgatggctctatcatgatgaacctgcaggaattgcagaccatcctgacaaataagctgccgatcaagattttcctcatcaacaataacggctaccactccatccgcctgacccagaacaacctgttcaaagaccattgcaagatcggcattgggccggagagcggggatctgtccttcccggagttccgcaaaattgccgaagcgttcggctacccgtattcctgcgcacattccaacgctgagatgaaacaggtggtggatgccgcccttgccgcagaaggcccgactttctgcgagatctttaccgatacccagcaggtctgggagccgaagagcgccaccaagcgcctgccggacggcacactggtcagcccgccgctggaggacctggcaccgttcctgccgcgggaagagctggaaaagcagatgtttatccccctggtgccggagcagtgaatgatgatagaacgtaacattaaaaccgtaatcgtaaccggccccaccggagccgtgggcacagcattgtgcagccggctgctgcaggccgggtgtaccgtggtggcggtctgccgccccggcagcccgcgagccgtagcgctgcccaaggatgcaaacctgtatgtagttgcctgcgatgccgccaacctgacggatttgccgcagtgcatggccgcagccgggctgcccgtgcaggcggatgcctttttccacctggcgtgggcgcacaccattggcgcgggccgcaatgatatgccggctcagattgagaatatccgctataccattgatgccgtgcgcaccgcggcggcaatgggctgccgtgtgtttgttggtaccggcagccaggcagagtatggccgtgtggacggtgttctgcgggccgatacccccacaaaccccgaaaacgggtacggcatggccaagctgtgtgcaggccagatgagccgtaccgaggccgccgccctgggcatggaccatgtgtgggcgcgtatcctttcggtttacggcccgcatgacggccccaacacgatgatctccgccaccatccaaaaactgttggccgggcagtgcccggacctgacggcaggggagcagaagtgggattatctttactccgccgatgctgcggatgcactgtaccgcatggcctgccatggccgcagcggtgccgtgtacccggtgggcagtggcaccgcccgccccctgcgggaatatattgagaccctgcgtgatgccatcgacctggccctgccgcttggcctgggcaaaatcccttacgggccgcagcaggtcatgtttttgcaggcggatatcacccagcttgcggcggataccggctttgcgccgcgcaccgcctttgccgatggcatccgcgccaccattgcgtgggcaaaaacgcaaaagcaaaccaattaa

SEQ ID NO: 672 - DNA, 15071 bp, unidentified
  source 1..15071: mol_type = unassigned DNA
atgttagaaataactaatgcggtaaaagtatttgctccttcgacacctaatgaaatgaaagcgcttaacggacttaaccttaagcttgaagacggcgaatttgtaaccatcataggctcaaacggagcaggtaaatctacactttttaatgctatatgcggtaatttctggctggattgcggcatgattttactggatggcgaaaatattacctttaaatccgaacataaaagggcaaaagttatcggaagaatttttcaggaccctatgaaaggaacagcacctaatcttaccatagaagaaaaccttgctcttgcatattcaagaagcaagcatgcaggacttagaagtgccgttaccaaaaaggaaagaaaaatgtttaaggaagcccttgccggattttccatgggacttgaagaaagaatggatacaaaagtaggccttttatcaggaggccagagacaggttgttactcttttgatggcaacccttgttccaccgaaacttcttctgcttgatgaacatacggctgcacttgatccggctacggcggacaaggttatggatattacaaaaagaattatttctgaaaataatctgactacgttaatgattacccataacgtgacacaggcacttgaaacaggaaccaggacgattatgcttgacagaggaaatatcatatttgacatttcggaaaatgaaagaaaaaatatgacggtagatgaccttatggatatgtattccgcaaagaaaaaagaaaaatttgctacggacagcattgttttttcatagattttaccggtaaaaatcacaccatccggacaatacttccgggtggtgttttactatgtttataattgacatttatatgacctcatgatattattattcaggaaatcaactttctattattataaataaacattgttaaaaaagtaacaatgttgacaggagagcttatgaaagcagtgtatccagggagttttgatccaatcacctatggacatcttgatatcataacaagagcatcaagaattgtggacgaactcgttgtgggaatattggttaataataccaaaagaccgatgtttacaatggatgagcgtcttgagatgttacgagagactgttaaggatttacataatgtcgaggtgaaaacttttgaaggtatgacaattgattttgcgagacagaatggagcaaaagtaatcatcagaggattaagagttatttctgattatgagactgagatgcagattgcccagactaacagaagtcttgatccggagattgagacactgttcctatctaccggtcttgaatattctttccttagttccacaattgctaaggaagtagcattttacaatgccggagttgagaaactggtaccaccaattgttgcccgtaaatttaaagaaaaatataaaaagtaaatattcaaggaggatttttctaatggctaagaaaatcgttttagcaggcgcatgccgtactgcaatcggaactatgggaggagctttaagcacagttcctgctgtagatttaggagcaatcgtaatcaaagaagctcttaacagagcaggagtacctgctgacaaagtagatcatgtatatatgggatgcgttatccaggcaggtcttggacagaatgttgcacgtcaggcaacaatcaaggcaggacttccaattgagacaacagccgtaacagtcaatgttgtatgcggttcaggacttaactgcgttaatatggcagcacagatgattgaagccggagatgctgatatcgttgtagcaggtggtatggaaagcatgtcaagagcaccatatgcacttccaaatgcaagattcggttacagaatgaacaacggaactcttgttgatacaatggttaatgatgctctttgggatgcattcaacaactaccatatgattaagactgctgataatatttgtgaacagtggggccttacaagagaagaaattgaccagtttgcagtaaacagccaggctaaggcaactaaggctcaggaagaaggaagatttaaagatgaaatcgttcctgtagaagttaaggttaaaaagaatacagttattgttgatacagatgagggaccacgtcctggaacaacaatggaaggtcttgcaaaacttcgtacaatcaatccggacggatttgttacagcaggtaatgcatcaggaatcaatgacggtgcagcagcaatcgttgttatgtcagaagaaaaagctaaagaactcggtgttaaaccaatggcaacatgggtagccggagcactcggcggagtagatccatcaatcatgggtatcggacctgttgcatcaacaaagaaggtacttgctaagaccggtttaacaattgatgatatggacttaattgaagctaacgaagcttttgcggcacagtcagtagctgtagctaaagaacttaacttcaatatggataaagttaatgtaaacggtggtgcaatcgcactcggacatccggttggagcatcaggatgccgtatccttgtaacattacttcatgaaatggctaagagagatgccaagagaggtcttgctacactttgtatcggcggtggaatgggctgctcaacagttgtagaacgtgactaattaaataataactgccatcccctgacagggatgacagttattgttgtgtaatatataaaaggagactattgatatggaattcgttacatacgaaactgaaggacacgttggtttaattacaatcaacagacctaaggcattaaacgccttaaacagccaggttctcgaagaacttgatgcaacattcaagagtgtggatttatcagaaatccgctgccttattttaacaggcgcaggcgaaaagtcatttgttgccggagcagatatcggagagatgagcacacttacaaaggcagaaggtgaagcattcggtaagaagggcaatgacgtattcagaatgatagagacattcccaattcctgtaattgcggccgtaaacggattcgcactcggcggcggttgcgagatttctatgagctgtgacatcagaatctgttcagaaaatgcagtattcggacagcctgaagtaggacttggaatcacacctggttttggcggaacacagagacttgcaagacttgttggtgccggtatggcaaaacagatgatttattctgcacgcaatatcaaagcagcagatgcttacagaatcggtcttgttaatgacgtatatactgctacagttgatgaagcaggtaatgtaactgctactgcacaggaaaatcttatagcagcggcaaagaaaatggctgcaggaattgcagcacaggcgcctattgcagttcgtaactgcaagaaagcaattaatgatggtcttcagacagatatggacaaggcaattgtaatcgaagagaaattattcggtaactgctttgagacagaagatcaaaaggctggtatgggcaactttcttgaaaaagataaagagaaaaagttaaaagttgttccttttcagaataaataatcaaaaataatacaattttaggaggtcgcaacatgaaagttggcgttattggtgcaggaactatgggccagggaattgcaaaggcatttgctttggttgatggctacacagtagctctctgcgatattaagcaggaatgggctgaaggcggaaaggataaaatcgctaaaggctacgcaaaattagttgaaaaaggaaagatgacacaggaaacagttgatgccatcctcgccagaatcactcccggtctcaaagaagatctttgcgcagattgtgatttaatcgtagaagcagcatttgaaaatatggaagttaagaagacaacattcgctgaattagacaagattgctaagcctgaatgtattttcgcttctaacacatcaagcctttcaattacagaaatcggaaacggacttacacgtccaatggtaggaatgcatttcttcaatcctgctgaccgtatgaaacttatcgaagtaattgcaggcgtaaatactcctgatgctacagtagaagcaataaagaagatttcagaagaaatcggtaagactcctgtacaggttaatgaagctgccggcttcgttgttaaccgtatattaattccaatgattaacgaagctgctttcattaagatggaaggtgtttctgatatcgcaggaattgattcagctatgaagcttggtgctaatcatccaatgggaccacttgaattaggtgatttcgtaggacttgatatctgccttgctattatggatgttctttataaagaaacaggcgacagcaagtatcgtgcatgtccactccttcgtaagatggttcgtggtggaaatcttggctgcaagagtggcagaggcttctatgtatacaatgctgaccgtacaaagacaccagttgatgctttataattaaagcattagcaatatataggaggaattatacaaaatggatttcattttagacaaaaaacatgaaatggcaagatctcttttcagagatttcgcccagaatgaagtaaaacctctcgctcaggaagttgacgagactgaacagttcccggttggtactgttgagaaaatgcagaagttaggtttcatgggaatacctgttccacaggaactcggcggacagggctgtgatatcttaacatatgctatgtgtgttgaagaattatcaaaagtttgcggtactacaggtgttattgtatcagctcatacatcactttgcgtagacccaattttaacatacggaacaccggaacagaaggaaaaatatgtaagaccacttgcaactggtgaaaaacttggagctttcggtttaacagaacctggtgcaggtactgatgcacagggtgttcagacaaaggctgttcttgacggagacgaatgggttcttaacggatctaagtgtttcatcacaaacggtaagtatgcagatgtttacatcatcattgccgtaacagatgtagttgaagataagaagggaagaaagaaaaaattattctctgctttcatcgtagaaaaaggaacacctggatttacattcggtacaaaagaaaagaagatgggtatcagaggctctgctacttatgaattaattttccaggattgcagaattccaaaggaaaatcttcttggacagcagggaaaaggtttcccaatcgctatgcatactcttgatggcggacgtatcggaattgctgctcaggcacttggtattgctgaaggcgcattagagacaacaatcgattacgttaaagagagaaaacagtttggacgttcaatcgctcagcagcagaatacacagtttgtacttgctgatcttgcaacaaaggttgaagctgcccagttattagtgtacaaagctgcatgtgctaagatgacacagaaggtttactctgttgaagctgcaaaggctaaattatttgctgctgaagttgcaatggaagttacaacaaagtgtgtacagttacatggtggatatggttacatcagagaatatgatgttgaacgtatgatgcgtgatgctaagatcacagaaatctacgaaggaacatctgaagttcagagaatggtaatctcagcagatttattaaaatagactataaggagtgaataaccgtgaaaatcgtagtatgtataaagcaggttcctgatactaaaggcggagttaagtttaatcctgatggaacacttgacagagctgcaatgcttacaatcatgaaccctgatgataaagctggtcttgaagcagcacttagattaaaagatcagtatggagcagaagttactgtacttacaatgggtcttccaaaggcagaagatgttcttcgtgaagcaattgccatgggtgctgacaatggtatccttgttacagacagagttttaggtggagctgatacatgggctacatcaacaacaattgccggtgcattaagaaatattgattatgaccttgtaattacaggccgtcaggctatcgatggtgatacagcccaggttggaccacagatagcagaacatcttggaattccagtaatttcatatgcccaggatatcaaagttgatggaaacaaagttactgtacagcgtcagtatgatgatggatatcatatcgtagaagctgaaatgccatgtcttataacagctctttctgaattaaatgagcctagatatatgacacctgcaggaatcttcaaagcttgtgacacaagttttacagtttggggaagagcagaccttaaggatgttgaagatggcaatctcggtcttaacggctcaccaacaaagatagctaaggcatctgataaagtacgtaaaggtgccggagagaaggttactcctgattcacctgaagatgcagttaactacatcgttggtaaattaaaagagaaacatatcatttaacagaaggaaatggtgaacaaatatgaaaatgagtccagaagaaattgcacagtacaaaggtgtctttgtatttgcacagcaggtagataatgagatcagcggtattgcttttgaattacttggaaaagctaaggaattagctgctcctcttaatacagaagttacagcagttcttattggttcagatgtaaagaatcttgcagatactcttgcagagtatggtgcagataaggttatcgtagtagatgatcctgaattaaaagtatatagaacagaaccatatgctcatgcattagcatcagtaattaatgaatttaaacctgaaatcgtattagtcggtgctacagcaatcggccgtgaccttggtccaacagtttcagcaagagttgcaacaggtcttacagcagactgtactgtacttgaaatcggtgatttcccaattaatgcaattcctggtagagaaagtgaacagaagcacaaccagttattaatgacacgtcctgcattcggcggtaacacaatcgctacaatcgcttgtcctgataacagaccacagatggcaacagtacgtccgggtgttatgcagaaaattagcccaatcgcaggcgctaaggctgaggttattgaattcaatcctggttttacacctaacaataagtatgttgttgttaaagaagttgttaaagctgtatctgatatcaaagatatcatggatgctaagatccttgtatcaggcggacgtggagttggttcagcagagaacttcaagatgcttgatgaacttgcagaagttcttggcggacaggttagctgctcaagagcagttgttgataacggctggaagccaaaagatcttcaggtaggtcagacaggtaagacagtacgtcctaatgtatattttgcaatcggtatttcaggtgctatccagcatacagccggaatggaagaatcagacatcatcatcgctattaacaaagatgagactgctcctattttcgatgtagctgattatggtatcgtaggtgatcttaataagattgttcctgcacttacagcacagttaaaggctgaattaagcaataaataatcattaatttgattgaaagagtatcacatatgtggtactctttttttatacataaaattatagaagtcagaaggagagaccaatgatagcggtagtagtaaagtgtgggaagaatgattatatggttattgatgacagggagtggtcgtcgtttaacaacagtataaagagcttatcaggttcagataagaagaacagaacataccaaatcggagacagaaattttacatataaagagacaaaaaaatttaaacatttatttacgggaacttacgcaagtgcatataatttaatgccggaaattattacagagcatggaaattataaaaaccttatagatgatatactggaatcacttaaaatagcaccgggcaagaggtgggattatgtcctgtttttcgcaaatgactttaataagtcagtttttaaaggcacggactatgactataattttgaagccgtcaggaagcatgatttcttaatgttttttgaagatgaaaatattgaaaaattaagaaccggtgaatacgaagctttactgaaaatagctttgtatgcaaggtatgatactgaggatgatattctaaacaggattcttggggatgccagatttgaacttccggcagattttgatatatattattccgatgaatcggaaatggacgagaaacttaaatttatcaggaataaatcaataatcgaggacttttttattaataacaggagaggattacagcgttttctcgcaagggaaaatgagtatagtacggagattatttctgtacttagccagataaatcctgttatttatacaactgacagaccggtaagcaggatgcgatttacggatttgtttcctaaaaagattaaagataagattggaattatgggcttccttgatgcaagaagtgcaaccaacaatattattataagaattagtcagacagcggataaattatgtaaattagactttgaaagcgcatataaggttcaaagtgaaattgataaagcatcagcggatttttgcgaaattgcggaaactgccattgacggaatagttaatgttcccgaactttttaataataacagctctaagaaaatacttgaaagtatcggtaatgttaccaaatgtgaaggcaacagggataaatatatagacttactcaatcgtgcaattcttgcatttgataatgaaaattacacaaaagaagaacttaaaccgattttttcgctgtgggtagagggttggtcagtagaattcaaaagatgtgccaaatatcttaccgatgaaagtattgacttcatgaaaaagtatctttcagaggcagaaattaaagtggtggaggataattgcaataaaaaataatacaaatcaaagaaattgtaaattgataaataatactgtaagatatacaatttatctataatattttaacgaagaagtgtatattatgataaaaaaaagaattatatcacttataacaattgtattgtttggaattttggtgtgttgtctgccagtaatggcagatgggtctttttcgtggtcgcaagacgcaaataggtccaaggcagaagtaacttattatgggaatgtaaattggctagataaagggattgcacctaaccgttatacattttttgctaaattatatggaaaagataagtcagttgttacagtaactaatgctgcatacttgacaattacgtcaggcgttattggaaaaattatatttacagataagatatactggaatcacgaatatagtacaacacagaaaaaaacaacggctacgtctataagagttcagtgggggtttgatggtttttccggttataagagtttaagctaagggagttgaatgttttgaaaaacaataaaacattttcatatatagttttatttatatcaatgtttatttctgtaattgttgtaacaatgcttgcacctgtatcagaaacattttttaatagtaatgacggttacagatatgaagaatacataagtgtatatccattcatggtagaaggcggtacgtcatattccgataaagaatatgataaatactcggatataatcaaggaatttatagaaaaaattagtttaatggatggcaatatttccatggatttggagctcaatgtttcaggaggtgcaacagcacagggaaaggtgtatttttcacttaaagagactcctgctgtaccgctagaaaagagtaaaggctctattgttgaaaaaaacggtgtctatgtaggcaataagtatgttaaattaattgataatgatatgattagtatctttaatgataattacagtgtacttggagttgctgcaaccaaaaaacttgagaagaacgagtgcatatatattaaatattctgaattgaatgacgcaattaaagaaaaaattaacaggaatttatgcaaaaatgtctattttggtgaaccggtggtgattcattatgaaagcaataatgctgatatgacattgttaaaggattatcttacggataatacatatatgtatgaaataacagaggcttcgggacaatcaggttataatatactttttggaaagattaagaatatattgttaggcttgacaggactactctgtatatttgtgatcggagaatccgttgtgcttttgatgtcctcacttgtaagagaagcttttataaaagaagtttttggtatgagcagaagtaaaatttatgtgcctgtgcttcttagaattagtttatgctttgtagcggctgcgatagtgggacttttagttgtttatgttatttttaaagaaattttggttattaggttctggttattggctacggcctttttattagttgttacttttgtgatatttggcttctcttatctgaacgttgacagacgcagggctgacagggcagaacagatattaagatttacggagtagaataatgaaattaaagaataaagtcgggatggcatatgatatatgtctggaaaacaggaaaaagttctatatacatcttttagcagcatttatattttacagtatacttatttttcttatatatctgattgttgatgcatacagttacgaatacagaattaataaaagcataaaatgtggtattgacaggttagggtatgtttcggttcctatagatgccaaatacagtgaaaaaatatattccgaaatatcacaaataggagaaattgataacatcggatgtatttctgatggcgtaggtaattcagctccggcattacagtttttacttgatatacaaagtggacataaaaattccaaagataagaccgactacgctatagaaacaacagttatgaatataggcatctggcctgttatgaatattaatcttgttgaaggaaaagaaccatatgatgtagatattgaggacaataataaagatataattctgtatttgtcagaaaaatattgtgatatcgtaagtgtaggtgacgtctttgaagactgtgacgtagaaggaaatgtgatttacagatatactgtaggaggattttttgatgaaaagtcatctttgatggatccgcatgtttttgatgatttaacattggtaaagtcaggcagttactcaatggagtatggaatcattgaactggtacaatgggaaaattacggcggaagcttttttacatatagtaaagagaatgattatgataatatagtttcaaaaattaacgggatttctgaaaaatatgacacagaaattaacacatataaaatatcttctgtagtcgattacaccaaaaaaaatacagatatgcagactagagttttaaaaattgcacttggactttttggcactgcgatgataatttctctttcggtcagccagatatattcgataataaccaaatcaagggattacggaataaggctttcaaacggagtcacaaagaaggatatgtgctctattatttttatacagaatataattcagacagttatacctgtaatattaagtatgactgccatgtattttgtgttaagaatattctttggcggagacctgacatcggaacaattaataaagcatattttcactttatattgtgtgcctatatcacttgttgtaactataatagttgtcatgatgtcttcggtgattccggctaaacttatgaaaaaaacgtctgtgcttaacttactgaacgggaggataacggaatgattgaacttaaaaatgttgttaaagtatataatgcggatgatacaagtgttaaggcacttgataatatatcaattaaaattgatgacggggaatatattgccgttatgggacgttctggttccggtaaatccacgttgttaaatataatcggaggaatggagaaagttacgtcgggacagtatttttgcaatgaaaaagaaatcagctctttaacaataaaagaacttgatctgttcagaaaaaataatatcagttttatattccagaattatttccttataaattcatatacggtgtctgaaaatattgaagtgccgcttattgcaaagggaattccggtaaagaagcggaagaatatagttgatgaaatgatgaaaaaaaccggaataagtgatattgccaaaaaatatcccaatcatatttcgggaggacagatgcaaagatgtgctattgcaagggcattagcttccgataacaggattattctggcagatgaaccgacaggagcccttgatgcaaagacgggacaggagataatggaacttttaaataatattaaaacaaaaggaaaaacaattattcttgtaacccacgatgaaaacatagcttcttatgcggatagaattgtaagaatagaaaatgggaaaatagtttaaaaaaggtggaaattactccacctttttttcattatgttaatgttattcagttctgagcgctataacaggatctttctttgatgctaccctggcaggaataagacctgcaatcaatgtgaggaacacgcttattgcaataaggataagcgcacccttaagcggaagaaccgcaacacctgaaattcctgagaatttcttgatgattatgttaatcggtatgttaagcagaagcgtgaagcctatacctatcatacctgcaacgagtccgacaatcattgtctcggcattgaatacccttgaaatatcatgctttgaagcaccgatacttcttaaaataccgatttcttttgttctttcgagaacagatatgtatgtaataattccaatcataattgatgaaaccacaagtgaaattgatacaaaggcaataagcacataagatattgcgtcaacaactttacttacggatgacatcataagacctatgtaatcggtatatgaaatttcaagactgtcattaccttctgatttgactttgtcattatatgctgaaattatatctgaaatggcatcttttgattcaaagtcctttgcatagatattaatctttgaagggttatctgttgtaacgtagcccagtgcttcaatattatttttgtatgtatttgaacttgattgctgtatctggcttttgaacatttcaattattacatcatcagaaaggttggcaatgtaggcactgattattttctgctgttcttttggaagtgtacttatatatgcattaatatcatccattgtaaggtctatatcaaccgttgagaatggaagacctgtaagaacgtctatatcagggttatcaagctgtgctttaacaatatctgacttattattttccgaaacaatataatccacaaggttctttgtatagccgacaacgcctgtaattgaagtagcaacagcatcatcttttgcaactataattccggaaactttaacttcaataccattgtcaataagctgttttacataatcttcgctgcttgacatgttcttgtaggcccctgttgcttcgtcatacctgtaatatgctgatggaagcactactttaaatctgagatttaaaagatcctcgtaactatagctgcttactttatcatcaagctgtttgttaagattaatcattatattttttaattcggatgaattcctgatacccagcgcatataaagaaacatcggtaatctggtgattcttatcggctacaacaacaacttcattgtaattgtcaggccatgaaccggcaacaaggtcatactgtgaattaagcaggtcctgattatcaatcatctgtgaccacatatcagtgttggaaaatgaggaaacaagggaagatgacattgtctcatcgcttacaccccatatatcctgatacaatgtgcttggattgactttgttaattctgccggagtaatcttttgcatatacattgagaggaatatcgtactggtattgtacatcaagcacataatcgccgatattgcaatccgggctttcaagatatttctttagttcagaaaggttatttttcttaacctccgcagacattgtattaacaaactggctcataacaggggcagcatatatccggccttcttccttatcttcaactgtgcctgtctcgcccatcatggaattaagcatacttgaatagtccacactttcattttcaatggttataggatatgttgaaacagtatcttcctgaacacggtttatgtatgcctgaaatccggatgaaagggaaaggataagggcaatacctataatacctatgcttcctgcaaaagaggtgagaaatgttctgccctttttggtaagaagattcttaaaacttaatgaaagtgcggtaaaaaatgacattgacactttctcttttttaatttttttatccaaagctccggcaacaggagagatttccttgcctgcaggtatttcatacggagcagtatcatcggttactttaccgtcaaggagtcttatgattcgagatgaatactgctctgcaagttcagcgttatgtgtaaccatgatgatgagcttgttatctgaaatcttctttaaaatatccattacctgtacgcttgtttccgaatcaagcgcacctgtcggctcatccgcaagaattatatcagggttgttaacaagggctcttgcaatggcaaccctctgcatctgtccgcccgacatctggttaggctttttattaatctggtctccgagacctaccatctcaagagcttcaacagcacgtttcctgcgttctgctttggatacaccggataatgtaagcgctaattccacattggacaaaactgtctgatggggaatcaagttgtagctctggaaaataaaaccgatcttgtgattgcggtaggaatcccagtctttatccttaaattctttggtagaacggcctcctataatcaggtcaccgtcggtatatctgtcaagaccgccgattatattaagcattgtggtcttgccacagcctgactggccaagaattgatacaaattcatgttcacggaaagatatgcttatgccctttaaggcgttgacaacagtgtcaccggatatatagtctttggttatgttatttaactgtaacat

SEQ ID NO: 673 - DNA, 25678 bp, unidentified
  source 1..25678: mol_type = unassigned DNA
atacaaaaaacacctcccatgccgtttctatcagttatcactaactatagcatccgcacaggaggtattttagcgttctttgtcgcacctcttcaaaaacagttcgacaaagtttgcaccatattctatgtattcttagctatgcttcaaacttatatacggtaacagaatcgtattctctgccgttctccccgccaaatacataggaggggaaattctcatgatgaatggtatccgggaaatactgggtctccaatgcaaaaccgcagcggttgccgtaggtcaccccatcttttccgggctgtacatcaataaaattgcctgcataaaactgcactcctggcagggtggtgtatgccttcattactctgccgctcttcgggccttttactgtggcaatatgccgtaatgtaccgtcatcgttccatccatcgatcacgaaattatggtcatagcctccggtcaggagtaactgctcataatcttcccggatgtctctgccgatcttcttgggctgtgtaaaatccatgggtgtgcctgctaccgcacgaatctcaccggtagggatcgatcctgctgccaccggagtaaagtgcgaggctctcagccacagttcatgctcttcaatgctgcctgcaccgtgaccgtccagattgaaataggaatggttggtcaggttgataatggtcttcttgtcactggaagcatggtaatgcagagtcagctcattctcttcactcagagagtaggttacggataccttcttattgcctggaaatcccagctgcccatcctcatcctccagagaaaatgtcacgctgttctctcctatctccgcatcccagagtctcttatggaatcccagttgcttatgggtatgtaaattgttgacaccgtcatttttatccagctgataagtaacgccatccagcgtatactctgcaccgccggtacggttcgcacaggggccgatcaccgtgccgaaaaagctgtcgttgccgtaatagctctcaccattgtcaaatcccagcaccaggtcgtccgccttgcccgcggcatccggtaccagtacgcgcaccagagtagcgcccagatctgtcaccgctgccttcatacccttactattactcagggtatacagcgagatctctttcccttccgggcttttcccaaataaactttttgttactgccattgtctttccctcccacttttatccatttttatttcatgcatactgtctataattccactctgccctctaaagcgcggagtaatgttacctcatcaatatattccagatctcctcctacagggacaccactggcaattctcgtcaccttgattcctgtaggtttgatcagcttgctgatatacattgccgtggtctcaccttccagactggagttggttgcgataatgacctcctccacatccccctgtaagcgttccatcagttccttcagcttgatatcacccggtcctacgcccagcatcggagaaatggcgccatgcagtacatggtacacgccctcgtatttgccggtcttctcataggccgccagatctctggtgttctccaccaccataatggtacgatgatcccgtctgggattcgcacacaccgggcagagttccttatctgtcagggtataacactccttacagtaccggacattggctctggcctcgatcatgacattcgccagtctgtccacacggtccttcggcatattgatcaggtgaaaagccagtcgttgtgcggacttactgccaatccccggaagggctgccagttcttctattaatttattgatctgtccgctgtagagttccattagaaaggaaatcctcccaggccgccggtcattttgcccataagctctgcattggcttcatccgccttgcgcagtgcttcgtttgctgctgccacgatagcatcctgcagagtctcgatatcctcgggatccacgatctcctctgccagtttaatggatgtgatctcttttttaccgttgatggtcacttccacagctccgccgcctgcagatgcagtgaactccttggtctccagttccttctgtccttcttccatctgacgctgcattctctgtgcctgtttcatcagattattcatatttccgggcattgcgcctccgggaaatccacctctttttgccatgttgctgtttcctccatattatttataattgatttctccgtgctgcgcactttcgaaatcataacatatattcgcatttcggactattgtcctacgtgctcatatatggttgagttattattctatcttaccttatctgcaagtctgccgcaatcccaaattcacgcaggatcactcttcctcatcgatctccatgttgatgaccttactgagatccacatagttgtcttcgaattctctgctgctttccaccgtctggatcgtcacttcaatctctttgctggaaaaatcggacaacagcatttccagttgctgcttgttctgttcgtgggcttcccccttaaaataatcggaagccagtccgtcctccaacaccaccatgagcttgttgtctccacccagacttaatcgggcgtttttcagatacatcttcatggggttctctgcatttcccacgatggccggccatttccgtacgatctcctggatatccccgggaaccgccttcggcaactgtggcttcggctttgccacaccggcctgcggcactccctgtgctccgggagctccggcaggcatctgggccgccgtgactacaataccgttctcgaccttttcctccacctggcgaatacgatccaggacagcttcctgatccgtctccatctccggcttacacagcttgatcagcgcgatctctaccaggatacgcttctgcgccgcatagcggatctgtccggacagttcggagaaaatatgaatatagcggatgatctggtccatggacagcatggaagcttcttccttcagattcgccagattgtccgtagacatgtctatgacatcctccagattatccgctgtctgtaccaacatcagattccgcagataccaggtaaagtccgtgacaaactgtaccagctccctgccctgcatgacgatctcttccaacagttcaatgcagcctaacacattccggtccatgacgaagcgcagcaacctgctgaacacttccgtatccactgcccccagcacatccagggtcatatcgtaggtcagttctttgcccagatggaaggcaatacactgatccaacaggctcaaggcatcacgcatggagccgtctgccaccttggcaatgtagcgcagagctctgtcctccacctgtacctgctccgtgtccatcagttccttcatacgatccgtgatggtatcaatggagattcgtttaaaatcatatctctggcagcgggacaggatcgtaatggggatcttgtgcacctctgtggtcgccagaataaaaataacataagagggcggctcttccagcgtttttaacaatgcgttgaaagctccgggggagagcatatgcacctcgtcgatgatgtagaccttgtattttccctccgcaggggaataggatacctcgtcgatgatctcacggatattgtccacaccgttgttggaagccgcatcgatctcgatgacattcatgctagctcccgctgcgattgccttacaaatacggcattccccacaggggccgtcctctgtggggtgttcgcagttcactgttttcgcaaaaatcttggccaccgtggtcttaccggtacctcttgttccggtaaacaggtacgcatggccgatccggttcgcccgcagctgattcttcaatgtcgtcacgatatgatcctgacccttgacatcggaaaaagcgtccgggcggaatttccggtatagtgctgtatatgacatgttttttctctcttccttgtaactattcagagccatcaaatattagcagatgcttggcgaaaataattactcattaattttctgtcttaatcgccgaagcagatgcccagcagcttcgcttcctgtacgatggtagcatcgggatccacggtctttaacttgcccgctacatcctctaacggaacccttacgatctcacggttcttgtaacctaccatgaatccatactgattatccaggatcagcttgcctgcctcggagcccagacggctggcgaatactctgtcataagggcaggggcttccgcctctctgcatatggccgggtacggtgacacgtacttctctgccggtcttctcctggatctgtgcagccacttcgtaagatacggaagggaacggatatttttccatctttttcttgtagtcttttttggtcagggcagcatcttccctggaaatcgcaccctcagccacggcgataatggtaaaacggcagccctttttgtccctgtcttcgatcttctcgatcaccttatcgatatcataagggatctccgggagcaggatgatgtccgcaccgcctgccattccggcattcagggtcagccaccctactttatgtcccataacttccacgataaatactctgccgtgggaagctgctgtggtatggatgcagtcgatggcatccgttgcaatatccaccgcactctggaaaccgaaggtcatatcggtgccccacaggtcattgtcgatggtcttgggcagggtcacgatattcagtccttccttgcgcaacaggttcgcagtcttgtgggtgccattaccaccgagaattaccaggcagtccaactgcagcttataataattctgcttcatggcttcgactttattcagtccgttgggatccggatcctggatcgtcttgaagggggtacgggaggttcccaggatcgtgccgcccttggtaaggatgccggagaaatccttgtctgtcagcatgcggaaattaccgtaaatcagtcctctgtagccatcgaggaagccatagatctcgacctcttccttactgttcgccagggtcttcaccacacctctcatggcagcatttaatgcctggcagtcaccaccgctcgtcaacattccgattctcttcatcgtaggatcctccgttttctatatttcattattttctcttgcgtttgctgtaactatgcaaaactgtcttcgttctgccaatacttatttctattttaatacatttattttcatctgaaaatagtttgttgtaatttccggcagatttctcccctatggcaaaacaaacctcagaagcaccgggcctctgaggttcgcttatcatcttatcatacgttatttgaatttaaactttcctttgatcatggtcacgtagacagctgcgccgccaccgccgaccactacggttccggctgctgccgctgccgccacacggcctgcgttcgttcccttaccggaggtctccgttatctgctctgtgccggattcctgagagccggaagtctgggcggtcatggaatctatccgctcctcctgcggtgcttctccactcgattcctgcgtgtcctgtgcctccccggagggctttgccgcatcttccttacggttttcgtccgcagcgggtgttgtcgggggcacgggaattacagaaggctttaccacaccgggtgcggcaggcgttgccgtggctacgggaggtgttgccgcgtccgtggtcttctggtccgtattggacgcctgactgctgtcatcgtcgtcatcatcgtcatcatcgttactggcagcaggcttcttcggtgcgatctcataaccgcagatcgtacagatttccgcccgttctgtggtggccgcgccaccggatgcatgcttttccgtattgctggtgattccacagacaccacacttatgccagtgtccggtcatatcggacagatatccttctgcccagctatgatccgtcttcggcagcacgatttctgccgctgttatgctcttacttccatctgcggatgcaaaatacaggccgcagacgtcgcaggtccaatactcgatgctgccctctgcctgacaggtgggttccacccggtcgtggtgggtcagcgggccgtgaccggagttccgtgtcttcgatacggcggggcttgcgttataatcatcggtttccgcatagcggatctgtgcaatcaccttctcgttgtgaccgactccggtggatttggtctgcccccagtccgttccatcaaagctgaactccacgtcagtgcggtctgtggtgatctgcgccgccagatcgttgccgctgacggtaaaggtcatgtcaaaggcatccggatccggggtatcctcgcggtctgctctttcggttcgatgtatggttatattcacacagatgtctttataattttgcgacctcaatacaatttgaatagccgcagaatgcttgatatcctccatggtgttttctcccaatgtgaatatcagcttaccttccgaatatctgatagcctggtctgttgccaaaacgttagcatcatctgactttaccatattgattaattctgtcgttcccctgtcttccggcagtcccggtatctgtacttccttctctcctttggctgcccaactgtaatataaattctgcattggaattgccgaaacttccgccttttcaattgccagcttcaccggtgcagtcaacggcttatagtattccggatgctgtaccggggtaaatgttgccgtgtaggttccatcgtctccgacacaaggaacctcgtctccgatgatctgccaggttccgtcgatgatctcggttcccagttttgccgtcagtcctgtcactgtgagttcactcagcttattgccataggttccacaggcaatgccctccccttctacagtaagtggagccggggcgatgtcaacgatcagattcttcgtcttctcagagaagaaagaattgtcatttcctttgtagacgagggtaaacgtggtcgcacctgcagtccgcgcattgtaggttgcggtgccgtcccggaattctgccgcatttaccaccggggtatcctcgatccggatctcaaagctgccctccgtatcttccgcagagatgttctttccgtttgtcacaaagtttaccagtgcctttacattaaaagtaatatcttgtccataggtgggaatagcgttatctgttctctcgaacagcagacccgtggtgtactttacaccaactgcgttattctccccaagagaagggtagtaggcgattcccttctctttgtcgttggctttctttgtccagagttcggtgttaaagtcgtatgttttgagttcttcgaaaaagctggaagaggtcagttgcagggtcgtacgccccaaattgcgtttatcatctgctttacatatatcgttattgaaatagcaattcgttgtaccgtaatctccactgttcactattcctgcacaatctttatcacttgtaacagcagctatactaatgcaatgatcaataactttaaatggactataaccgcagattcctgccgcataatactctccctgcacgtctcctgcaaaaaagcactgggaaattatagtgttttgtccggcattgctgcagattccacctgctgtatacccttttaccgttccggtaaaggagcagccataaatttcgcccacagacaagtttccgcaaattcctcctgtctcggtattcgaagtcgaaacaatcactccgttggcagccaaaagcattactttaccgctttctgcgatctgaccatttatgttacctatcccgccaaacaagcccagacaattacctgtcatattgacatggcctatcgtatgtccgtctccactgaattttcctgtgtacggagttcctggatctccaatggaactgagttgtactccgctcacatctatatcgttctccaagacgtagtttccgctccattttgtatcatcccgtccgatggctacgaattcctccgccgtggtgatcagggtatagatatcccagtcgtcgccattcgttgtaacatagttataaaccggtacggaagcagccttcatctctccgatctttgccacctttgtcagattgatgtaagtccctttggctgtaccaaatctacttcctgtacctgtagccactgcagtgttggtatcgacactgccctcattccagattgtagaattcaagccctccggaagtgcaccgcaaagctggctggtagtcaggggaatcaccttatcgcttgctccttctcccaccccggcattattcaaatcactgttgtaatagcagttgccgataaagttcatatcattcgaatccgtgcttccagctatgccaccaacatttttgccattccctgtaatcttaccacaattcaggcaattactgatgtcatacctattcgctgatgcaccggtaataccacctacatagctatcctgttgagaaactgttacagcacctatattataacagtattgaactacgccgtttccaacgtttccttcataactggcagtgcccatgattccgcctgctgtagaaattccacttactgaactgctattgtagcagccggaaatatttcctatcagacttccgcatacaccgcctacctgccgcctcgcacaaatcgtgttttcgatactatagcagtcagaaatatttgctcctactccagcaattgcgcccacaaagcttttaccagaaatattagccccctttactgtgacactttttatatagctggaagcagtggtaaagttgtggcactctccaaacagacccacataggaggcttcctttcctgtaattgtcattccggttattgtatgtccgccgccgtcaaagcctccccagaaagggttgccatctgtacctatcggcgtccactccttaccgccaaggtcaaggtcagaaaccagcaaaaaatgctccctttcataatccgtgccattattcacctgctgcgccagatacgcaagctgctctgcattttcaatcagccagggttcttcttttgtgcctctaccttgggtaaaagctaccgctgtgccatcccaggtatctactgtttccccctccgctctcgcactcaccggcacagcgatccacgccagtgccgccagtaccagcaaggccagtctcatcttcatgctccatgcttttgtacttttcttcataaccctcatgcctttctatatcctgcaaaatttcacatatttcccaaccctttgcagatgtaaaatccaattttgtttttatactatccgtatcatttattataccaaaaaagcaaaggcaccgtcaatattttccatacgattcgtctcatatttttataaaattttgttaaacaagtgcgcccaccgcaaaatcgagcaggctggctcatcgtatacgcaaaaagagtgaccggatctctccggtcactcctcgttgccttctctgaaaaatatatccagttttcccagacatttgatcaatgtcttcatttcttcctcgtccagatcccgaatgatcgtatggatcattttcctgtggaaatctctgtgatggaaaaaagcttttctccccttctctgtcagggtcaccagcactacacgtttatctctggtgctgcggttgcgggtgagatatccttttctctccagactgttcatattcgtggtcagggttcccacggtgacatgcagttccccggcaatcctggacatgctcttgggttcctcgataccgatagcctccagaatgtgtatgtcattatttgtaatatccttgaattcgtctgttatgaccgcctttgcctctgcgtccatcacgttatggaacagattcaccagcaattcgttcagcatccggttgttgctttttcccatagtttcctctacgatatctggaatttctctgtcgtatgccgcgatccttcgaagctgccttctcggacgcatatccgagggcttcctgcccttcgaatcattttcagtataccgtctaccaggtcatcacgcaagccccaatcgtaagcccggcgccgaatcccgccagaacgatgcggtcaccgcggtgcagctttccctgcctgtgcagttcatccagcagcaccggaatggaggcagaggacagattgcctaccctctccagatttgtaggaaatttttcacgatccgcatgaaggcgtttcgccactgcatcaataatacgtgcgttggcctgatgcaatacgaacatatcaatatccggcacagcaagtccggcatctgacagtgcttcctcgatgcactgcggcacccgtctggtggcgaaccggtacacttcctgtccatccatctgaatataatgttctctgtcatccgtctgctgtttttgatccgtttttgccgccgaagcccttgcatacggggttgtcaattctctcgctccacattgcaggactccaccgccggtgccgtcggagtgcagtgcccggcccagaatgcctgctggcggtatccgtttctcctccgccgtctcctgcatccctttccctgtctccggcaaagcgttactgtattccaccgcccgggactccgtcctgcatctctctacaactaccgctccggcaccgtctccgaacaggatgcagctgccccggtccgtccagtccaccagcttggacaaaacctcgctgccgatgaccagcgcattttccgcaagtcccgtccgcagataagcatccgcagtattcagggcaaataaaaatccggaacaggccgcattcacatcaaaagccaaagcattcaccgcgccgacagctgcctgtacctggcaggcacagcagggcagatactgttccggagaacaggttgccaccaggatcagatcaatctcttccgctctttttcctgcctgttccaacgctttacgggctgcttctgacgcaagtgtcacaaccgtttcgcccacagacacatgacgctcaccgataccggttctctcccggatccattcatccgaggtttctaccatctgctccaattctttatttgtaacgatcctccccggaagcgcacttccggttccggtgattcttatggtcctcacgccatttcctccatgatatccactgttctttctattttctgcgcccgccaggcattgctgccacagaacaacagtccgttatccacatctcccgttgccgcattgatcaacgctcgggtgatgcaatacggtgctgtcttcggatcgcaggtcttaatgcaatgtctgcatccggtcataaaccgttccccggccgccaccttttccagaaaagcattctgtatagctctgccgggcattcccaccgggcttttcacaataacaatatcttctttctgcgcccggagatactcctgcttgtacgcctccgccgcatcacattcctctgtggtcacgaaccgggttcccagctgtacccccgcagccccgagggacaggcagtgctccagatctctccggtcataaatacctcctgctgcaatcagtggaattcccagttctgctgcctgccggatcattgccgtaagttctctctcatagttctccggtgtgtaagcatccagttcttcccgtttaaatcccagatgacctcctgccaacggtccctctgccacgataaagtccggctttctgtcgtattttttcatccagtatttcgtgacgaccgacagggcacgggggctcgacacgatcggcgctaacatcgtccggtggctgcgcccgggcattccgttttccgtctctgccacaactccgggcagatccagcggcaagcccgcaccggagataatgcagtctgtaccagcctgcactgctgccctgacataatcctcgtagtgttgcgttgccaccatgatattgacaccgacgataccgccttttgcgatctgccttgctttttctatttcttttccgatagtgcgcagattacaggcgatgggatctctgtcaaaatccggctcccggaaaccgatctgggcagtagaaatgatgccgatcccaccggcagctgccactgctccggccagcccggacagactgattcccacacccatgcctccctggatcacgggaatatctgcatgtaattcccccaggatcatttttccgtgcttcatcccacatcacctctcgttaccgctttaatacttgcggaacctttcataacgttcctctgcgatttgttcaccggtcatgccggtatatttttgcagaaattccttgatatgttccttgagatacccgcctatggcttccacggtactttggtctgccccgccgtattccggtacgatccgctcgatcacaccgaggcgtttcagatcctcggatgtaatattcatgacctcactggcttctctggcacggtcagcatccttccataatatagaagcaaagccttcgggagacaggatcgagtatgtggcattttccatcatccatacctcattgcctaccgctgtagccagtgccccgccgctgcctccttctccgataaggatgcacaataccggtacttttaaggctgacatctccagcagattccgggcaatggcctcgccctggcctctctcctccgcctccacgccgcagaaagctcccggcgtatttacaaagctgataatgggtcggttgaatttctccgcctgcttcatcagacgcagtgccttacgatacccctccggcatgggcataccgtaattgcgtctggcacactccgcaaaatccttgcccttcacatctgccagcactgtcaccggctgcccgtccaggaatgccaccgcacctaccagtgctttatcatccccataataacggtcgccgtgagcctccactacataatcgaaaatgtagggaatatagtcggtcgctgccggtctgtccactctccggacggtcttgaccttttcccatgccgttctggggagtgtcagtattgaccgttccttcacgatctccgtaggttcaaaatggaagtcaaaatttttcttaaaatccgcataattcccctcactgcaccgatgcgtcgtgatcaggaaatataaggtcttcttcagattctcccggcggacgataccgtccacaaaaccatgctcctgcaaaaattccgctgtctggaagccatcagggaggcgctgtcccagagtctgcttaataactctcggtcctgcgaagccgatcaaggctcccggttccgccatgatcacatctcccagcatggcaaaactggccgttacaccacctgtagtgggatctgtcaaaatagtcgcatagagaagtcctgcttctccatgccgtttgatcgctgcggaggtttttgccatctgcatcagtgacacgattccctcctgcattctcgcaccgccggaacagcagaacaaaaatacaggcagccgcaattctgtcgccttttcaattgcctgggtgactttctcgccgaccacatgacccatactgcccatcataaatttggattcgcagatgccgatcacagccttttccccgtagatctcgcattcacctacagtcacagcttcttttacgccggatttttccctggcctccgacagcttttcttcatagccctcatatttcaatggattgctctcttctatctcctcgaaccagggccgaaagcttttccggtctgccaccatgcggatccggttgtgggtcttcacccggaaataataaccacactcatagcagacatatttatttttcgctgcccggtctctgtttatcattttcttacatttcgggcatttgatctctgtttctgtatctacacttcccatacctgcacctcttattctgcgtcacttttatctctctgtcccgctcataaaaaatcacttccgcagattattcttattttaacgcaaaggtaagctctgctttcgccgccagttttccgtttaccttggcgatcgcttccccgacacccaccggtcccttactgcggataatggtggtctccagctccagggtgtctccggggcgcaccatctgtttgaattttgccttgtcgattcctgcaaaataagcggtcttaccacgatgctccggcagagacagaattgctacagcccctgtctgtgccagtgcttccatgatcaacacgcccggcatcaccgggttccccggaaaatgcccggcaaaatacggttcgttaaaggtcacattttttcgtcccactgcccgcacaccgggctccagctcctcgatcgtatcgatcagcagaaatggatgtctgtggggcagaatctccatgatttcctgtgtattataaactgacattgttcctccgttccgcgaatgctgtcgtatcaactacttcctcgcattgtgcaatcgtcctcgttgatgctctgccttctatcctgtgtcctgaacatctgctgcggttattctgtgtacttcttcaacaacagactcgcattatgtccgccgaagcccaacgaattggtcaatgcatagggcacctcttctttgtagctgtcccggcagtaattcagatcaagttcctcctccgtctcacgcagtcccacggtgcggtggatatagccttcctgaatttcttttacgcaggtgacaaactccactgcacctgctgctcctaaaagatgtcccaccatggatttggtggaattgatcttcatgtcatatgcatgttctccaaatgccagcttgatcgctctggtctcgaacaggtcattatgatgggtgctggttccatgggcattgatataggtaagctcttccggttccacaccaccgtcttttaaggcattcagcatggcggtggctgctccgctgccatcctccgcaggggatgtaatatgataagcatccgaagaacagccgtagccggtcagttccgcatagatcttcgccccgcgcctctttgcatgctctagctcttccagtaccacgatagcggaaccctctcccatgacgaagccgtttctctccttgtcaaaaggaatggatgcccgttccggatcctcactaaatgacagcgctgtcagtgccgaaaatccggcaattccaatgggggtaatggagctttccgttcctcccgctatcattacatccgcatcaccgtactggatcgtacggtatgcttctccgatggaatgtgtaccggttgcacaggcagtgaccacgttcaggctcttgcccttcagcccataggcaatgctgacattgcctgctgccatattggagatcatcagaggcaccagcatggggcctaccctgccggggcctttttccttcaggcggtcatattcccgctccatggcctgtaagcttccgatgccgcttcctacactgcagcccaccatataaggatcttcctgttccatagtaagacccgcatccgtgatcgcctgtccggcagccgctacagcgaactggcagaactgctccattctgcgggcggattttttgtccatatattgtgcgggatcaaaatccttcacttccgccgccagcttacaacggtaatccgcagtatcaaaataggtgataggaccgaatccggtcttgccctctttgataccattccagaattcctctacgctgtttccaatcggagtgatagctcccatgcctgttactacaactcttctatttttacccatacgtgatatactccctcgcatcctgacttattttctatcctgctgtactgttagcggacatattttctattctgctttcctgttgccggaggtattttttacattgccataccgccgtccacgcacagcacctggccggtaatatagtccgaggcatctcctgccaggaacagaaccgcctgtgcaacatcctccggtcttcccattttcttaagcgggatctgtccaaccgcattatcctgtaccgcctccggaagcttatctgtcatatctgtccggataaatccgggtgccacggcattcacacagacattcctggatgccagttctctcgctacacttttcgtcagaccgatcagtcccgctttggaggcagaataattagcctgccctgcatttccggcgatgccactgacagaagagatattgatgattttcccatatctctgcttcataaaggtcttcgtcagatgccggatcatgtgaaatgcgcctttcaggttcgtatccaggactgcattgaattcttcttccgtcatccgcacgatcagattgtcccgtgtgatcccggcgttattgacaaggatgtcaactctgccgtatttctctgttactgcctttacaaaggcttcactctctgtaaaatctgcaacattgcatttcacagcctccgccatgccgccttggcttcggatgtcctccgccactgcttccgccgcctctgcagagccgttataattaatgatcaccgtggctccttctgctgccagtgcctgtgccactgcttttccgatgcctcgtgaggcccctgtgacaatagcaactcgtcctgtcagactttttcctgtcaacatgccagctcctccatcacccggtccagatcctccggtttctcgatattgtatactttgacatttctgtcaattttccgtacgaagctgctgagtgtcttccccggaccgatctctatgaaagtatccacaccatctgcgatcatccgctctacgctctgagtgaaatgaacgggactggatacctgttgtttcagcagttccgcaacctgtgacgcatctgtcacataatccgctgtaacgttggacacataaggaatccaaggggttgacagcttgacgcttttcaattcttctgccagctgttctcctgcattttttaacagggctgaatggaacggtccgctgacctttaagggtacacagcgttttgcgcctgcttccttcagcgcttccgatgctgcctctactgcatctgcctccccggtgatcacgatctgtcccgggcaattataatttgctacggagacgactttaccggtttcttttgctgtccgttcgcagattgctgccacagcatctccgtccagtcccaatactgctgtcatggctccgccttccggataggcctcctgcatatagataccacgcatccggatgatacggaacagatccggcagctccatcacaccggctgcagccagtgccccatattctccaaggcttaatcctgctgccatctctgctttcagaccctttgcctccaatactttcagaatagccacttccatggtcagcatggcgatctgcgtatattctgtaatgttgatataaggattttcctcaaaagtcagctgctccatagagtacggatgtccactatccgcctgtgcttcccgcttatcctgccaatacagattctggagcaccttgtctgccagcttccataccgcctgtgcttccgggtaagtatcatagaactccttgcccattcctatgtactgggagccctgtcccgggaataaatatgcgatcctgctcattttgtcctctcctaattactatgtgatgctattgttctcctcggttacagcacatttttataatgcgccgttttccatataactacgccgcctgtcgctgttcgaaatctgttgtcagcggttacctgtcgctatatttttttatgctgtccttgtgccgctatgcactcctgcgcctgctgcactgtttcttcaataatctcacggcaggtctgttctctgcggatcaagcctgcaatctgtcccgccatcagtgttccgtttacggtatctccgtcctgcactgccttcctgagagatcccagcgtcagcttttccagttccatgaaatcggcattctctttttccagcttcagatactccctggtcatctgattacgtaaagaacgcaccggatgtccggtagacattcccgtcaccacggaatcgatatcctttgccttgatgatctgattcttgtaattttcatggacaatggattccttggatgctacgaaccgggtacccatctggattccctctgcccccagcatgaaggccgccgccatgcctctgccatcggcgatacctccggctgcgatcaccggaatcgataccgcatccaccacctgaggaaccagcgccatggtcgtggtggaaccgatatgtccgccgctctccatgccttccgccactacgacgtctgcgccggcccgttccatcatcttcgccatagccacactggccaccaccggaatgactttcactccggcattcttccacagctccatgaattttcccgggtttccagcaccagtcgttaccgcttttaccccttcttccacgacgatcttcgctacatcctccgcattgggattgagcagcatgatattcacgccgaagggtttgtcagtcagttctttgcatttacggatttcctcccggacaacctcaggcggagcggaagcggcaccgatgatgcctaagcctccggcattcgataccgctgccgccagcttatgttctgccacccaggccataccgccctggaaaacgggatattctatttgtagaagttccgtgatctttgttttcattgtctttctgatccttctcgtcattctgcgttatattacatattctgatgtcggggtcaaaagcccccgaatttgatgcctgcggattcttgcattcagtcagatatgccgttcttacgcatgctcctgaatatatctgataacatcacctactgttgccatattttccaattcctcggaaggaatggacacaccatattcctcttcaaacgccattaccagttcaaacagatccagggagtccacttccagatcctccttgaaacgggtcgcctccgtgatttctacattctcctggtttaactgttctctgatgatagctgctactttctctaacatgtttttgctctccttatgcattcttttttaatattctgtctttgccgctttgttctcttcggcacaattgctttggcttcgctatatcgtacagcattgccctgcgaatactttgattatcaaagtatttatttgcaatatactacttagatgttgttctgtcaacatctttttttataactaccgctttcaaccttattatcacgtaggcagtaacaatctcattacaaaaggttttttcgtttctccccttgccaaaccggcatttttcagataaaataatctacgttgtaatcttttggagacgtatcgaagtggtcataacggggcgcactcgaaatgcgttagcccttttcgggcacgtgggttcaaatcccaccgtctccgcgcataaataaagccggtaatctgcgaaaacagactatcggcttttgtattttagaaaaatgtgattattggtatttgattttttcagaaaaatgtgcaaaacagttgtttatttttcagaaaaatgtgttatgctattattattcccgaaaaggacggtgtatttatgaagcgaaatgcaatgcaatccctgataaactggaaaaacgacccggaacgaaagcctctgattttgcgaggtgccagacaggtgggtaaaacctggctgatgaaggaattcggacagacctgctatgctaattatgtctatttcaacttcgatgaagaggatgaattaaaatccatttttcaggcgaacaaaaacccccaccgcattatcgaattgttgtccatgataagcggtgaaaaaatccaacccggtgagactctgatcctttttgatgagatccaggaatgtcccgaggccttaaacactctgaaatactttaaagaaaaagcgaacgaataccatgtggtttccgccggaagtctgttgggaaccattttagcccagccaaaatcttatccggtaggcatggtaaatctactcgatattttcccactgacttttgacgaatttctcgaagctacggatcctgccctatatacctattatgacagcattcaaaaagagcaaacgatcgaagagatttttcactctcgtctatctgaagcatgcaattattattttatcatcggaggaatgccggagtgcgtatcctcctggatcaaatacaaggatccggcaagaatctcccagatacaacgggagttaatcgaaatatatgaaaatgacttttcaaagcataacgggaagatcaacagtggtcgtattcttctagtattccgcagtatcgttgctcagcttgcaaagccaaacgagaaatttatgtatggtgctgtccgcgaaggaggaagggcaagagattttgaagaagctatcgaatggctggtctcggcaggaatgctcaatcgcgtatataatgtctccaaaatggagcatccactttcagccttcgacaagctggatcagtttaaactatttgtctttgataccgggctgcttaagcatatggccggtatcgacaacagtgccattctgttaaaatcaagctaccagttcaaaggagcattaacggaaaattatattttacagcagttgcagggacaatttgaaatcgctccccggtactactctgataaaaacagcgagattgactttgtgcttcaaaacggaaccgatatcattccggtggaagtgaaagccggggaagataaatccgctccctctttcaaaagatatgttgcagaaaatcaccctgctgcagccttacgtttttccaaacgcggctaccggaaggatggtgacatcaccaatcttccactgtatcttgtatgtaagaccagagatttactataaatatatttttctaaaatagatcagacatttttcagcatttcctgcataaccgggtaaatctgctccgccatgcgcaggaaacccagagtattcgggtggcagccgtcgacggtgcattcagggcgtccgatcttgccgaagagctcatgtccgtcgacaaaccaaatcttctcatcgcctctgcgtttcgccgcctcgtaggtagcgtggacgacatctctacggcagatgctgtcctctggctccgcatcggtatcgggacggctgaggaagagcaccggaacatcaggatgcgctttccggatgatctcaaaaaacggtgcatgggtctccgccagatgctccggactcggcgaattgtgatcataatccatgacaaagagactcatctcgggaaatcccgcaagatattccgcgaaatcctcttcgcctcgtgcgctgccggaaaaacccatgttacggtagtccgcatccagccatctgctgacgatactggtgtaagcatttccgggtcggggtgcgcatccgccctctgtaatcgaggaaccgtaaaatacgatcggcttttccacggtatactcgggtgcttcccatagcttcgcgctctcctcgatgccgatctgcatctcaaggagatgatcatttctcggcagattgatcgttacgagtacctcctctcccgtgaggtcaaaagtcttctccactgtaatctcgccctcgatatggatctttggcgcgatgtaaccgagatatgtcgcctctgtgccctttccgagataaatatctgcgcccgccgagccggacagcggaatattgatatcctctttcgtacccgcaagagtcatttttacatataatttctttgcatccgtctgaaagcggactctgccgccgacagctcttcttccgaggtagccgtactgtgggaagcgctccagtgcctcttcgggcagcctgaaaaaatgtcttttctcactgtctgccacagcgagaccgtagattttcaacggtttctccgtgatatcatataatttcatcatgtctttttcctctcatccactcaatagcatcattcgctaaggtttaatgctggctccggcggaactgccccggtgtcatgccgtattttttcttaaagctggtcgtaaaataggatgcattgctgtagccgacaagctcacagatctcctgtatgctgaggttctcccgctcgaggagtagttctctcgcccgctcgatgcggagcgccaccagatagtcaggaaaggtgcagccgcatttttcatggaagaggcggctgaaataggacggtgtaatatgatatttgtccgcaagatactgggcactgatattcggatcgccataattgctctgcaaatacgctatcgccttctccacaacgtcctctctgcccgtctgccgattccgctcgaggatcagccagatttcttctgccatccggaaaaaccagtcctccgcatcgtccatatattcataggatgccagttgtcccgccagtacctcgtaatccttcttcgtcaacggttcaaaacggtattgcaacgaattccggtaggtctgcatctgcccagcgatctccatcagtgcatcctgcgctttctggatcgatagctttttgagttccccgacaatcctgcggtactccgctgaaaagcctgtccgatcactctgccggagtctctggatcaattcttctgatgacggtgcctgttccccatttaacgccctctgcgccatctctccttccgtaaccaccgcacccataccatagataaaacggtatgctgtcgctgcccgcgccatctgatacatgagatttaactccgcaaatccctctgtttcgcccttttctccactgattcccacatccatgccgatatggatcagctctccggtgacttcaaggatatgctgcgacgccaccgtcacacgttcctccgttacgctctcctcactgaacagaatcaccgcgataaactcacggtctaccggcaaaacgaggacgttgcccaactcacggagcgtctgctcgacgatcgtcttgatcgtctccatctcaaaagcgatcgcttcttccgtgttattactgtgcagatcctggatatcgctgaggcgcatgaccacgacacgaatccggacacccggcttggcgtaaatctcttccacccactccggcaattttgcggttttctctctgctgattagataagctgcaagatcctcctgctctttgcgcaggttgatatggttcagtctctgcaccatcgtctgataggtctgggcgatgctgtacagctccgtattctccagctgtctcgccattgcctcggagggcaatccctcctcgctggcagtccgcaccatctcgccgatcggattgtatacacgattcgacatcagcagcgcgagaagtagtacgatgatcgccacaagcagaccaattcccaaaaagaggaagccgacccgggtcatcgatccggtgagatgtcggtaggaaatcagccataccagcgtaaattcgtcatcaatctccgtagctacggacaggaatctcccctgcgccgtgcgcacaatctcggcggacgtctcggtcagatttctgtttttccacagaatatcctccagacgttccccgacccggtacatctcccgcgttccctgctcataaacgatattcccgtccctgtcgatcagcaggaactgttcctcctccgtcttcggcagggttgaggtcatgatcttgtcgagatccatgttgacttggatgccgctgcgtttgcccccagtggtgggatccatcgatccgctagtcaggcagaggaggttctggctctttccatagatatccagatatggaatgaccgcactctcgtgaaacgtgctcatctggaaaatatccagcatccgcgcatccccgttctggtcgatgggataggagggatttgtgcttttgatcagataatcgtcctcgagccagacatagacggagtgaatcatcggattcacagaaacaagattcgtaacctcctgcgccgcgatccccgcggtgttgtcccatgtaaatgtattccggttgatcagcttgcggatatagacgtcattttcgagcactgttaccacattctccatggatttgccgtaattctgcaataccagtacataggtatccatccggctctcgtaatcactctcctgttgctggatctgcgacacacggaaccacccaaagccgagaatacacgacagcagaatgcagactgctgccagtccgaagcacaccgcaaatattctcctcagaatgatctttcctctgtatttctgaactatcttcatccgaatttttactctccatctgaatcttttgttacacttattctatctgctccgccgcccagaagccttttaattttacaaacggcggttccgaagtgcttaccagccgggcactcatccgattacccttccacgcaaagtccatcgcaacgtgcccttcctcctcatcaataagaaagctatgaaatacaaaatgtcccaacatccactgtccacggcacatgcaggtatagtctgtctccgggaacttctggtattcccatgtgtcgtcaccataataccactcgtaggttttctctgctgacacaagtattatgatacgttgctcccagtcaaagacaaccgtctcccaaccactggaatcgcaggctgctcccgctttgtcctgcattccataaaagtgccagtgctctacaccgcgccgtctctctccggctggcagtttttgtgtatttgtatattccggcattcctgtcaccgcaggatataccgtatcataaaagcagtcatagatcatctgcagtcccgccggattcccgatcgtatctgccatcgtaaggaatacaagatcccgttcggggtaacagagcgccagctgaccgcccattccatagaatgcaaaaccatcataacgggtcttccacatcataaaaccgtaacccagctgctcgtcaaacgtcggctgaagattcgtcggcacctgacaagcggtcgcctcccgcaggaaatccgccggaatcagctgctcaccgcccaaaacaccgccgcggcagcataacatggcaatccccgcaaggtcactcagcttgctcacaagaccgctgccgccctggctaacaccatagggatccttgagaatataggcttcctcggagaatccgaccctgcgaagcacctttttccgcagatagtccaacatatccatacctgtcagcttctccaccagcgccgccagcacatgggacgccgatgtgtcataattgaacaccgttcccggcacatgatccggtgtcacccggaaaaaggactccacccagtcaccgtcatagcgtttaaaggtcgtggattcataacaggtacgcatcgtaagtaaatcccggatcgtcatttcttcgcaccatggatgtgcgccaccctccggcagcttttccggaaaatacgtacagatccgatcgtctaagccaagcttgccctccgctgccagcagtcccgtcgccagcgaggtgaagctcttcgtaatcgaatacatccggtgcaggctgtccctatgaaaagactcccagtaatgttcgccgatcaactccccccgataaaggatctgatagccgtgcatatttaaccgcaggctttccatccgctgctccatgctccggactgcgttctgccatttattgttcatcccgaaatctcctcataatctttattatctattttaatcatctctattttaagaaaaaaagctgcctgttgcaagaacaggcagcccgaaaatcatttattagccagaaattcgtcgtactgcttccggatctctgctacataggtatccca

SEQ ID NO: 674 - DNA, 10323 bp, unidentified
  source 1..10323: mol_type = unassigned DNA
ttaaatgctcgtatcctcatatttatataactcccactctccacgatgtctgcgaaaatagaaaatattggtatatccgtttccaatcccatttactttcaggattttcgtattagagtaatcgctattcttttgtccgtaattgatattggacagtctgtctacaggcaataccggacggaaagcataccactgattcaagtcgagtgtagtctccaggatagaaaattcatcatccggatctatcgtaatatattctaaaggttcgcgaatatgccggctctgataaacactatcagtcacaaaacgcaaataaaacgcaacgaagtcttcattctccccctgctctatctgccggagattaatagcttccagcatccagacgcccttggtacgttcgaaatagtatttcttcaccatacggttttccagcaaaatccattccacctgtacggatgtcaaggcagtatctcccaccaattccaagtcatcttcatcatcgaagagcaatgtgtaatagctctgctgggtaaacagataatcatgttcccactcccccctctctattttagaaggtttatcaacgtcgtaaaaaggcaatggaaacttagtccgctgccgttgcagagcgtcatccgaagcgtaactatagacgaaatcatcaaacgattcatccgcttctattggcttagggtcattatcaacttcagcctgtggtacagtatcagctttgtgtgtagctgaatccaccaaattggtgattgtcgcaaaaggatccatcttcgtcttcttgttgccgcacgacaccaagaaaacgagaagaaagaaccccaatcctatttttctcattctttaccggcccctgaaggtcacttatttagtttagctcttaacttctcaagcatgtccaccgtcatggactctaaatcatattgcggtttccaatcccactcttcacgagcacaactgtcatccaagctatcgggccaactgtcggcaatggattgcttcaatggatcaatctcatataccatttcaaaatcgggcacatgcttttttatctcccggcagatctcctccggatcaaaactcatggcagcgatattgaaagcgttccgatgcttcagacgtgttgggattgcttccatcaacgaaatggctgcattcagcgcatcaggcatatacatcatatccatataagtaccgggtttcaaaggacatacgaacttttcacctttcactgcggagtaaaaaatatcgaccgcatagtctgtagtcccccctcctggaggagttacattggaaatgatgcccggaaaacgaaccgcacgagtatctactccatatttagtataataataatcgctcaacaattcagtagttactttggttaccccatacatcgtacgaggacgctgaatcgtatcttgcggcgtcttcacatgaggtgtagcttctccaaacgaaccgatagaactcggagtaaacactgcgcaaccatattcacgtgccacttccagcacattccataatccgtctataccaattttccaagccatggccgggcggctttcggcaaccaccgaaagcaaagctgccagattataaatcgtatcaatcttgaattggcgcgccaccacttcaatagactgacggtcggttacgtcggcaatagcagaaggccccgatgcttttaattctcctttaggcatagcactcggaatgtatccggctataacatggtcatctccataacgtttacgcaattccaatgtgagttccgaacctatctgtccggttgctccaattaccaaaatattcttcatacgacttatttataaggtgctccatccttagagacgtgcaaatatacatacttttttttcattattctatcattttgctattgtttatttgaagaaaaatcgtgtcctttgtatcgtttagtaataagatgacaaacttttaatttataaagctatgtacgggaaaatgaaagaacacctcagcaatacgcttgctgaaattaaagaggccggactctacaaagaagagcgcctgatcgagagtgcgcaacaagccgccatcaccgtaaaagggaaggaagtgctgaatttctgcgccaacaattacctgggtttgtccaaccatccgcgactgattgccgctgcccaaaagatgatggatcaccgtggctacggcatgtcttccgtacgtttcatctgcggaacacaagacatccacaaagaactggaagctgctatctccgactatttcaaaaccgaagacaccatcctctatgctgcttgtttcgatgccaacggcggagtgttcgaacctctattcagcgaggaagatgctatcatctccgattccctgaaccacgcctccatcattgacggtgtacgcctgtgcaaggccaaacgttaccgctatgccaatgccgacatggccgaactggagaagtgtctgcaagaagcacaggcccagcgtttccgcattgttgtaacagacggtgtattctccatggatggcaatgtagctccgatggatcaaatctgtgatctagcagaaaagtatgatgctttagtcatggcagacgagtctcactctgccggcgtagtaggtccaacaggccacggtgtaagcgagctattcaaaacttacggacgtgtggatatttacaccggtacactgggtaaggcttttggcggagccatgggcggattcaccaccggacgcaaagagattatcgacctgctgcgccaacgcagtcgcccatacctgttctccaattctgttgctcctgccgtgatcggtgcaagtatcgaagtcttcaatatgctgagagaaagcaatgccctgcatgacaaattagtagaaaacgttaattacttccgcgaaaaaatgactgccgccgggtttgacatcaagcctacacaaagtgctatctgcgccgtgatgctgtatgatgccaaactttcgcagatttacgccgcccgtatgcaagaagaaggcatttacgtcaccggattctattatcccgtggttccgaaagaccaggcacgcatccgtgtacagatctctgccggacacgaaagagaacatcttgacaaatgtatagatgcattcatcaaggtaggaaaagaacttggagtattatcgcgctaaagcgcgataagctacgggctacaaatgacgagttacaagttgctgcgctgtattcgtaagcgaataattgttcgccagactaccacaccgaaaggaacttacaactcgtcacttgtagcttttaccaccggcagcaccaccgtaaacctgcttcctttccccggttccgaccacagttcgattttgccccgcaatttttctacaatcacctgacagatagaaagtcccaagccggctccttgcgaaaactcatcctgtttatagaaacggctaaagatcattttctgttccgagagttcaatgcctcttccggtatcttccacgtagatagccactcggtccgattcagaaagataacggtatcccaacttgatatatccagttttagtaaacttagaagcattattcaggaaattagtgatcacctgtgtcaagcgccccttatcaaccatcacttccacctgcaccgcatccaactctttgatgaattccaattgttcggaaatcagcatctgatgagtcatatatatactgtcaaccaattctgaaacgaaacacttctcgtattcaaatgacatgtatccggattcgatgcgcgaaagttccagaatatcattgattagtttcaacaataaatcactgtttttattaatactgccgatatattccagacgctcctccggactcacaccatcatcaagcgccaatatattggagaagcccacaattgcattcagcggcgtacgaatctcatggctcatatttgccaggaaagactgctttaattcagccttttcagccagtagtcttgcttcttccaattcctgttcacggtctttaatcgcctgtatattcagcaacagaccggcagctttatatcctccaccgggaagcagtatcgttttatagcgaaactcccaccactgatagcctttttcattaaagtcacaacgcacctgagaaaccactttgcctgccttagaaatgtttttccagtaccctctcacctcatcccaatgatcgggatgcataaacgacaatagttcctcaaagccaagtgacttagcactcattttctgtgatatccagaattccttttcaaatacaaaatggtcattttccagcttccaggcaaaagtgtcgctaccttcaatagccaacgccaatgtttccttttcactttccagttcataaagggcacgtctcttccgcccttgttcgcggcgataaaggaagaagagccagacaaacaacgtggaaagcagaatgataatcaacacaacaccgattccccatactaccggatattcttcctggaaaggaatatttataatcgtacattccgccggaatactctctttggaaataccccgttgctgcatcacgttccagtctaccacatatttcttacggctctctctgacgggtatatccgaaggcttctcaccatgcaaaatacgtatggcagcactcacttcctcttcggccagaatcgggaatgtcgtaatatatccaccaagcaatttttcgttatagccgaatgcctcattaattgcagtgagactggggcttgcacatatatttccaatattgaccgatgtataatcgcgtttcatctggaggtagcacattcctgtggaatacttactcaaagtccagataaagttagcagtttcctgtttctgtccaattcgtaccgacaggctggaaaaacgggtatatccctctttatggggataatgcaacctcttttcacggggagttcccgagtagccgaccatacaggtcactttttcatctttcagttgattttctatatccgcccgtatctgccggtcaatatacgtagaatcaagtaccgtaaacagctccacatcttcaccaaataactttgctcccaggcgtatattcttcatcagatccatccggtcatggaaccccgtcacattaggatactctttcaataattcccaattaggatagttcactccaccaaaaaccaccggaatttcttttactaaaggatgacaacacttgaacagtgaataggcagcctgatcatcattcaccagaattacttcaggttcccagccgtcggaaaccgaatcgagcagatgatacatatacttcaattccggttcttcctgaaaagcctcacaatccagatatacgatacgaatatctgcattcaccccgtttcttctgaattctttatctatcaagcgattgaaatcaggatagccgacatagctttcctcataagaatgcacgattaaaattcgccgttcttcccgatccgaacagctgttcaaaacgaaaaaaaacagaaaaatccatgcatatataggcagaaatgtgtttttcatgattcgactgtctgatccataagtggaacaaaggtagaataaaatatgtataatccaaagaaaacaaaaaagaagctgtctgaaaaaaatcagacagcttccctacttagcaattctatatcaaaagattattaacgttcgcccaatttcacatctacaaagaagatacccgttgcaccggctttcttaatcatatcaacaatgcccgcagcagttgcctcttcttccacctgttcgcgtacaaatccccacaggaagtcctgtgttgctttatctttttcggcagcagccacatccaccaacttatcgatcatttcggatacacggcactcgtgtttgtaaacctgttcaaatacttccagcggagtaccgaaatcgttgggaactacatccagcttatcaactttggctttaccaccacgcttgattacgtaatcggccattgcacaggcatgctcgttttcttctgcccactgtttcttcaaccagtgtgccataccgctaaaaccttctttctccatataaaaagacatagccaaatacatgttagccgaccacatttcagccgtgatctgctcgttaattgcattctgtaatttttcagtaatcataatcgtattttttaaattaatttgaaatcattacaaaagtaacaatgatacacagacattgttcatttaataacattttttatataaaacaacccggattggcaggcttttcccgcagaattgcagcagcatcgaaacacgaacactgtctgatccattcttccggttctatttcacataaccattcaagtcagcgctgaggtcacgatgccccaccagccggaaatccggataatcttttagcagcaacttggcaagcagcagagggaatgtttctgaaagtcggttcccgtatcggcaaagtatccgctcacatccagtccaccttcatagcacacgccgattgagcgagcgttgtggctccgggcgtgcgcaccgttttttaaaaccggacgaagacttttgatatctctgttcttccttaatataaatgataacctacaccatatataacgcaaggtccataccgccttcatctttctcaaatctttctgtattcataacttagttgcacactacaaaataactcctgaaaacagaaatcaaaggcgtaatgtctatgaacacaaagtaaagaaagtgaggataggaaataaaaatgaaagcgtacaatcatcaaaaggatgatgtgcacgctcatacatatagtttatacttttaagagttcttacatattgttttacaatgtccgtaaaatcggaccacccatatcaaaacttataacaaacaagtttattcttttaatgttatgacaataaagatagctttttcctctaatcttcaacctaatgggctgagtcatgaaaagattaaatctttataccaactcgtccgaagtatacccctgtggcaactcacgacagttataactcgaagccattatctcaccataggcgcctgcagaacgcaatgctatcaaatctccgcgcttcaccttattcaagtctatcgcttttccgaaaacatccgacgattcacagataggccctaccacatcatacgcctcaaccgcatcctcggaagtaatattctctatcttatggtaagcctgatacaacgcaggacgaatcaaatccgtcataccggcatcaaggatggcaaatttcttattggctccctgttttacataaagcacctgcgagataagtgaaccgcactgccccgttatggcacgccccagttcaaaatggagtgtttgataagagcgtagtttcagatgttcggcataagtagagaaataatctttgaaatcaggtattgcctgacggttgggatgcttataatcaatccccagtccaccacctacattgatatgctcgatacggatgcgatgtgcttccagtttgtcttgcaactcattcacacgattgcacagggcaacaaaatcacccatatccaatatctgcgaaccaatgtggaagtgcaatccgatgaacttcacattcttcatctccaaagccacttctatcacatgatccatgtcttgcatactaatgccaaacttgttttccgccagcccggtagtgatgttggcatgcgtatgtgcacctacattaggattgatacggaaagcgacattagcgatcttacctttagcagccgccaattcattaattacttccaactcaggaatagactccacattgaaacagaagatattgtagtccaagctcatgttgatctcccaatcggacttacctactcctgcaaaaacaaccttattcgcaggaaagccagccttgatggcagcacgcacttctcccccactcacacaatcggcacccaggccgttctcacggataatggtaagcaccttcggattagcatttgctttcacagcataatgcacctcaaaattgccatacttagcggcttctgcacgcatgcaggaaagagtgtcgcgcaataccttcgtatcataataataaaaaggggtacgcagctcacggaatttatctatgggaaatgttcctttcatacttcaaaactttgtttataaagaaaagaacgcaaattacgcgaattacacaagagcctttatcagcgagttgtgcaatttgtgtagtttgcgttccatatcatattatatctgtacttccttatttctcttattcttcgttgaacagtgcatcactaagcgactgcaatgccttattcttgtcgcactcacggatgaggaaagaaatattgtagttactaccaccgaatgagatcattcgtaccggtatgtcgcgcatggcatccagtgccttcgcttcgaaaccgacattctcccattccaaatcacctaccacgcagacaatacacatatccttatccaccgtaacggttccgtacttcttcaggtcgtccagaatctcgttgagatgcttcgtattatcaacagatacagatactcctacctcagaagtacaaatcatatcgatagaagtctgatagctttcaaagatttcgaataccttgcgcaagaaaccatgagcaagcaacatgcggctggatttaatcttgatagccgtaatattatcttttgctgcaactgccttaattttgcccttctcggtatcattggaaatcatagtaccgggagcagttgggtccatcgtattcagcagacgcaccgggatattggcatacttggcaggctgtatacaagtagggtgaagaatcttcgcaccaaaataagccagctcggcagcttcttcaaaatgaagatgacgtacaggagcagtcttatcaacgatacgcgggtcattattgtgcataccgtcgatatcggtccatatctggatttcggaagcattgatagctgcaccgatcagagaagcggtatagtcgcttccaccacgttgcagattgtctatttctccgtaagcgttgcggcaaatgtatccttgtgtgatgtaaatctcagcaccgggatgcaattccaactgcatctgaagtttctccttaatatatacaggatcgggctccgcattcttatcggtacgcatatattccaaagccggaagcaaaatggacttcacaccacactcttgcaggtaatagttcatcatggcagtagagatcagttctccctgtgccagaaccactttctcctcaaacagtgtgaaaaggtctttggtataagaacggatgtagtcaaaatgagatttaatcagttcctgacctttctgtttatactcgggagtggaatacaactcattcacatgctgtttatatttagcctccagcttgttaatgatctcgttggcaccctccggatttttcttgtacagatagtccgaaatttccaccaatgtattagttgtgcccgacatagccgagagtacaactatcttctgttcaccatcagtgatcaatttggctacttcctttatccgcgctgcagaacctacggaagtacctccaaactttaaaactttcattttcgttcctgtattaaatgattatatattattatttgtttcttctacagtcggcatcatacccgaatactcggacgttacatctgttatctgatgacctgcacagcgatatacctgtcccggaaactcgtgaagcagatggaggttgtgcgtagtcatcaataccagcgagccacccgtgcggctgatgttatgtaacagtcctacaatagcacgtcccgtttccgcatccagattaccggtcggttcatccgccaggataatctccggagagttgagcatagcacgggcaataacaatgcgttgctgttcacctcccgaaagttcgttagggaacttatatcctttattacccattcctacctgcatcagcacttcagcgatacgatcttttatttccgatttgtttttccagcccgtagccttcaatacaaaagcaagattatcgttcaccgtgcggtcagtcaacagttggaaatcctgaaacacaatgcccagcttacgacgcaactgcggaatatgcttgcgcttaatgcggctcatatcataccccagtaccattgcttcgccggcagtgatatccagttctccgtagagtgtctttagcaaactggtcttacccgaacctaccttaccgatcaggtacacaaactctcccttctgcagctcgaggtttacctcattcagcacgcacaagtcctgttggtgtacttccacatctttatatcgtatcagcggttcagccat

SEQ ID NO: 675 - DNA, 24648 bp, unidentified
  source 1..24648: mol_type = unassigned DNA
ttgaactgccggataatatcgagcaaattggaatgtatgcatttgaagattgtacagcgttaaagagtgtcaaattaccagccagattaacggacattgatcaggcagtgtttgcggggtgtgagtctctggaaaatatcgtgattccagaaggggtaaccagtataaaatacagggcatttgatggctgtgataatttacagtatgcgatcattccggcgtccgtaaccagcatagaggatggtgcatttgaaaccggccggagagacagggatctgctcatttactgtaaggagggaacctgtgcagaaagctacgcaaaagaaaatgatatttcttatgcgtatggaaacacagcgaagaaacggcagacgatcacagcgaatgactttgaaaaaatgtatggagatgagtcattttatattcaggcagctacagacggagatggaaagctgacttataaggtaaaggatgagtctgtggttacggtaagcgctgacggaaaagtcacgatcaaaggaacaggaacaacagatgtcgtgatcacggctgcaagaacagacgcttatgagtgggcatcgaaaacgatccatatcagtgtccggggtgtggtgaagaaaaaatcgcagacgatcaccgtcgcggatattatcagtatctatgaaggaaatacggtagcattagacgctgcaacggatggggacggaacaatttcttatgtgtcagatgataaaacggttgcaagcgtggatgcttccggaaaagtctgtggaataaaacaggggacagcacatattactgttcttgcatcagaaacggaattgtatcatgcatcagagacaatcgtcacagtaactgtgaagcccaaaaagacacagagtaatacagatccggggaaaaaaccatcggataacgtgtcgaaggatgattcacagacaacagaggataaaaaaccttctgatggcggcaacaatacatccgggacaacagaggataaaaaaccttctgatggcggcaacaatacgtccgggacaacagatggtcagcagacaaagaagaaacagaccataaaagcaaaaaatatcacaaagacatacagtacaaaaacattttccatcggagcaaagacaaatggtggatgtaaattaacatacaaggtggcagataaaaaaattgcgaccataagtaagaccggaaagatcaaactgaaaaattatggacagacaaaaattacgatcaaagcagtcgcaaaaggaaaatataaggcagcaacaaagacgatcacattaaccgtaaaaccggtaaaggtaaaagtaacctctgtaaagcagctaaaggcaaagacgttacaggtaaagtggaaaaaggataagaaggcatccggttatatcattcagtactccacagataagaaattcaaaaagaatgtgaaaaaagttgttgtcacaaaaaaccagaccgttacgaaaaagatcacgaaattaaaaccgggaaagaaatattatgtccgtgtgtgtgcatataaaaattctcacggaaaaaaagtacagggaagttatggtacggtaaaaagtgtaaaattgaagtgatatgcatcggcataaaagtggtaaaggatggagaaacgttatgaaaatgaaaagaatactgactggaatgctgggagcagctattttagctgcaggcgtaaatctattgtccgtacaggcggcagaaaatgcaggagtgatggaatatatagctgcgacagaatacatagaggaaacagaagcagcagagccggaaaatgcagaaaaacaggtgtttgaaactgaagaagatacaaaaacagcagatatgggtgaatttacgatcaacaacggtttgttgacgaaatataccggaacagcagagacggttacgatcccttcaaacgtcagtagaattggcgagtcagcatttcagaataataaatacatcaaaagcgtaatcattccgggaaatgtacggaaaattgaaatgctggcattttatggatgcagcaatctggaaagtgtcacaatggcagaaggtgtagaagagattggtatgcaggcattttccgaaactcatttgaaaagtgttgttcttcccaaaaccataatcaaaatggatagacttgtatttacaagctgcaatcggctgacaagtattgattttacagagggcacttataatattaatggagatatcataggttcctgtgctgcgctgacagagataaaggtttcaggcaataatacgagatatcaggttaaagataacgtgttatatgaaaagaatggaaaaacagtttgttattgtccggcaggccgcaagactgatatgaatgtgccggatggagtagagcatatcggagattttgcattctgggattgtcttacaacgaaagttacacttcctgatagtgtaaaaagtattggagaacgggcatttttttcgaccggaatggagacgatgatacttccggcgaatctggagtcgatcggaaaagaagcatttttttattgccaaaatttaaaacagatcacaattccggctaagacaacaaaaataggaaacaatgtgttcggcagctgtgatcacttagagacgatcaatgtggcggcagggaatacgatatacagatcagaggatggcatattgtatggcacagaggaaggcagactcgtgttgattaattgtcctgccggggaaaaaggcagcgtgaagatcttagaggggacggtgggaatccttgacggttccttcagtaactgtgaaaagatcacatcggtagatatgccggacagcgtaaagagcattggcgaagatgcatttaaatcctgttcctcgcttataaaagtccggttctcaaatcagcttacggatataggaaactatgccttttataggtgtgattccatgcagcaggtacatctgccggacagtgttaaagatttgggggcatgggctttccggtattgtgatgcgttgacagaggtaacaatttccaaaaatatttcggatattccggataatgcgtttggtggctgtacaaatctgaccggtattaccataccggacggggtaaaaacaatagcagacaatgcgttttcgtattgcaacaatttaacgatatactgtagttcaggttctgctgcagaaaaatatgcgaaaaataacaatataaaaagtaaggtagccgacgaacggaaaacccagacgattacgacagataatgataacattgaaaaaacggttggagatccggattttaagatcactgcaaaaacaaccggggatggaactctaagtttttattcgggaaacgaagatatcattcaggtatctgaaaatggagctgtaaagatcatcggagcaggtacgaccaatattgtgatcacggcatctgcgacgcaaaattgtaaaatggcgcagacagaaatttatattacaataaaaaataaagaaacggatcaaaagcgtgtgcaaaagatcacgtattcttatcaggcagataaaaaggatctgaatattttctatcttgacgcaaagtcagatggggatggtaagatatcttaccggtcagaaaacgaaaaaatcgtaaaaatagatgcagatggaaaaggatatatcttaggttccgggacagtaaaaattattatctcggcatcagagacagatacctgtgcggcagcgcagaaaatagttacgttaaatgtagaaaaaataacagatcagacagatgaaccggggcagacacaaaagccggatcagacagaaaagccggggcagacagatactccgaatcagccggataagccggggcagacagatactccgaatcagccggataagccgtcagaccagaacggtaatgccacacagcagaaaaagaaacagaccataaaagctaaaaatattacaaagacctacagcacaaaaacttttgccataggtgccaaatcaagttgtggggcaaaactgacctacaaggtggcagataaaaagatcgcagccataagtaagaccggaaaaatcaaattaaagagttacggacagacaaaaatcacaatcaaagcggctgcaaaaggaaaatataaggcagcaacaaagacgattactttaacggtaaaaccggtgaagaaccagattacttccctgaaatcaacaaaagcaaaaacgtttgaagtaaagtggaaaaaagacaaaaaagcgtctggttatattatcgagtattccacggataaaaaattcaaaaaaaatgtaaagaaaaatattgtttccaaaaataaaacggtttcgaaaaagatcacaaaattaaagcctgggaaaaaatactatgtccgtgtatgcacttataaaaattcacatgggaaaaaagtgcagggagattacagtaaggtgagaacggtaaagatccgaaaataattgcaaagagaaaatgataaaaaatcctgccggattggagtgtggactccaggtacggcaggattttttgggtgccagcatttttgcttttataagaataatttgttcttaatatgtgacaagccggtgttctaaagatttaatctcatcgtgcagtataaatctcgatcgcttctgctacaaaagcagcagttccggcaccggcggctttgtcaatattttctgtaaattcggcaccggaagcatacattttaccaagcccgtttaagatctcattggaacattgataaaagtgctctgaaatataatcctgtaggttttttaccagaagctgtacttctttgctgccaggttctttgtcctttatttttccaaactctacaaaaatgagcataagatttttccatgctgttttttgtgtctcggaagactgattttttgtcttttcttcatattccttgtattctgcagtctgtccccattgtttttttgcctctctggcatactcgtccattttggctgtgttaaatacgttaaaatccattttatttactcctgtcgttttaattttacgagcaaaagcaatcaagccttcaagatgctcctttttcattgttaacaattcaatctgctgggacagtgctttgtcccgatcaaaatcaggtgcatcaatgattcttttgatttcttttaacggaaattccagttctttaaacaataaaatctgttgcagccgctctaatgctgtatcgtcatacagccggtagccggacgcagtataaccgtcgggttttaaaagtccgatggtatcgtagtattgcagagtgcgtatactcactcctgtcaatttgcttacttcatttactgtcatcatggtcatttcctccgctcgatgagtacactctaaactattacgccgcgtaggagtcaataggttttttgaaattattttcaggtcatatctatatcattttcgtcgagttttcgtacagagtatttttgtgataaagaatttatattcatgttcatagatactccattaaagaacgcatattgaaacatcgcagattgggcatatagcaaagaaattgcagctgtatacccaatcgacaaaaatccatgatcgattttcactcaaacaatgaccgctggacatatttttccggaaaatgatgcagataagcaaaacattcatctggcgaacaaaggatgccagccttttggcattgttccacaatcattggaatgagcattttttcattcgggcttggcaggttgtaggcatttccataagtgcggatatatttttccttcattcccggaaaatcttgatcgagggcatggtagaaatattcccggtcgccatcccggagagtcacgccaatgccccagaatataatcccctttacgccggcgtccacgcaggcatccagcagattttttatgttatcagcagtgtcattgataaacggcaggatcggtgtgagccacactacggtgggaataccggcttctttacatttcatcaggacgttgatgcgctctttggtggtggaaacatctggttctatctttttacataaatcttcatcgtaagtggtgagtgtgatctgcacgacggctttcgccttttcattgatggacgctaacaggtcaaaatctcttaaaatccgcgctgattttgtctgtaccgcaacaccaaattcgtaccggtcgatcagctctaaacaccgcctggtcagcaaaaggcgctcttccaaatgaagataaggatcgcacatggcaccggttccgatcatacatttctgacgcttcgatcgcaaagccttttctaacaactccggggcattttcctttacctcaatatcttcaaatgcatgtgtaaaaccatagcatctgctccggctgtcgcagtaaatgcatccgtgagaacatccccggtaaatattcattccgttatccttcgataaaagccccttcgcctgaacaaaatgcatgagaaatctcctgtagttgaaataaaaaatctgatcaattccattaaaacataagtaaacaaaaatcacaatcaagatcagaacaaaaaaataatgaggaaacagtcgtaacctacagagcatagatttcccttttttcggtatcgagggcatgtagattgcagttttccgggtgccgctggcagatttgagactttggaagaaaattagaaaatcttagtatgcctgttcactcacagtgttgtgctgccatggacggcagcacaagtcctgatgtgccagggaaggcacattcaggacgtacacgtcactccgaaaccaactcaaacaggcatacttagcttttcttattttcgcacaacggaaccaaacctgccagcggcacccggaaaactgcgccttacactgtcccctgatacctaagtaccattttgcaaaactttaccaaattaacttgacaaatatttccatcagacatatactttgaaaagctaattatttgactatcaaactatttgaaaggcaaatgattacataaatcagaaaataagaaaataaaatcagcccacaataaaaacaagggcagggcgctggaaaaatgataaggcatgcgcagaaaaggagaaaaattatgttagagaaaatgatcccgattattgcagagcagttaaacgtgaatgagtctgaaatcaaggcagagtccaatttcaaagatgacttaggagcagactccttagatttatttgaacttgtcatggctcttgaggaagagtttggtgtggagatcccatctgaggatttagcttctatcgtaactgtcaatgatgttgttgagtacttaaaaggaaaaggtgtggcttaagtatggaaacaagggtaagtaaactgctgggaacgaaatatccggtcattcagggtggtatggcatgggttgcggaatatcatcttgcagcggcagtttcaaatgccggaggtttaggtatcattggagctgcaagtgcaccgcctgaggtggtaagagagcagatcagggaagcaaagaaactgacagataagccatttggtgtaaatgtcatgctgttaaatccaaatgcagccgaggtcgcacagatcgtcattgacgagggcgttaaagttgtgaccacaggtgccggaaatcccggaaaattcatggaagcctggaaacaggcaggtgttgttgtgattccggtcgttgcaagtgttgcaatggcaagaatgatggagcgcggtggagccgatgcagtgatcgcggagggaatggagtccggcggacatatcggtgcacagacgacaatgacactcgttccacaggtggcagatgcagtaaaaatacctgtcattgccgcaggcggaatcgcagacggcagaggcatggcagcagcattcatgctcggtgccgaaggggtacagatgggcaccagatttgtggtggcaaaagaatctatcgtacatccgaattacaaggaacgcgtcatcaaggcaaaagacattgactcagaagtgacaggcatgagtaccggacatccgatccgtgttctgcggaaccagatgagccgcgaatatttaaaaatggaaaaagagggagcttcttttgaagagttagagcaccttacacttggttccctgcgcaaggcagtcatggacggtgatgtggtaaacggaagcctgatggcaggacagagcgccggtatggtaaaaaaagaagaaagctgtaaagaaatcattgaggacgttgtgacaaaggcggaagcgctgcttggaagataatgtaaaaataagcgtaaaaacggaggttgacatgggaaagacggtttttatgtttccgggacagggagcacagtacataggaatggcaaaggatttttatgatgccatcccggaatgcagggaagtatttgaggaggcatctgaggcgtcaggacttgatatcgctgcgttatgttttgaggaaaacgataagatcaatatcacggagtatacacagatctgtatgctgaccgctgaagctgcaatcctgcgtgcattggagttaaaaggttataaagcagatgtgactgcaggtttaagcctgggagaatatggagcgctgatcgcctgcggagcactgagcagaaaagatgcatttgcactggtgcgcaaaagaggaatctacatgcaggaggcagtgccggagggcggagccatggcagcagtcctggcactggataccgcgcagatcgaggaggcctgtgaaaaaacagagggcattgtatcgattgcaaactataactgcccgggacagattgtcattaccggagaagaaaaagccgtagcggcagccggagagctctgcaaagaagcaggagcaaaacgtgttgttccgttaaaagtcagtggaccattccactcagcaatgttaaagaccgccggagaaaaacttggcgaggaattaaaacatgtaacagtccatacaccggaaatcccgtatgtcgcaaacgtgacagcagactatgtgacaaaagaagaggagatcaaaccattgctggaaaaacaggtgtcctcatctgtccgctggcagcagacgatcgagcgtctgatcgcagacggagcagacaaatttgtagagatcggaccggggaaaaccttgacgggattcatgcgcaagatcaaccgtgatgtagtggcagttaacattgataaatatgaggactttgagaaatttgttgctgagagcaaaaataaataagatatgccatatagtttgatgtgaaaaaagtttggcagctatcagaaaaaaggagaagttatgttaactaataaaacagcactggttaccggtgcaagccgcggcatcggagctgcaatcgcaaaaagccttgcaaaagaaggggcatttgtcatcattaattacaacggttccaaagagcgtgccgatgctgttgcggcagaaatcatagcggatggcggcaaagcggcagtttacggctgcaatgtttctgattatggtgcctgtgaaaaaatggcaaaagacatcatggagacatatggtcatttggatattcttgtcaataatgcaggaattacgagagatgatcttttgatgaaaatgagtgaggaagcattcgacgcggtcattgcgacaaacctcaagggaacttttaacacgatccgtcatttttcacgctatctgttaaagcagcgttccggaacgatcatcaatctatcatccgtatccggtattcttggaaatgcaggacaggcaaattacagcgcaagtaaagcaggcgtgatcggactgacaaagagtgtggcaagagaactttcttcccgtgggatcacctgcaatgctgttgcaccgggctttatagatacggaaatgacagcgcagatgacagataaggcgaaggaagcagtgcaagcacagatccctcttggcagagttggaaaagtcgatgacattgcagaggtagtgacatttttagcttcggaaaaagcatcctatatcacaggacaggtgatttccgtggacggcggtatgagcatataagcagtaaaaagcctgatgcaaccatgtgtatgggcttgaagaatggaaaggaaaagttatgagcagacgagtagtggtaacaggaatgggcgcgatcactccgatcggacttagcgtggaggagttctggcagtccgtaaaagaagggaaaatcggtttcggggagattaccaaatttgatacggaaggatacaaatgccatcttgcagcggaagtaaaagattttgatgcaaaacagtatatggatgcgaaggcagcaagacgtatggaactgttctgccagtatgcagtggcagcagcaaaagaggcgattacagatgccgctcttgacatggaaaaagaagatccttaccgtgtcggtgtatctgtcggaaacggtattggaagtcttgggggaattgagcgtgaacataaaagattgttagaaaaaggtccatccaaagtaaatcctctgtttgtaccgcttgtcatttccaacatggcagccggaaatgtttcaatcacatttggtttaaaaggaaagagcatcaatgtggtaacggcatgtgcaaccggaacaaacagtatcggtgaggcattccgcagtatccagtacggtgaggcagatgtgatgattaccggtggaaccgagggcgcgatctgcccgcttggaattgcaggattcacatctctgacggcactttcctctgaaagtgatcctacgaaatgttccattccgtttgataaaaaccgcagcggttttgtgatgggagaaggagcggcaatcgttgtgttagaagaattagaacatgcaaaagcgcgtggagcaaaaatctacgcagaggtagccggatacggaacatcatccgatgcatatcacattacttctcctgctgaggatggtgccggtgcagcccgtgccatgacaaatgcggtggaagatgcgggcatccgtccggaagaagttacctatatcaatgcacatggaacttctacacatcacaacgatctgtttgagacacgcgcgatcaaacttgcttttggtgatcatgcgtatgatatgaaggtcaattctacgaaatctatggtcggacatctgctcggtgcagcaggcgccatcgaatttgtaacttgtgtcaaggaaatgcaggataattttgtacatgcgaccgttggttacacaacaccggatgaagaacttgatcttgattactgtaaagaggcggtacagatggatgtgccgtatgcactcagcaattcactcggttttggcggacacaatgcaagtattctgctgaaaaaatacagtgaataacagggaggaaattatgtccgttttaacaacgaaacagattatggagatcattccgcaccgccagccatttttgctgattgatacagtggaagaattagagtccggcgtgcgtgcagttgcaaaaaaatgtgtcagttataatgagccattctttggcggacattttccgaatgaaccggtcatgccgggtgtgctgatcattgaggcactggcacagaccggagcggttgcaattctttcggtggaagaaaaccgtggaaaaacggcatattttgcgggaatcaattcagcaaagtttaaacggaaagtaatgccgggtgatgttttgacattagaaacggagatcataaaacaaaaaggcccgattggtgtcggccgcgccacggcgaaggtggatggcagtattgcatgcatcgcggaactcacatttgcgatcagttgaagttaagagagtctggaacagcataggtttgataaatcactgtaaacaggcaaaaaggggaaactatggcagcattttttttgaagaagaaaaaagaagtaacagagacggtggaagaaccacagaaaacggcagagacagcaaaaaaagacgcagagacagttaatacagagccgccggcaacgatcgtctgtccggcatgtggcagggagatcaataagaaaaccgcggaaaaaaataaatatgtctgttatgagtgcggcaattatttccgcgtccgcaccaaaaacaggatccgcatggttgcggataaggatacttttgagccgtggtttgaggaattagagtcaaaaaatccattggattttcctgggtatccggaaaaaatcaaggccgcacaggaaaagacaggattgcatgaggctgtcacagtcggaaaatgtaaggtctatggtcttgatacggtgattggtgtgtgtgatgcccggtttatgatgagcagtatggggcatgttgtgggagaaaaaattgcacttgccgtagagcgtgcaacagaactttctcttccggtcattttattctgctgttccggtggtgcaagaatgcaggagggaatcgtttccctgatgcagatggcgaagacggcggctgcattaaagaaacattccgaggcaggacttttatatgtgccggtgttaacggatcctacgaccggaggtgtgacggcaagttttgcgatgttaggagatattatccttgcagagccgggggcactgattggatttgcaggaccacgtgtcattgagcagacgattggtgaaaaactgccggagggattccagagagcacagttccagctggaacatggttttgtggatgcaatcgtagaacgtaaagatttaaaaatgacactttaccgtattttaaaaatgcatcagaaaacagaaggatatgccaactttgatccattgcgcagcgatgactgctatgagccgacagaggtcatgaaagagcgtgctacaaaggcacagccgctttccgcgtgggagaaagtgcgtgcagcaagacgtgcagaccggcttgcatcggtggattatatcgacaatatttttgacgatttcatggaatttcatggagacagacagtttgcggatgatccggcgatcgtgggtggtgttgcctacctggatggtcagccggtcactgtgatcggtattcacaagggaaaagatttaaaagactgtatgcgccataattatggaatgccatcaccggaaggttatagaaaagcactgcgtctgatgaaacaggcagaaaaatttaatcgtccgattatcacatttgtgaatacgtccggtgcattctgcggaaaagaagcagaagagcgtggacagggtgaagcgatcgcgagaaatctctatgaaatgtcagccattaaagttccaatcctctgcctgatgatcggagaaggcggaagcggcggcgcgctggcactgtcggtcggcaatgaagtatggatgcttgaaaacgcaacgtattctgtactctcgccggaaggatttgcatcaatcctctggaaagatggaaaacgtgcaaaagaagcgagcgaggtcatgaagatcactgcccatgatctgtatgcactgaatgttgtggaacagatcatcccggagtatggaacggcagacgaaaaggcatgtgagtcgatctccagatatatgaaaggtcatatgaaagaatttttagagcgtcagaatggcaagacaggagaacagctcgccgaagaacgttatacgagatttcgtgcgttctgataaaaataggatacaggaaatgtcttgcagagtacagatggaaataaaataaactccggaatgaggaaaaagtatgaaaatcaaaatcaagggaaccggaagtgcggttccaaaacttcgggtgacaaacgatgatttaagtaaattgatggatacctctgacgagtggatcagaagccgtaccggaatcggcgcgagacatcttgcagtggaggagacaacgacagggcttgctgttgctgcggcaaaggaagcgttaaaagatgcgggaatgactgcagaagaacttgatcttatcattgcggcaacggttactgcagataaattcctgccgaacttatcctgcgaagtgcagagtgctctgggggcagaaaatgctgtcgcatttgatttaaacgctgcatgttccgggtttttgtttgcattaaatacggttcagatgtatctggaaaatggtatatacaaaaaggcactcgtcatcggagcggaaacgctttcaaaaattatggactggaatgacagaagcacctgcgtgctgtttggggatggtgccggggctgcggtcgttacagcagaagatgagaatgtggatggtcattcggctgttacaagtggtaaatcagatgctgggatgatgcagacgggtgcagtaagcagaataaacaaaagcggtattttaagcatggtacagggttctgatggcgcgcgcggggaagtcctccgctgtgataaccgcccggtcaacaatccgtttgcagccaacgattccaagctgtcttatgtgtcaatggatggccaggaagtatataaatttgcagtaaaaacggtgccgaaagtgatagaagaggcagtgaaaaaagcgggactggaagtcgaagatattgacctgtttgtactgcatcaggcgaatctgcgcattatcgaatctgttgcaaaaagactgcatcagccaatggaaaaatttcctaccaatctggaagagtgcggcaatatttctgcggcgagcgtgccgattttacttgataatatcaataaacatggtatgatatgtgaaggtaaaaaaatagttttggcaggatttggagccggattgacatggggcgcgacggttttggtatggtaaaggcaacagtaaaggaattgactgcagtttacatagatgtggacagcaatcagtactgccatgaataggagtatatttgaatgacggcagatgaaacattaaatgagttattggtaaaattatttaaagacattatggagattgagggaaaatctctgatcacagatgaatttaaggatcttacctataatgattttcatgtaatagaggcgattggtatatcagagccaaagagcatgagtacggtagcaaagctgatgaacgtaacgaccggaacgctgacaaaggcgatggacggtctgaccgataaaggatatgttgtcagggagcgcagtaagcaggataagcgtgttgtctgggtgtgcctgaccgaaaagggaaaggcagcttatctgcatcatgaagagtttcatcaccggatgatcgatcatatcaaaggagagctgaatacacaggagacgacggtattgatttattcactggcaaaactggtggattttttccagcaggtatatggggagaatgaagaatcgtaatgggtttggataaagttatggatattatatagatagttaaggatgttttccggaaatgggaggcatccttttttgatgctgtaatatgatatgatgatgttgaggtcaaatagtgcatacaagattgttgattgacaaattgcacaaagccgtgcctgttttgttccgttgtacgaaaataagaaaatctaagtccgcctgctttaaatgttctcggagtgacgtgtacgtcttaaatgccccttccatggggcattaagacttttgctgccgtccatggcagcaaaacactatgcattgacaggcaaactaagatttactaattttctcccatagtcacaaaagtagtctcgactttgtgcaatttgccagtcgttatgctgtgaatgcactattcgccccccaatatcatctttatagaagaatgccagggcaaatagtgattttcaattttctgataacacagtcatgatatattttctcaaataaatgttgtaattacaacatacaatctgcccgaaataaattaatataacaccagagacaaggacagcagtgtgaaaaataagatttttcatacgcaggaaaggagaaatatcatgaaacaggtagaattaaataacagaaaagtggcagtgatcggatgcggatttgtaggagcaacatcggcgtttggactgatgcagagtggtttgttttctgagatggttttgattgatgcaaatacagagaaagcagaaggggaggcaatggatatttcccatggaatcccatttgcaagaccgatgaaaatttatgcgggtggttatgacgatattatggatgcggcgatcattgttgtgacggccggtgcaaaccagaagccgggcgagacgaggctggatctggttcagaaaaacgtcggcatttttaagagtattatcccggagattgcaaaaagagattaccagggaatcctgcttatcgtttcaaatccggtcgacattcttacatacaccgcacataagctgagcggtatgccggaaaaccgtgtgatcggttccggtacggtgcttgacacggcacgtttaaaatatgagttgggagagcatcttggtgtggacagccggagcgtgcatgcatttatcatcggagagcacggtgacagtgagatcgctgcatggagcagtgcaaatgtatcgggaatcccgttaaatacattctgcgagatgcgcggacatttcaatcatgacgattcgatggaacgcattgcagcaaatgtgcacaacagtgcctatgagatcattgcaaagaaaaatgcgacctattatggaatagcaatgtctgtaaagaggatctgcgaagcaatcgtgcgcgacgagaaatccattcttccggtttccggtatgatccatggaatgtatggtgtggaggatgttgttttaagtatgccggcgatcgttggaaaaaacggaattgagagacaggttccgatttctttagatgaggatgaacagaaacagcttcagaaatcagcacagatcttaaaggagatggcggagcaggttttgttccgtcgtccgaaaataagaaaaactaagtatgcctgaatcaagttttcccagagtgacgtgaacggcgttcaacacgcgccagttatggcacgatgacatccatggctcgtgaagccttgttctgccatccatggcagaacatcactgtgaattgacaggcatactaagattttctaattttctcccaaagtcacaaaacgagtccaaacttcgtgcaatttgacatccgctaagttatgaaccaccttttaacaccagaatcttacagttaaacaaatacgaaaagcagctgcaaaaatgtgatagattttgcagctgctttttgtgctattttttagagacaaatgcttgacatgttttaagtgaagtgttattttaaaattaagttaagcgtttaagcaagcgcaaacccgggaaattgcgttatattataataaaagaaaaagtacgttcctgatgaacatgggaaaacagctaagtttgaagaatgggcacaggatacgcttttttttactatgttggttaaacgcttaagcaaaaaagaaatagctggggaataattgcagaaataaatcagaaaggaaatggagaaggatgaaaagaaaaggattcatgtattttatggcagcagcgttagtgacaacaatgggagtttccgggctgaccggatgtcagtcaaaaggaggggaaaaagatactgtggcacaggacagccagacagttatgacagagcagaagcctgaagcagagcagacagcgcatgtagtgacattttatgatgccgatggaaagacggtattagagacaaaagaggtggaagatggagcatgtgcagaggaatatgttccggaaaaagaaggttacacgtttgcaggctggtttgcaacaccacagatgagccataagtttgattttacgacagcgattacggcagatacagatattttcgcaggatttgtttcctatcaggaggatacgaggaagtttgcaattgtgggaagtggaacaagtccggtgttgttggaatcaaactggggagcggttattggtgatgcacagacattaacaaaagaggtcgatccggatgctaacgtttataccattacattagatctggaggcgggtgacgaattccagtttgcaattaactctgactggaatgaccagagaggctgtggttaccttactgccttttcaaaagatggaaaagattattttcaaaattcaggaagccttggagatgcgggtacaaagagagctaacattaagtgtcttgtgtctggaaattatacctttaccttaacaacatatccgggtgaagatatttatgaagagtctgcagcagattatagtgaagataataaagaagcgttcaatatcaacatgtatgatacgattgactggacttacaatggagaaaatgagtcggacggagcggaaaaacagatcgattattacattaaaggtgctaaaatcacaaactgggaagatgtatatacagatgagacagagtttgtggaaagagatgggatttacagcctgacagttgatcttgaagagggcgatgagtttatgtttacttccatggttacggtaggagacacaaagagcgttggaacagaatatatccgctatacgaacattgcagaagatgatacggaaagcttatcctgcgtgaccggaaaagaaggcggtaatcttgttgcaaatacggcaggttcttatacttttacttatgatccgtccacacagattctgacagtgtcatgtgaataaaatccgatggcaggatgtcagattaaaatatcatgctgccggattggaatcctctgcagtgcatattccagacaggtaagcagtgcatcagctttttctgtacggatggacggtacatacagtgtgttgtgggaagaatttaaaagctggtaaagtacatggtcgactacaacaaggttttcctcttttattgcggaaacttctaaaaaatcccgtacatatcgtatatcagcgtgaagtgtggaaaggaaatcctttttttcacagtttttggtatctaacaatacgagtgtgtatggttttttggaaaaataaatatcggcctgctccagaatattccggtagttggaattgatctggaaaaacagcggatcatggatcatacaatcataggcaaccagaggaataaaattactatcaccgatctgatgaaacagctcggaagaaatatcataacagatgattgcatctgcatgatcgaatttttcagtataagattcgttcaggcagacgagatcatagttctttttatgaaaatatgaaataaggaaatgcagaaaataagactgttctgcattctttaaaagtgagtctccggcggacaggtaaagggcaagcagctgattgcggtttgtcgccagagcttttgctgactggtttggtgtatagcctaacagattgatgatctgaaggactttttttctggtcttttcactgatccgtttatccgtacggttattgatcacgtaagatacagtggcaacggaaacacctgcttccttagcaacgtctttaatggtaactgattgtttcattggtgagactcccttttggcagcttctgtgttttcagtaagtgaaacgcttaagctcttttcatttgttataaagaaaaatgtcacatttgtcaacaataaaaaacataaaataaaatggttggaaaggtttattattaaaatgaatcagtatgcaattttacatataccggactcaagatattgttttgcggttggtgagaaagaacttgtgcttcgcctcaggatgtctaaggaggatgacggggcgaaggtgtatttaatctacgcacagaaatatgattttacattaaaacgacagaaaaaaaggatggaagtgtgttacagggattatttatatagttattacgaaatcaggcttgcgttagaggatgtccgttttgcctatctgtttgagattgaagaggcgggaaagatttattatttcagtgaagatggagtgacaaaaaactattgttttgaggaaggattttataatttttttcaaatgccttatatcaatcagaatgacgtattaaagacggtggactggatgcgggatgctgtattttatcagatttttattgaccgtttttatcagggaaacatgcagaaagacaccgggtatatcaatatggcgtggggggataaaccaacaccggaaagctttgcaggaggtgatattgaaggaatcatagaaaaacttgattatcttcaaaagcttggggtaacagcactttatctgacaccggttttttcgtccgtgtctaatcataaatatgacattaaagactatcggaaagtagatccacagtttggaacaaaggaggatgtcatacggctggtaaaaaaagcacatgaaaaaggaatcaggattgtactggatgctgtttttaaccactgcagtatgtatctggaacagtttatggatgtgataaaaaaagggcaggattccatttatttcgactggtttttgatcaatggcaataaagtggatgtggaaaaagggaattatgaatgttttgcatcctgcaattatatgccaaaattaaatacggcaaacgaacaggtacaggagtttttgatagaaattgcagcttattggatgagagagacagggattgacggatggagactggatgtttcggatgaagtttcacatgacttctggagaagattcagaaaggaagtaaaaaaaatcaatccggactgtgtcattattggagaaaactggcatgatgcatatccttatctgcagggagatcagtacgacagtattatgaattactcttttacgaaagcctgtctggattattttgcaagagagaaatttgatgcaaaagcgatggctgaaaaattaaatgcaaacctgatgcgtaatctggaacaggttaatgttatgatgcttaatcttttagattctcatgatacgcaccgtttcttttccgaggttggatgtgacaagagaaaattacttgctgcacttgctttggaaattgtatttattggtacgccgtgtatttattatggtacggaaatctgtatggaaggtggttacgatccggattcaagacgatgttttgactgggagaaaacacattgggatatggcagtttatgataagataaaagaactgcttgcattaaaaaaggaggaggttcttcagtatgggaccatctgtgttttagaggagaatggaatgctttccgttcatagaacatggaaaaatgtatcaattacattgtgggtaaatgggacagatcaaaccaaaaaaatcacattttcaaaatctgacaccaaaaaaatcatctgtgcagaaaatgagctggaatggaaaaagaatccaaaagaagagaggaactgtatcaatgaaccgctttttttacaatcaaaagggttcgtagttgtaaaagaggaaatgggggtatgatcatgaaacgaaaagtatgggtagcagcaatggcagtattattacttgcccagcagttatgtggctgcggtgagaaggtaaaagaagaaaaggctgcttctgccagtgagtctgcatcgggaacagcactgagtaatatttttaccggagaactggaacaaaatgtaacaatccaggttcttgaaaatgacacagcaatcgaaaaaggatattttgctgaactgatccaggcatttaatgaagcttataaagatcagggaatcacagctgtagatgcaaatatggatcagtacttagatcttgcaaatgatggaccttacggatatggaccggatgtgctgtatcaggcaaatgatgtgatcatgcaatatgcacagggaaaacatatttatccactgccggtggaatcaatggaatgttatggacagattccgcagactgcatgggatgcctataagatagagaaagatggatcggtttattattgtggagttccggtaaatgtgcaggcaccgatgctttattaccgtgcagatcttctgccggatgactgggagaacagctgggataaggataaagacggtataccggatatggtacagaactggaatgatatgtatgcattttccctagaacgccatgatgcggatccatctgcgtatggatacatgaaatctctttatgatgtttatttttccagtggctttttgttttcttatggaggatacatttttggaaataacaataccgatgcatctgatatcggttttgcggcgggagaagcagaaaaaggtgcgtgggtgttagaacagcttgcaagtgcaatgaatgaagaatgcattgatgatacgatcacaacgaatgcctacagtaaacttgcagatggaacctattttgcaactatttcgacaccggatgtttattcatcttttttagatgagatggtgtcagaatacaagtcagaaggtatgggggaagaagaggcagagagcaccgcaaaagaaaatctcattatgacaacacttccaaaacttcctgagagtggcgatttaactgaggaaaatcccaaactgacagacagcaaaatgatgggaggaatcaatgcctatgcagtcagtgcttatacaaaatatccgaatgcatgtcttgcatttataaattttgcaaccagttatgatatgatggtaaaaagaagtgaaatgcttggaattgcaccggccagagaagatgctgccaaagaagccggcggtacatcagaacttttatatcagaatctggaaaatggaaacattatactgatgccttctatcaaagaagtttcacagatctggactccgggacagactttctttacggatctggcaaaagatgcattccgtgcagaaaatgagaaaaagtatccggatctggaatccctgaaagcagggttagaagaagtagaccggcagatttacgatgctgtttatacgttgaaatagcaaaagaaaactttttacggaaaacataaagaaatggaggtagtgtgaaaaataagatttttcacacgcaagatttgtgcttgcgcacaaactcgggatgcgcaaaagcagcgcaggaatggagattattatgggacagcagcggggaaaaaagatggaaaagtactgccataacagcagttggcaggtaaaattgtcagctgtgctgatgggaacagggcagatatgttatgggagtattataaaaggtatcttatttttgatctcagaagtgagtatcgtcctttattttgtgataagaggatggcgtgatatcgtaggattttttacattaggaacacaaaaaggtgatgcatggcttggaattgaaggtgataattctgttgttatgcttttgatgggaatttttgcatggatcgtgcttggcgtttttattatgctgtaccggttaaatctgaaagatgtatgttccatgcaaaaacgtatggaacaggggaaacaccggttgactttccgggaggaaatcggacagctccttgataagaaattttacatacttgtgctggcactgccggtactgggggtatgtgtatttaacattttgccgattgtatttatgatcctgatcgcatttacaaattatggcggggatattgtaccaccgaaattagttgactgggttggaatttcaaattttaagaaacttgtgtcactctctcagtttgcaccaacattttttaagattttaggctggaatgtcatatgggcagctgcatcaacagcattgaattattttgccggacttggtctggcattattactggataaagactgtgtaaaaggaaaagcattctggagggcgtttccggtgctcgcctatgcaataccaggatttatcacacttttagcatttaaatttatgttttcctatggagggccggttaatcagcttattgcagcctgtgggaaaagtgccattggatttcttgatctggatgcgaaatggagcgcaaggctgatcggactttttgtgaattgttggatcagcgttccatccatcatgttactagcaactggaaatctttctaacagggatgtttctttatatgaagctgcaaagatcgacggggcaggcagatggaaacagttcgaaaaactgacaatgccttttatgctgttttccacgatgccggttttacttggacagtttatcggaaatttcaataactttggtattttttatttcctgagaggaggactgtatctggatggatattttctggcaagtgataccgatctgctgattaactggctatataatctttctattgataataattattattgcattggggcggcgatcagtcttatcattttcctgatcacatcagctatttcattgatagtatacataaaatcaccatcctatagagaggaggacacatttcaatgagtaaaaagtggaaattcggcagaatgatggatacaggcataacatatctgattctcaccgctgtagcatttgtgttttttttcccgtgtctctggctgatcctggcatcgttttcaaaatcgggaaccatttattcatttaacggttttttcccaaaagaatatagttttgcaagttttcagaagctttttactgatacgacactttacaactatccgagatggttttttaatacactttttgtggcagcgggaagctgtatattagggacatttcttgtgattttaactgcatatacaatgtcaagatttacatttgcagtcagaaaaccaatgatgaaaatcacgatggtacttggaatgtttccatcttttatgggaatgatcgcagtttatcttctgatgacgcagtttaacctgatcaatcatttgtggggcttaatcttgatttatgctgcaggtgcaccgatggggtatctgac

SEQ ID NO: 676 - DNA, 21146 bp, unidentified
  source 1..21146: mol_type = unassigned DNA
agccccttataggggcagaacaaaccaccggctcagccggtggttatgattttataccgaagaaaggaagtataatggaagaattcaaattgtacagtatttcggatgaatatgtggaatggcttcgagaggattttccgaatgtatattccaacaaagtgaatacaaggagctaagcagaaagcaatgaatgatatgactgcgggatatgtgaaatcggcattggactacagggcattagaatacagatgtgatttatttgagcaaaagagtagcaggttatagaatttttagaaatccttcattttactataattgttttctgacagataaggtgttatcataacattatcaagaaaagccaatcaccacaggcgacatacagtgatgatccggagacgattttaccgcccccgcgctggcagaaagaaagaggcgcgtgtttatggaacaacatgatttaagtaagatccaaaaattacaagagaaaggaaaatccgacaagatcatcaaatatctgagttcttccgatgataccgtggtggtagctgcactggaagctctgagccggatcaaggatgaagacagtgttaacagcattgcccacatgatcgacaatccggatacgaagatccgtatcgaagcagcaaaagcattaggcagcatcggcaccgaatatgccaagacctatctgttgcacagattgaatgcagaacaggatgagactgtgaagacagccatcaaggaagcacttcacactctggcagagcatcattaatttaatttgctttactcgtagtttttctacttatacattttccctcttattggcgtccggttcattccgggcgccttttttgcgaaatttggaaaaatcttgcgacgggttctgcttgaagctacgatgcatatctatttataatagaacggtacgtgaaaaaagtagttttgtagtcatggaggtagtttaatggaaaaattaaacattacaactacaaaggataatgaaaaagtatacaaaatcctgggggatctgatgaatgccaacaaggaattccaaattatgatcacggttccttctacgaaaaacgccaaagacagcacagtaaaagcgacagaaaaaaaggaacagacccaggaagtcatccatgacctggaaaaggatgtcacggatatgatccatgagatcggagtgccggcacatatcaaaggctatcagtacttaagggaggcaatcatgatgtcggtggaggatccggccatgatcagttccatcacaaaaatcctctacccgacgattgccaagcgtttccagaccacacccagccgcgtggagcgtgccattcggcatgccattgaggttgcctggagcagagggcgcatggagaccctggatgccatgttcggttacacgatcgacacgggcaaaggcaaacctaccaattcggaatttatcgcgttgatcgctgacaggatccgactttcttacagaaactgaggcaaaaccgcagactctaaaagatttgtaaattatcgctgccctcttttctatgaatcgtaaacatggtataatcaatctatgttttgaaatacaagccgtagtatatgtggagggtttacatgaaaaaaattctttttgccgcatcggaaggcgtaccttttatcaagaccggaggacttgcggatgtcgtaggatctttgccgaagtatattgacaaggagtattttgatgtaagagtgtttatcccgaagtatacctgtatgaagcaggagatgaaggataaacttaggtatgtgacacatttctacatggatttcaactggcagaatgtgtatgtaggtgttctggaggcagaggaagccggagtacattattatttcattgataatgagagctatttcggcggctttaagccttatggagatgatcccagatatgagatcgagaagtatgcatatttctgcaaggcagtgctgtcggcattaccgcttttgaatttccagcctgatctgatccattgccatgactggcagacaggtctgataccggtatacctgaaggagcgtttccatggcggagatttctaccgcaatatgaagtctgtaatcaccatacataatctgaagttccagggaaaatgggatgtgaagacggtacagagcatcaccggactgccggagtattattttacctctgacaagttagaggcttataaggatgcgaacctgttaaagggcggtatcgtattcgcggatgcggtgactaccgtaagtgatacctatgcggaggagatcaagacgccgttctacggcgagggcctggacggattgttgcgtgcaagaagccatgatctgcgcggcattgtcaacggtatcgactatggagagttcaatccggagacggacaaaaatatcgtaaaagcctataatgcagtgaatttccgcaaggaaaaggtgaagaataagcgtgccctgcaggaagagcttggacttcgcgtagatgataagaagatgatgatcggtctggtatcccgactgacagaccagaagggtctggatctgatcgcttatgtgatggatgaactgtgtcaggatgatattcagttcgtggtactgggcaccggtgaggaacgctatgagaatatgttccgtcatttcgactggaagtatggagacaaggtgtctgccaatatttattattcagatgcactgtcccataaaatctatgcggcttgtgacgcttacctgatgccgtctctgttcgagccctgcggtctgagtcagttgatcgcgctgcgctacggtaccgtacctatcgtcagagagaccggcggactgaaggataccgtacagccttacaatgagtatgagagcactggtacaggcttcagctttacgaattacaatgcacatgagatgctgaatacgatccgttatgcggagcatatttattacgacaggaagagagagtggaataagatcgtggatcgtgccatggccacagattattcctggaaagtatccgccggaaaataccaggagatgtatgactggctgatcggataaagaactgaaataaggtaagataacatatggcagataagaacagttccaagaacaattttatcatgcaggcaggtattctggcggcagccggaatcatcagcagaatcatagggctcctttacaggggccctttacagagtgtcattgggaatctgggactggggtattaccagtctgcgtataactattatacgatcattctgctgatctcctcctacagtattccctcggcgatttccaaggcgattgcacagaagctgggagagaaggaataccgcaatgcccatagattgttccatggagccatgatctatgtattggtggttggcggtatagccagcctttttctgtttttcggagcgggattattcgtgtccggagcggcggttacggtacttcgtacttttgcaccgacgatcttcgtctacggtattttgggagtattgcgtggatattttcaggcgcataagagcatggcgcagacttccgtgtcacagattctggagcagatcgccaatgcggtagtcagcgtaggtgcggcatatcttctgatccaaatgtttatgggaacgatggaggttccgacggatcaggcagggcaggtgatgagagcaacctacggtgctgtgggaagtgcactgggaacaggtgtcggcgtattagtggcgctactttttatggcgggagtctatgctctgaatcgtggaatgatcctgcgcagagttcggtatgacaggcatacccatgtggactcctatggtcagatcttcaagaccattaccatggtagtaacgccgtttatcttaagtaccgccgtatataatctgagcagtacggtcaacaacagtatctacaccaaatggtatccgtcccttcgcaatctggatacggtatctatttatgaaaaatatggtattttctccggacagtccctgacaatgtccaatattcccatagcctttgcatctgctatggcttctgccatgatcccttccgtagcacagctgatggcagcccgggatgtgaagggagccagagagaagatcggactggcagtgaagactaccatggtgatctcgattccctgcgctgtgggactttttgtactggcgaagccggtgatcagtctgctgttcacgaataagacggcagaggaattgaatcttgcggcagctcttttaatgacattgtcactgtcggttatcttttatgcactgtcgactctgaacagttcgattttgcagggacttggcaaagtcaataccccgatcatcaatgcggggatctcgctggtggtgcagacggtggcagcagtgctgcttctgatgttcacaagactggatctgtacagcattgccatcgctaatacgctgtattccggtatgatgtgtgtgctgaaccagtgggcggtaagaagagcggtaggctaccggcaggagatcgtaaagactttcgtcattccggcgttcgcctccgcgtttatgggagcggcagcctgggcaatctacgagggtctgtatatggtgacgaagtccatgcggatctctgtcattcctgcgatcgtaattgctgctgtagtctattttgtcatgctgatattgatgcggggcatcacggagcaggagcttcgcagcttcccgaagggatatctgttagtgaaggtagcgaagaagtgccgattattgagataatgagaagcgatgacagctacgatgctctaggtgaagaaacagtgaagagaataagtacagaaaggagtctgcctcatgacaatgttattgtcgaaggcagatttttgcgtacatggggcgtagatataaggagcatgctgattaagccccggggagatcgagagagcggggcgcagagaggcaaagaaacaaaataagccctaggaagattgagggagcggggcgcagagaggaaaagaagctgattaagccccggaaagattgagagagcggggcgcagagaggaaaagaagctgattaagccccgggaagattgagagagcggggcgcagaaaggaaaagaagctgattaagccccgggaagatcgagagagcggggcgcagaaaggaaaagaaactaaataagccccggggagatcgagagagcggggcgcagagaggaaaagaagctggttaagccccggggagatcgagagagcggggcgcagagaggaaaagaagctgattaagcccccggggcatgaaaccacgggggcacaaagtcaaggtatatcatggaatagaagtgaaaaactttcaaatgtatcaattatctctggcagaacggatccccaccattcttgaataatgtgatcatttcttgaccgacactgatagtggagggcagatccgggacatcctctctggagaaccaggcagcctcgccaagctccgattcctgcaaagtaatagaaggattcccctccagcttggcgaagaagccgatcatggcggaatcgctgaaggaccagggctgggatttgtaatagaccagatcgctgacctttaaaccgacttcttccatgatttcccggcgggcagcacccttgaaagtctcaccgacttccacgaagcctgccaccagtgcccagtgacgataggaaccgccggcgtagcgggtcagcaggatcttgtcctgttcggtatccacgatggcgataatgacagcgggagagatcttgggatattcaatctggccgcactccgggcagatgcaggcccgctctgtggtgctgtgaattgtgggatgtccgcagcggccgcagaatttccggtccagacggaaacgattgatctgggtggcagtgattccagcaaatgccagatattccggctcaaaattacggaacacaccggaagcgtagaggtcttcttccgggagcatgagagcaccggcatcctccgtcgtcttgcggaagaatgctcggtcatcaatggaaaagagatattcacagtccagaaaaaaacgttccataggctgacggattcccaagagtccatggacttcttcaaaagtaggaagatatacttgaggatgctcagagatgccggcaccggcggaagtatccgttacatcactgttttctgtatgggagggcagatagaccttttctccgtcaaataacagcagataatcggaaggtttaggatcctggcttcggaattccgggtaatatttatgcggttcgatcttatggatcatcatagagtatttctccttttatggctatttttcagaaagtgttcataagaatatagtagtccaccgtggggaaactgtcaaacgtaacagttcagccgcgccgttcacgggagtcgcgttaacacgcttttatgtcacttcgtgactacctttgctcatagattggcgcttagctcctgaacatatttgcccgcaaaatcatgcaagcatgatttctgcgcccagaaatgttcagaactgaactgttgtggaaattatttgagattccgggatatttgtgttaaaatattttgtgactgttctgaggtgttcatttctcgaatgcccctgtgaacagtcacggaatttatcagaaaatacagcatgagagtacaaaagtgagtatctcatgtggaaacgagggatagtatgttacagatgatcttgccggagggaagcagttctctccttgctttttttggaatcctttttgcttttggagcgacggtactggcaacggcgaaattaagtccgtatctgcccaaggatgcaggaagagaatttgcccatgacggaaaattgtctgcggggaaacccagaggtgccggaattatttttgtcatggcatttgtggcatccgttctgctgttttcccctttaagcgcagagctggtgatctatctgctgctgatcgtggtatgcatgatgacgggatttctggacgatgcttccaagactccctggggtgagtacaaaaaaggtttcttagatctgtgcgtggcggcactggtagccatcacgttcctgaaatataattccaacgtggtggagctggcactgtttcatgtaaagttcaccctgccgcctgtggtattcgccattctcacggtgatcctggtatggacctccgtgaacgtgaccaactgctccgacggtgtggacggactttccggaaccctgtcgatcattacgatcatgtccatctatatcgtggaccgtatgaaggacgtcaatgagacctattctttcctgatcctgctgtttgccgtatgcattctgggttatctgtggtacaatgcaacacccagtaagctgatgatgggagatgcgggttcccgggccatgggactgttcatcagcatcgctattttaaagagcggctgtccgtttttgtttattccgctggctctggtgctgattctggacggaggtttgggactgcttaaggtttccctgctccgcttcctgaagattcatattttgaaaaatgtgcgtactcccttgcatgatcatgtgcgtaaggtgtgggactggtccaatacacagaccgtattccgttttgccattattcagatcattctgtctctggcggtaatctacgcaatgcagttgtagaatgctgggcacaccgggacagcatagagactgcgaccggtcatcctctgcaagaaaagaaggttggctgccggaaggaaaaaggtcggccgtcagaagaaaagaaaggcgtctgctgaaggaaaagaaggtcggtcgccgaagaaaaagaaggacggctgttggtagaaaatcatcatgtgccgagccgggagaaaaactgtcaataaatgatataagtaattgaacagataggaatggagaaattatgtacgatgaattaacccccactgacattaagaaaatggaagatgagatcgagtatcgtaagctggtggtgcgtcccaaggcactggaggacgtgaaggaagccagagcccacggagatctcagtgagaattttgaatattatgcagcgaaaaaatacaagaatcagaacgagagccggatccgttatctggagagaatgatcaagaccgcaaaggtgatctccgagaactccgccgtggatgaggtgggcatcaacaacactgttaccgtggaattcatcgacgacggcacggaagaggattacaagatcgtgaccaccgttcgcgggaactcactggaaggtctgatcagcaacgaatctcctctgggcaaggcactgcttggcaaaaaagtgggtgatgtggtccatgtgcaggtcaatgccaatgtgggctatgacgtagagatcaaggcactgaaaaacactgaggatgacggggacaagatccgcagcttctaatgctttgcggaccccacaagctatagaaagaaagggtaactattcagagcctcataacaattacagaatattcttgcggatcccggtattcaatgaatattttgcgatagttacagggcttggaacagatacaaaaaaaggaattataagaatgaaaaaatatctgctgtttgatctggacggtacactgacagatcccaaaattggaattacgacctgcgtacagtatgcgctgcactccttcggtattgaggaacctgatctggacaagctggagccttttatcggaccgcccttacgggacagctttatggaattctacggttttaccgctgagcaggcggaggaggccgtggcaaaatacagagagcgttttcagaatacgggtatttttgaaaatgaagtttatgccggtattccggagatgctgaagaacctgcaatccaagggctattttctggcactggcttccagcaaaccccagatctatgtagaacgcatactggagcattttgatctgaaaaaatattttgccgtggtggtaggcagtgagctggacggcaccagagagacgaaggatcaggtggtgcaggagaccctgcatcagctgttcaaggagaatcccatagagccggatcaggtctacatgatcggtgacagaaagttcgatgtggaaggagccagagcgttgggcgtggagagcgtgggcgtgacttatggctacggaagcaaggaagagttaaaggaagcaaaagcggactacatcgtacaatccgtggaagaactggaaaaatttctgcttcgcggcagcgaggaactggtgaacagcaatcccgacaataaaaagaaaaatcccatgtaccagagaatctggaccatggtgtattcgttcctgatgtttatcctggtgcgcaatgcggtgcagtatgcgctgctggcactgttgtatcagctggcacagtccggtgcttccggtggactggtagatctgctgatcctgagggatgagaccggtgcatataacggctattccggagatgtgtccagtatcatagcggcactgggcttcatcggcggagcactggcggtatggtccacggcaaagcttctgatcacgaagaacaaagaggatatgcatttaagccatctgaaaaaagaaggtaaggcaaaatatgccctgctggtggcagtcaccatcggtgccgttatcggtttcaacctcctgtttgaacttctgggtgtgaccaataaatccgaagcttataccgaagttgcatcccagcaatattccgcacactttatggtaggaatcctcgtattcggcttcatctcccccatagcagaggaactcctgttccgcggagttatctacggatatctccgcagattcatggatatcaaactcgccatagccctgtctgcactgatctttggcgtttaccacatgaattacgtccagggcgtgtacggcttcctcatcggctgcctgatggcatatgcttacgaatactttggagagttcaaaatggcggtctttgtccatgtggcatccaatgtcctcgcctactgcctctcctataccgccatcgccgtcaccggcttcgtcagctggcccgtatgcgtggtattcctggtagtggcagcagcatccctcgggatgctccataaacagaaaaatatattctaagtaataataaagtatattagccatccttcggatattcgataagatatccccggatggtcaccataacccagtagccccgacagagggaagaataagcagaccgtaagcagacgtcggcacttagcgtgggtactttccacgcttatgtgccgctacgctctgcgacatgagcgcatcgtgctaaagcacgcgcgtgtcgcgtttcttccctctgccgaggctacggagattttatagaaaaataggagcaacatatgaaattcagcattatcgtagtatgcctgaaccccggcaccaaactgaatcagacccttgacagtatcctggcccagacctgcccagacttcgaagtcatcgtcaaggacggtggcagccgtgacggatccatagagtccatgcgcactgacgggcggatccatctctaccaggaaccggatcacagcatctacgaggctatgaaccaggcggtctctcatgtgaccggagattacattctgttcttaaactgcggtgacctcttctatgacaaggaagttctggcacacaccgcacaattcatggaacagcaccctatgaaactgcaaggcatctactacggagatacctacagcgcgaaaacggacacgaagatatcatccccgccccgaatcaccggctttgtctgttaccgcaacattccctgccatcagtcctgcttctatgccgcagacctgtgccgacagaagccctacgaaccaaaatacaagatccgcgcagattatgaacattttctgtggtgctattaccgggcgaaggctcccatgcagtatctggggcttaccgtatcttcctacgaaggcggcggctactccgagacaaaggagaacctgaaacgcagtgccgcagagcataaggagatcacggcaaaatacatgaaacccgtagaactgttccgctaccgcgctgtgatggcactgaccctggcacctctccggaccgcaatggcagaaagcagacatttctctgcaatctatcagggactgacaagcaaagtgtatggtcggagacaggaaaaatagggaaaatccccaaagagttgtgctaaaagcatggcttaaaaaagaaaattaacacaattaacagacaatagccgtgtgaacaactgaattgacaaattatctgacaattcaaggaaaaatctatatttacaaatgagaaaaataggtgtatagtacagaaaaggtcgcaatgaggcgctcgaaagagtctcattgcgaccttttttagttgcaggaaagtgctgaaagcacagtcttgcgaatgaggttctgaataggaacagacagattaagaagagagaaatagaaaaccggaaaggagaactatatgtttgatgtaaaacaggagctgcccaaggcaccgttatatcgggaagaatttgagcatgataactgcggtatcggagcctgtgtcaatattcacggagagaagagccgcgcgaccgtagagaatgcgctgaagatcgtagagaatctggagcacagagccggtaaggatgcggaaggcaagaccggtgacggtgtcggtattctgacccagatcccccacaaattttttgccagagtgaccagagctctgggcatggacatcggcggagagagagaatacggtgtcggcatgttcttcttcccgcaggaagagctgcgccgcaatcaagccaagaagatgttcgagatcattgtggaaaaagaaggaatggaattcctcggctggcgtgaagtgcctaccttccccaatgtgctgggacataaggccgtagagtgcatgccctatatcatgcagggattcgtgaaaaagcctgccgatgtggaaaaaggacttccctttgaccgcagactttatattgcaagacgtgtcttcgagcagtcttccgatgatacctatgtagtttctctttccagcagaacgatcgtatataaaggaatgttcctggtaggtcagctgcgtaccttcttcgcagatttgcagagtgaagattacgaatccgccattgccatggtacactcccgtttctccaccaataccaatcccagctgggaacgtgcccatccgaaccgtctgatggtacacaacggtgagattaacactatccgcggcaatgccgacaagatgctggccagggaggagaacatggaatccgagcatctgaaaggccagctgcacaaagtactgcctgctatcagcaagaccggttccgactccgctatgctggacaacacgctggaattcctggtaatgagcggcatggaactgcctctggcggtcatgatcgctatccccgagccctgggcgaacaacaaggccatgtcccagaccaagagagatttctaccagtattacgctaccatgatggagccctgggacggccccgcatccatcctgttctccgacggagatatcatgggtgcggtactggacagaaacggcctgcgtccttcccgttatctgatcactgacgatgataccctgatcctgtcttccgaggtaggtgtccttcctgttgatcccacgaagatcaagttaaaggaaagacttcgtcccggcaagatgctcttggtcgataccgtacagggcagagtcattgacgatgaggagatcaaggaaaaatatgcttccagacagccctacggtgaatggctggacaacaacctgacagaattgaagagtattcacatcccgaaccagcgtgtccctgagtacacctacgaagagcgtcagcggatgcagaaagctttcggttatacctacgatgagatgaaacagagcattctgcctatggcaaagaacggcagtgaagcgattgccgccatgggtgtggatacgccgcttcccgtcttaagcaagacgaaccacccgctgtttcattatttcaagcagctgtttgcacaggtaaccaacccgcccatcgatgcgatccgtgaggagatcgtgacttccaccaccgtatacatcggtaccgagggcaacattctggaggagaccccgaagaactgtaatgttctgaaggtcaacaacccgatcctgaccaacacggatctgttgaagatcaagaacatgaaggtagacggattcaaagtagaagtcgtacctatcgtatattacaagaacaccagcttagagcgtgccattgacagactgttcgtggaagtggacagagcttacagagacggcgtgaacatcctgatcctgtccgacagaggcgtggatgagaaccatgtgcccattccttccctgctggccgtatccgccctgaaccagtatctggtacgcaccaagaagagaaccagagtcgcactgatcctggaatccggcgaacccagagaggtacaccattttgctacgctgctaggttacggtgcctgcgccatcaacccttatctggcacaggataccatcaaggaactgatcgagagcaatatgctggataaggattactatgcagcagtggatgattacaacaatgctgtcctccacggcatcgtcaagatcgcatccaagatgggtatcagcaccatccagtcctatcagggttcccagatcttcgaggctatcggtattgcaccggaagtgatcagtaagtatttctccaacaccgtatgtcgtgtgggaggtattaccttaaaagatattgagcagcaggtagacgacctgcactctcaggcatttgatcctctgggactgaaaaacgatctgaccttaaacagccccggacatcacaagatgcgcagcggcggtgacgagcatctgtacaatcccgctaccatccatatgttacaggaatccaccagacgcggtgattaccagatgttcaaacagtacactgccatggtaaacgacgaagattccatcaagaatctcagaggactgatggacttcaattatccgaaaaagggtgtgcctattgaggaagtagagccggtagagtccattgtgaccagattcaagaccggtgccatgtcctacggttccatttccaaagaagcccatgagaccatggccatcgccatgaaccatctgcacggcaagagcaattccggtgaaggcggtgaggacctggatcgtctgaccgtcggaccggacggactgaaccgttgttccgcaatcaagcaggtagccagtggacgttttggtgttaccagccgttacctggtaagtgcacaggagattcagatcaagatggcacagggagcaaaacccggtgagggcggacatctgcccggaggaaaggtatatccctggatcgccaagaccagacactccacgcccggtgtgtccctgatctctccgccccctcatcacgacatttattccattgaggatctggcgcagctaatctatgatctgaaaaatgccaacacccaggcaagaatctctgtaaaactggtatccgaagccggtgtgggaacggtcgcagccggtgtagccaaggcgggagcccaggtcatcctggtatccggctatgacggcggtaccggtgcggcaccgagaaactccatccacaatgccggacttccctgggaactgggactggcagagacccatcagaccctgatcatgaacggcctgcgtaataaagtccgcatcgagaccgacggtaagctgatgagcggcagagacgtagccatcgcagccattttaggtgccgaggagttcggttttgccaccgcaccccttgtgaccatgggctgtgtcatgatgagagtatgtaatctggatacctgcccggtaggcgtggctacccagaacccggagctgcggaaaaacttccgcggtaagccggaatatgtggaaaactttatgaaatttatcgcgcaggagctgcgggaatacatggcagcactgggcgtgcgtaccgtagatgaactggtgggcagaactgatctgctgaagagaaaagagcatctgaccgatcgtcaggaggaagtggatctgacccagatcttaagcaatccttacgagggcagcaagcagaaggtgacctttgatcccaggcaggtctatgacttccagttagagaagacactggatgagaaggtgctgttaaagcagttaggaaaagccatcgacgcaggacagaagcgcagcatcgaagtagacgtcagcaacaccgatcgtgctttcggtacgatcctcggaagtgagatcaccagaaaactgggcgatgatgtggaagaggatacctaccatgtactgtgcaagggggccggcggacagtccttcggagcctttatccccaagggcctgactctggaactggtaggcgacagcaatgactacttcggtaagggcttatccggcggtaagctggtggtatatcctcctcagggcagcaggttcaaggctgaggaaaacatcatcatcggtaacgtggcactgtacggtgcaacctccggtaaggcatttatcaacggtgtggcaggcgagcgtttctgcgtgcgtaactccggtgccatcgcagttgtcgagggtgtaggagatcatggctgtgaatacatgaccggcggtcgtgtggtagttctcggtatgaccggtaaaaatttcgcagccggtatgagcggcggtatcgcttatgtactggatgaaggcaacgatctgtacaagcgtctgaataaggaaatggtatcttccagtgagatcacatccaaatatgatgtgctggaactgaaatccatgatccaggagcatgtggcactgaccaattccaccaagggtaaggaagtgctggacaactttggagagtatctgcccaagttcaagaagatcatccctcatgattatgagagagtcttaaagaccatcgtccagatggaggaaaaaggactgagcgcagagcaggcacagatcgaagcattctatgccaacaccagaaagtaggaggccagtgtgaaaagtaatcttgacagattgcttttcacacgactaatttgtgccgcgggcgccacaaattagtttatcgcagaactaaatatgaaatttagttcgcgattcttccgacgccgaagcgtctgcagaatggagagagtcatgggaaaaccaacgggatttatggaatataaaagggaagtcagcgtggctgaggatcctaagaagagaatacagcattttaacgaattccatgagcatctgccgaaggaaaagcagcgcttacagggtgccagatgtatggaatgcggcgtgccgttctgccagtcgggcatgatgatctgcggtatggccagcggatgtcccctgcacaatctggtgccggagtggaacgatctggtatataccggcaactggcaacaggcttacaaccgcctgaaaaagaccaacaatttccccgaattcacgtccagagtatgtccggctctgtgtgaggcggcatgtacctgtggactgaatggggatccggtctccaccaaggagaacgaatatgcaattattgaaaatgcctacagcgagggttatgcggcagccaagccccctgtggtgcgtaccggcaaaaaggtggcagtcatcggcagcggtccttccggactggcagcggcggatctgctgaaccagagaggacatcaggtcacagtatttgagcgctccgaccgtgtgggaggactgttgatgtacggcatccctaacatgaagctggagaaacagatcattgaccgtaagatagccatcatgaaggaagagggcgtcacctttatcaccggtacggatatcggtaaggacatcaaggcatccaagctgttacatgattttgaccgtgtcgtactggcctgtggtgcttccaatcccagagacatcaatgcgccaggcagagatgccaggggaatctatttcgcggtggattttctgaaagccaataccaagagcctgctggattcgaactttgaagataaaaaatatgtggagaccaagggtaagaacgtggtcatcatcggcggtggtgataccggtaatgactgtgtgggaacttccatccgtcacggtgccaagtctgtaacccagatcgagatgatgcccaaggctccggacaagagagcagagaacaatccctggcccgaatggccgaaggtctgcaagaccgattacggtcaggaagaagccattgcagtctacggacatgatccgagaatctatgaatctacggtcaaggaatttatcaaggataagaacggtaacctgaaagccgtgaagatcgtgaagctgtcctgggaaaaggatccggctaccggacgcatgaagatgcaggagatcgccggaagtgagcagatcctggatgcggagatcgtactgatcgcagcaggatttttgggaagtcagaaatatattaccgatgctttcggggtggaattaaatgaacgcaccaacgtaaaaactgcccccggcaaataccagaccagtgtggaaaatgtattcgtcaccggtgatatgcacagaggacagtccctggtggtgtgggcgatccgtgaaggcagagaagccgcacatgctgtggatgagagcctgatgggctactctaatctggtgatccagtagaggtattattctcgtagatggatctcagacctttcataagaagattctgatcgatatggatcttcgtttcacaatgtggaatgacggtcgttgcgtaccctccggtggcaacgaccgttgctttttgccctaactctgtctggatacggcggatcagtccgtcgatggcacaggcgttgcccaagagcattcccccggtgatgcattcctgcgtattcgcaccgatggtgtgggcgggcatatgaatgtcccctttcgggagctgggcggtcctgcctaaaagtgccctgtgggcggttccaacgccgggaaggatcaggccgcctaaaaagcgacggttctcatccaacacgttaaatgtcgtggcggtgcccagatcaatggtgatcagtggcagaggatagcgggaaatggctccggcgatatctgccaggcggtcgcagcccaccttttccggaaattccgtacagatctcatagccaagatccagttcatgggtaagaagcagaggcttctgccccagaaaagcttccagagcagaggaaaaaacggctgtcaccgaaggcacaaccgaggagatcacagatccctcaaaggcttcggcggacagaccgtgtttgtctaaaatcatattcagtttttttctatatccggcatcagacaggggacggcgggacgatatcttctcaataaagagcagcttatttccctgaaatcccccgatgccgatcgtagtatttccgatgtcgattgtcagtaccacgggtatactcctgttatgctgcagactctgctttctgatatacaggaatgacttttgccttgatcagtgccagccctaccgctccggtcaggaacgtggatgcacacatctcgaagaccgcattcacacctacaaaagagcagatgaataaaatcgcgtttttaccacccatcagtccctgcacataggaagtattgccgaacagcagtactaaaagggacatgaaaaatgcggtgttgaaaaatgcgctgcaaaatccggtgatcatgcaggcgattctgtctcctacggctttgcggctgtaacggaagacatatcccaacagaaatccgtccagaagtctggggatgaaacgctggatgaaggccaacacagggttgatgccaaaaagcattgctcccatggcgctggtgcctcccacgccgatgcattgcaaaaagctggtcaatccgaatactgctcccatggcggctccgcctacagggccaagagtgattgcagccagtgcaacggggatgacattgaaggtgattgccagggggccgatgttcaggtacccgagcggggtataagccatcagcaaaagtaccgcagcaaacaatcccatcaacgtgagtcgcattgtcttactttgtttgttcatatgaaattttcctccttgttaccattctccctctgggagatacaatacaagctgccccggtgattcgggacactcctactgtttatatcatatcccggacaaaaagaaaagtgatatttgcataaaatatgcacttatggtattttaggagtacagttttgaagtatttttgataaatcaggcaaaaggagacgactatgctgaagggaaagaccgtagttctggcaatctcgggaagtattgctgcatataaaatggccaatgtagcgcggatgctgttaaaacagcactgtgacgtggaagtgctaatgacacagaatgccacgcagttcattaaccccattacttttgaaagtctgacgggacataaatgtctggtggacacctttgaccgcaatttccagtacagtgtggaacatgtggcactggcaaagcgggcggatgtggttctggtggcaccggcttctgccaatgtgatcggcaagattgcaaacggcatcgcagatgatatgttgactactacggtcatggcatgtccctgcaagaagattgtgtcccctgccatgaatcataatatgtatcacaaccccatcgtgcaggataatatcgaaaaattaaagcatttcggctatgagatcatcactccggccacgggaatgctggccaacggcgatatcggtgacggcagaatgccggaggagtccgtactgttcgaagccgtggtgaaggagatcgcctgcgagaaggatctggtgggcaaaaaggtgctgatctccgcaggtgccaccagagaacccattgacccggtgcgttttatcacgaatcactccagtggaaaaatgggttatgccctggcgagagctgcaatgcaccgcggcgcagaagtgacggtggtggcagcccatacggatgtggagccgcctttgtttgtaaatgtggtgccggtacagacggcagaagagatgtacgatgcaatcgtgtccagagcgcaggactatgattttgtcatcaaggcagcagccgtggcagactacaccccggcagtgacagcagacaataagattaagaaaaaagacggagacatgtcgatccctctggtgcggacgaaggatattttgaagacccttggggaaaacaagagaccgggacagattttgtgtggattttccatggagacggaaaatgtactggagaattcccggaagaagctggagagcaagcactgtgacatgatctgtgccaacagtttgaagagcgcaggagcgggctttggcacggacaccaatattgtgacactgatcacaaagaattccgaggagagcctggaactgatgagcaaggaacaggtggcacataaaattctggataagctgcttgcaatagttcagccatagaacagcagaatgaatgcgagggggcttgcacacaaagcgttaattctgtagaaaaatcatttgcttctatgcaaaaagatggtatgatagaagcaatgacgtatagccgcatagacggcggattgagaggacgaaatggacaaaattattttgacaggtgacagacccaccggaagattacatgtgggacattatgtaggctccctgagaagacgtgtagagctgcagaattccggtgaatataagaagacttttatcatgatcgcagatgcacaggcactgacggataatatcgagaatcccgagaaggtgcgccagaatattatcgaagtggcgctggactacatgtcctgcggactggatcccagtaaggcaacaatcttcatccagtctcagatttccgagctgtgtgaactgaccttctattacatggatttggtaaccgtagccagattacagagaaacccgaccgtaaagagtgagattcagatgcgtaacttcgaagccagcatccctgtgggattttttacctatcccatcagccaggcttccgatattaccgctttcaaggcgaccaccgttcccgtaggtggtgatcagctgcccatgatcgaacagaccagagagatcgtacacaaattcaacaccgtatatgcaccggtactggtagagcccaaggcattgttgcctgaaaatgaggc

SEQ ID NO: 677 - DNA, 8123 bp, unidentified
  source 1..8123: mol_type = unassigned DNA
cttgtaatccttacagtccggctgccaaggctctgtaccctgaccgtcaaacacatagtccgtactgatataagtcatcttgcagttcagtttcttgcatacatttgcaatattttgcgtgccacctgcattgatagcacgaacttttgccactttatcgtcatcctctgccatgtccacagcagtccatgctgcgcagtggatcacggcatccggatttacttctgtaattactttttcaacggcattcttatcggtaatgtccagagcgacatacggtgcttttgttaccgcagaaccatcagctacaccgctgtaattttcctgaatatcagatcctacactttcatgaccacacttcagcagttcattcatcacgtcatgacccagctgaccgccaacgcctgttacaaaaaacttcatggtcttttctcctgttagcgattgctgtacattttctcgtagtagttctgatactcaccgctgatgatggtctcccaccactcacggttatcgagataccactgaatggtcttcttgatgccatcctcgaacttagtctccggcagccagcccagctcgttgtggatcttagtcgggtcgattgcgtaacgcatatcgtgacccttacggtcgccaacgtgagtgataaggctctccggcttacccagctccttgcagatgattttcacgatctcgatgttctgtttctcattgtgaccaccgacgttgtagacttcaccaacgcggcccttgtggataatcaggtcgatagctttgcagtggtcttccacatacaaccaatcgcggacattcagaccctctccgtaaacaggcagcggcttgtcagccagtgcattggcaatcatcagcggaatcagcttctccgggaagtgatacggaccatagttgttggagcaacgggagatggtcaccggcagaccataggtgcggtggtaagccagaaccagcaggtcagcggcagctttggagctgctatatggagagctggtatggatcggagtctcctcagtgaagaacaggtcaggacgatccagcggcaggtcaccgtaaacctcatcggtagaaacctgatggtaacgctgaatgccatacttgcggcaagcgtccatcagcacactggtgccgatgatattggtctggaggaagatgcccggatcttcgatggagcggtcaacatgagattctgccgcaaagttgaccacgatgtccggatgctcttcctcaaacaacttgtccacagcttcgcggtcacagatatctgccttcacaaagcggaaattcgtgttgtccataaccggtgccagtgtggacagattacctgcataggtcagcttgtccagacagatgatccggtaatccggatacttcttcaacatatggaatacaaagttactaccaataaaaccagcaccgccggtaacaataatattcataatctattctcctctacactttccctttttaatacagatgctcctgatacttgccatccatgacatccttcaggtactgaccatactgattcttcttcataacctcatagacttccatcagctcatctttgctgatccaaccgttcaagtatgcaatttcttccaggcaggcaatcttacgatgctgatgctgttccacggtcttcacgaagttggtagcatccacaaggctctcgtgtgtaccagtgtccagccaagtaaatccctgacccaataactccacattcagggtaccatcttccagataaatacggttcaaatctgtaatttctaattcaccacgcgcagaaggtttcaggttcttagcaaactcgaccacacggttatcatagaagtacagtccggtcacgcagtagttactcttcggatgttctggcttttcctcaatagaaacggccttaccgttcttatcgaactccacgatgccgaaacgctctgggtcgtccacatagtagccaaacacagttgcgcccttgccgttctcagcgttttccactgcggcagtcaaccttttctttaacccgtggcccgcaaagatgttgtcgcccagcaccatagccacagaatcatcaccgataaaatcggcaccaatgataaaggcctgtgccagtccatccggagaaggctgaacagcataggtcaggttcacaccaaactggtgtccatcacccagcaggttctcaaagcgaggagtatcctgcggtgtggaaataatcaaaatgtcacgaatgccggcgttcatcagaacggacatcggatagtaaatcatcggtttgtcgtagattggcaaaagctgtttgcttgttacttttgtgaggggatacagacgagtacccgatcctcctgctaaaataatacccttcataactgtttcctccctcgtcaatctttacatttgctcaaacagtttcccatgttcttctgaaactctacgagcattaaatctgttatgtacatcttccaagccctgtgccaccaatctatctcttaatccatcttctcgatagatccgtagcacagcctcacttgctccaatatcatcgtcaacttctactagcagaccattttctccaccccggattatattcggaatggcatccacgctgcttgccacaattggtttgcctgccatcatatattcgggcagtgctagaccgaagccctcccagcgactcaacaagcacgcaacatcaaatagctctacatagctcattggattatcaacccaacctgtgatgtgtaaactgtccgagaaaccattgtcttccgcatactttctaatctcggcttcttgatttccgtttccaacaataataaagtgtgcatttggaactgcttcttttaccttctttgccatcttaacaaacacatccggtgctttttgtgaactcattcgtccaaccataccaacaacaaatgcgtcttctggaatgttcagttctctccttttaactgcaccatgtactccattctcataggcttcgatgtccacaccgctaaaaatgacctgtaacttgtcctctttgcatattttcttatccaatgctgactgcttctccgcgtctgaaatgcagataatcttatcacagaatggtgcagctatcttttcaatagctgtgtacattgcctttttctttgcagaacatcgcatattgaatgcccacccatgtgggttgtatacacaatgattcttcaagccgatatccgcaacacgagcaatagcccccgctttactggaatgagcgtagacgatatcggggttatacttctttatcagtgttctaacctctttaatcgcccttaggtcgtttccgccgatggctctagtcatctcaacctgttcaaaagaatctaccagatctctgtagtcttcttcatggaaatcctgtgagcaaactaatacattttcaaacttatctttatccaaatacttgagaagcattcggatgtaacgatccacaccacctgcggcctgcgccacatgcaatattttgattttattcttcctcatctccaaatactcctcgtcattttctccgcaatctatgtacacatccatatggatggtatttctttttcctcatgccgctcacacggctaagtgttttcttatgcagtcgtatccaattaccccagcaatcgtgttttctacttcataaaacatccgttgagtacactcgtctctatttctctatagccgaagtgctgttttatacagtcgacccccgtataccctgctatgacgttttttctaagcgttggattgttgaatcgaaccctgtcggtgcatgagttttgttaaaactgtatatatcacccagtccatttttcgccattcattgttcgttatgaacaaatcattcactcttaccgcacaaaacatgtatttatcatcaccatccaggctctactcaacagctgttttatgaagtagaaatcatctgtttttctctatttttcatgactcaacaaaccgttatgatgtaggtgtcattagcaggtcagatagtgtactcaacagcagtttcagacgttaatgataaactcatagatttttgttgttttatcctgttttccgccatttctatgattcttctgaaaaagatgtgccaattttgtgccacatgggccaaaagctcagcgttttgtgtaaatatctagcatttatagttcatatagctgtgaaacataaccaatttcagcaccctatatggtgtgcaaaacaggttcttttcgacgatgctacgtcaatacggtttgttgagtagacattagatggacagcttactccctttattcctttggcatttacacaccagtggacatcccccgcatttaagctatagaccaagtcagccttatcctgatacggaatgaacacaatgttttcaaagtgatgcctgttactatactgtaccagcttttgcaatacagatcctgcacctataaaagcaaatacaacttctcttccatcttttgttctcagaccatcttctctcacacctgtcaatgtatatccctttaagtaactcggcaccacgcaaatgatcgtgatgttaaacttatccagcatactctccgccaattcacacagaatctgccccgtagatgcagtatctggaatatagtaatgagcatagatcaggagattctttttatttatcattcttttcttctccatccccaattctttccacaaaaacaaatcccgcaacagcgtatgcgcctttgcattcgatgttgcggtcaagttcagtcttttctctgtaagtttttttgataccgtctccctgaagcatgttcttattcttgtttctcaaaccattttaccggtacggaggtttccgatcctatttggaagcctcctacgcaccgttgccctccatgcccagaagcacctataaacaactggcatcaccaccgacagccccgcttctatccggtacaggtaccagatccgtcctgcagcataaccctgtctatttctccgtcttcagaatccgtgacagttctgccacgttattggacgaatccatagctgcataggttacgatcacttcgccatttccggtctctgtcaccttttcaatcagtaaggaggctgtcacatccccgtcatgggaatcgtaagcggttacgccttccagcaacttattggtatctgtgccgattgcataggtctgctcggtatccggcagtgtgatcaccggcgctgtccggtccatttgtaagtagaagaatgcgcaaagcgcaatcaaagctgcatctgcaataaaaaatccgatgatcagaccttttgtactcattttgcatcctccttttctcccgtgttctgttccggtacagcagtttctgtctcagcagctgtcgcgtcggttttggagcccgcatccagcggcagctcaccctgtgcttcgtctgcaccatcctgtccgtggccgtaatagttgccatagtaatggccataatattttccataataaggattctttttggtgttgaccttgttcaggacacatccaagaatccggcagcctaccttgtccagctgttcttttacattctgagcaaatttgtagctgatggctccgctttcgacaacgagtaccgttccatcgcagatcgcacctgcaaccgcgccgtcgatgacgctgccaaggggcggggtatctacgatgacataatcgtattgcatccgcagcacttccagcatatttttgaacgcatcgcctcccagaagctcactggggttgggcggtacaggtcctgcaaaaataatatcgaaattgttgacgttggttctgcagcatacatcgtccagttccatctgtccgctcaggtaatgggacagtccgtatttttcacggtttgctttataacggccccgcagtactgattttcgcagatctgcgtcaaccagaatcgtcttcttgccgctttctgcaagggacaggcataactggaaggaaacgcttgtctttccttcgtttggcgtacagctggtcagggaaatcactttgacattttttcccgcaaagctcagattggtacgcaatgttttataggcttcttttgttctgaaatccagacgctcgatggagcgaattattacgttctgcatatttccctgtcacctcactttccgcttgtcgcttgttttttatattttttctttttcttcttgctttcaacttcattcagcggaatcatcgcaagggtggaaattccaagatatttttccacatcctcttccgtctgaatcgtatcgttcatcaggtgggaaaggatgatgatggctgctacaatcaggataccaagcattccgcccaacaccgtgttctttccgacggaggggctcgccttatgggtcggtacgtttgcagtttctacgatattcactgtttcgatatccataacgttgcggatatgggtcgaggctgtttcacggattgcattagcaattttcattgccgcaaccggattgctgtccgtcactgtaatggagattactcgggtgtctgcgggcgtgctcactgtaaccttaccgcttaactgctcataacttaacggcagattcaactgctcgatcaccgcttccagtacgaaacggcttttgatcagctccgaatagtccttaaccagctgcgtgcctgcctgcaggtcgctgtaggttacatttgtgttgctactgtcctgtttgttcaggatatagatttttgttacagactgatacgtgggcgtcatcaggaatttgcttcccccaaaggccagaagtgctgtaaacagtcccactgcaatcatcagcggaagctttctccagagtacccaaaaaagttctaccagatcgatttcggtttcctcgttgcttctctggttttgattttccatgtctcgttcccctttttctattcgatgtcttccatatctgtattgtccagaatgtgtgctgcgtttttgtagagcagacgtgccgcatattccgggctgcagtgtctttgcagccatgaggccccttccgccatcgatacagaccggtctccctctgctctgtgggcgtccgttcctatcagatctgcaagctcttcttttatcaggctgcgtgctgtgcgttttagctgtccgcccagcagtcccggcagctctcctgcgttgatctggattcggcagcccatgtcctttaattcttcgacccggttgaaatcctttaccacgttccgatagcgctcggtgtgggcgacaatcggccggtagccctcgcagagtaggtcatacaggcagttgcggatgtacgcccattcttcgtccggcgaaaattcggtcagaatataatccgatccggcgagggttcccgccttgccctgttttagcagctcgatggtatccatacagcaaaaaatctcaccgccgctgtaaagtctgatgtcaattccgttttctttcgcagcctgctgcagcttctgtgtccgttccagtgcagaagcagcggtaatgctgcgtctgttcggtttctgatgcggagtcaggataactgctgcagcgccctgttttacttcctggcgcagcatcgccaggctctcttccagatttctcgcgccgtcatccacctccggcaaaatatgacagtgaacatctatgtactgatttttcttctccggcatctcaggcctcgcttccggagtctttttcgctgtccgaactgctttctgctgtctccggtactgtctcgtattctgctgcagcttccgcctgtgctgcccgaagtccatcggcaaacagccacagcatccgcaggcagtaatcctgtacaacctgaggcatcccgtcgagtcctcgcatcagctgttcttcctgacttaccgcggattttttctcttcttcaccataaatcagcgtatccagactcactccatacaagcgggacaggttaatcagtgtttccacactcatgccgcaggttccccgctcgatatccgcataatatttattgacgacaccgagccgttctgccaccagctctctgctccagccgagctcaagcctccgacagcgcatccgctctccggcagcgatccggtcatatgccggcttctcctgctttctcttcat

SEQ ID NO: 678 - DNA, 6512 bp, unidentified
  source 1..6512: mol_type = unassigned DNA
ttaaaaatattcggcaattttttcctttaaccctacccagaagtcttttgcatcctgggaatccggcagtaaaacggcatcctcgtatgcctgataagcggttttttccgcatcatctgcagtctgtgataaaaataccgaataatgaccactcatatcatgcagtctgtctgcaagccgcactgttacaaaatctgcaaaatccgctgcctgatccgtattttttgaaaaatcattgacaataaacatatccgtagatgcacatccgatagaaggaagttcctcattcagtgccgggatctccatcacagaataagatatatcgtctaatttttgcagggaatctgtgtttacaaacgcacagagtgtttttccggctttaaaatgttctaaaatgctgtccatggagactgaattgatgtctaaggaaaatgatcctaaaatggtttcaaagtattcaagatctttctgatacagatcttcatcataggccacattcatcgtttccggcgccgttttctcaaacgttacactgtttccaacgaacgggaaatcgtaaaatgcatcatttacatcccactctaacaggtattccacattttctcccggttcattctcattagaataatcaatgatcgcctgcagtgactccggctggttttcaaaatatccgttctgataaacaaacacatttgcatcgtaactgagcggatatccaatcattttatcctcataggtggaagctttcactgacttttgggatgccccctcataagatcctccatcctcattttccatggcaagaccatataaatatgcctcctcaagttcatcgccatttaacagataaacatccggataatcctctccctgcatggtattgtcgtaaatcatcccgatataatccagagtatcctgacatttgaaagctgccttcacacccgtctgttcaaaatactgtctggctgcatattcaaaaaaatcttcataagatggatcttcataccacacggtcaggtctgtatctgccagatcgtatgcatctgttttcacatccggctgttttccttctgtgcccggttcttctgcctgcaacggaaatgtcgtctcttttacaggctgttttgaaacgacaccagccataatggctgctcctgcgcaaaccactatggctgcaattacacttctcttttgtatgttcttcataatcccattttcctattcctcgttttacgacaacagactgcacacatccgcgtgcagtctatgattccttacatctgatccaatgcttttttcagttttccgatcatctcatccacatgttgtttctcgatgatgagcggtggtacaaaacggagtacgtctgaacctgccgtgatcacaatcagtccttcctccagtgcctttgcagcgatctgtccgaccggcttttcggataccacaccctgcatcagtccaagtcccctgcgtgctgtcagaaaatcgtaggaagctaccagttcatctaatttttcttccagatatggtgtgatttctttcacatggtctgtgatgtggtcgcgctccatcatctcaagcaccttatcaactgcagcaccgacaaatgggtttccgccgtaagtcgttccatgatcgcccggttttaaagatttttctgccaccttttcggtcatcaggaatgctccgaccggaacaccgcagccaagcgcttttgcacttgtcatgatatccggtttcacaccgtaatgctgccatgcaaacatctcaccggtccgtcccataccgcactggatctcatctaagatcagaagaatatcatgctcatcgcagagtttccggacaccttccataaattcttttgttgccggataaataccgccctcgccctgtactgtctcaaacaggatcgcgcatgtcttgtccgtgatccgttttttcacgctgtcaaggtcattgtagtctgcaaatttcacacccggcattaacggttcaaacggttcctgataatgtttatttccggtgacggagagtgctccgatacttcttccatggaaagaatgattcattgcaatgatctcatgtcctgcatgtccgtctctcgtgtaagcgtatttttttgctgccttgattgcaccttcgattgcctctgtaccactgttggtaaagaacacacgatccatcccgctcgcttttttcacacgctctgctgcatggatgattggcacattgtaatacaggtttgatgtatgcataatcttatcgatctgtgcttttaaggcatccccatactctttgttgccgtatccaaatgcctgaactgcgatgcctgccgcaaaatccagatattcttttccgtctgtatcatacagataaacaccctcaccgtggtctaataccagtgaaaaacgattgtatgtgtggaggatatttttctccgcctcattgatatatccttctttattcatgataaaacttcgtctccttatctcctaaaatggcagttccgattccgcggttcgtaaagatttcaagaagcaggcagtgtgcgatacgtccgtctaagatatgtactcttgaaacaccgttctcgatcgcatcgatacagttgtttaacttcggaagcatgccgccgccgataaatccgtccccgatcagttctctcgcctctgatacacgaagctcggagatcagtgtatctttgtctttcggatctttgtaaacgccctcgatatcggttaaaaatgcaagtttttcagcttttaccgcttttgcgatcgcacatgccgcatcatcggcattgatattatagctgttgtattctgcatccattcctaccgggcagatgatcgggagaaaatctttttccagcagatcatataaaatctgcggatttacctctgtgatctcaccgacaaaaccgatatcctcaccatttgagtatttcttttctacttttaacagtccaccgtcttttccgctgatgccgactgcattgacgccaagctcctgtaccagtgtcaccagtgatttattgaccttatttaacaccatctcggcgatctccatggttgcctcgtccgttttgcggagtccattgataaatacaggctccatgccgactttgccaacccatttactgatttctttgccaccgccatgcacgatgatcggcttgaatccaaccagttttaacagagtgacatcctggatgacgtgtttttttaattcttcatctaccatggcgcttccaccatattttaccacaatgatcttacggttgaaacgctgtatgtatggaagtgcttcgatgagcacttcggctttctgcaaaagttccttcatattgttatcttccattagtttggttctcctctataaaatcttgatattgccgtacgaaactctgattcaggttgtgtttgctgtggccgcagcagcgccagttttttgaagagtttcgcgttggcctcatatctgcctgcctatgagcggtaatcggcgttaatttttacatagtcgtaggttaagtcgcagccccaggcggtagcctgtgcagcacccattttgatgtcggcgatggcggtgactgcgggttcggataagattttggttgcttcttcttcgctgtagtcgacggcgactccgtctttgatgatctgcatttttcctgcagcactctcgaagaataagtctactttttccggatcaaactgtgcgccggagtagcccatggcacagaggattctgccccagtttgcatcgtgtccgtagatggctgctttggtgaggcttgatgtgatgacggatttgcttaagatctttgcctgctcttttgtctcggcaccgattacttttacctcaaacaacgcagttgctccctctccatctcctgccatctgttttgcgagtgtctcattgacaaatcggagcgcctttgtaaaggtctcataatccgcatttttctcagtaatttttgtgttctctgccattccgtttgccaacaggagacaggtatcatttgtggaggtatcgccgtccacggagatcatgttataggtatcttccacgtccgcttttaatgcctctaacagcagctcctgtgaaattgcagcatcggttgtcacaaaacttaacatggtacacatattcggatggatcatgccggaacctttgcacatgccgccgattgtgacggttttgccggaaagctcaatctcaacagctacttctttttcatgtgtatcggtcgtcataatcgcaagtgctgcattatgtccgctctcgatatcgccatttaattgtgggaccatcgtttcaactcccgcacagatgcggtcgatcggaagctgcataccgatgactccggtcgatgccacaagcacctcatcggttgggatctgaagcagtttgtttactttttctgcagttgctttgcagtaacccatcccctcttctccggtacatgcatttgcaatacctgcattgacaatgactgcctgtgcctttttactgtcatatactacatgctgatcccatttgaccggggcagcttttacaatgtttgtggtaaatgttcctgccactgcacatggtacttcactgtagatcattgccatatctgttctgtctttatatttgattcctgctgctgtacttgctgccttaaatccttttgctgcggtcacgccgcctttgatctgtttcattttaacctccattcctgcactgctttctaatgtaaacaaaattttcatttgcatctcaagtttgtgcgtaactcaaatccttcatgtaaaaattgtatttttcgcactgtctgttcctgtgttttacggattaaatacggtctggttttcttcgtttgtgacatattcataataattgacatcctcgcggaacgtccatcccattccctgccagaagtggtttccgatgtcatttttcttaaatgcaatcagattgaccttgttgacatgttcacgctttaaagccgcaaggcacgcttccaccatcttctgtccgatgccctgctttctgtaatcctcatgaacgcagacatgatataaacatccgcgtctgccgtcatgaccgcacaggattgcaccgatgattctgtcgttttcacacgccaccatactcgtggtcggattgcgtctgataaagcgttccacaccttctttcgaatcatcaatactccggattccaaacccgtgaatccccatccacagtgcatgtacctcctcaaaatcctccattgtcatctcacggatgtttacttttttctcttccatgtctttgattccttttccagcataactgtttcgtccagttactttttacctcttattaaaaatataattcagtgtattactatgtaatctttattactatgtaatctttaattactatgtaatcttcaattactatgcatccatctatgatgcttacgggaacatcggaaccatatttaagccctctgcctcatcaaaaccgaataacaggttcatgttctgtaccgcctgtcctgctgcaccttttaccaggttgtcaagtgcgcccatcatcacgatacgtccggttctctcgtcaatcttaaaattaacatctacataattactgccctctacccattttgtctccggacagacatctttttccagcacacggacaaatttttctttgccataatatttatcatagactgcctttacttcctcataagaaggaaggctgccatctgctttttttaccagtgctgcatactcggttgcgaggataccgcggttcatcggaacaaggtgcggggtaaaattaacaacgatctctttgcctgccgcataaccgagctgctcctcaatctctggcgtatgacggtgatttgtcactccgtacgctttcatattttcattgacctcacagaacaggttcggcagctttgcaccccgccctgcaccggaagttcctgattttgcatcaatgatcagcgtattcgggtcgatcagcccctcttttaccagcggataagcggtcagaatggaacaggtcgtatagcagcccggattggcgataagtcttgctccttttactttatcacgattgatctcgcagagaccatagacagcttcctctataaactgcggactcttgtgctcgatcttgtaccatttctcatagacggaaacatctttgattctgaaatcagcgcttaaatctatgatttttaccttatttaatatatcctctgtcagcacacctgccaaaaatccctgcggggttgctgtaaagatcacgtccacctggcttgcaagctcatccatattatcgtctagacatacatcatccacgatctcaaacatattctggtaaacttctgcatattttttatctatgtagctgcgggatccataccatttaatctccacttctttatgtcccattaaaatacggaccagttcatttcctgcatatccggttgcaccgatgattcctgcttttatcatttttctcat

SEQ ID NO: 679 - DNA, 56647 bp, unidentified
  source 1..56647: mol_type = unassigned DNA
ctcaattaaggtgccaatatcgattgccagagcaaaaaaggacatcgaaaaggaaattgatttaagggagtacctgccatcagggctgtcgattgtaggggagacgacgacggtttccgtccgttgtgatattgagaagaatggacagcgtgtgctgggacttacatcttcggatattgctgtgagaaatctgccgaaaaattatacaatgaattttgagccggaaaacggaaagtattccgtagaattgttaggcgaagatgcgacgctggcggatgtaaatgtaggagatttaggagcttatgtggatttgaacggattatcggatggctcgcatacgcttgaattaaaatatagtctgccgaccggcgtgcaggtaaaaaataaaatcaagattaaagtcaaactaaaacgtcaggaaggtgaggcgacagatacgccaagcacaccaactccgacagtggagtagaaactaaaaaaatcccggtgggctgccaaggagcagctgccgggattttttttatattttttacaatgggatatttccgtgttttttatgaattacatcaatcgagcgtttatctgcaagcattaagatgtcggcataaacacgttctcttgttgcctccggtttaatgatttcatccacataaccgtgcatggaagcaatacttggattcatgaattttttattgtattcatcaatcttttcgctgcggaaagctgctttttctgcagggttcatattcttcatctgtttaccatacaaaatatcagcggcaccatcggcacccataacggcaatctcagcggttggccatgcataaacaaaatcagcacgcaggtgtttactgctcattgcgatgtaagcaccaccgtaagctttacgaaggataacattaattttaattgttgtggcctcagagtaggcatatagtaattttgctccgtggcggatgattcctttatattcctggtctttaccaggtaaaaatcccggcacatccgttaatgtaagaatcggaatattaaaagcatcacagtagcggatgaatcgtgctgctttatcagaagagtcacagtcaaggacgcctgccataaattttggctggtcagcaatgataccgatgacaactcctttaatgcgtccgaatccaacgactacatttcttgcaaattcttcctgaacttcgataaaggagtctgtatctacaattccgttaatgacatcgtggatgtcgtaactgtgattgctttcttttggaatgatatttgctaaatcctcattaaaagtaacattttcattgtatttaggaagtgccggacggtttgtgtgcaggtagccatcctcatagcacggaggaataatcgaaatcaattccttcacgcggcggaaacattccttttcgtttggcatatgaaaatgagcgacaccgcttttggatgcgtgcacattggcaccacctaattcttttgctgtaatatcttcgtttgttacgcttttgataacttttggtccggtaacaaacatctggctgatttcatcaatgacaaagataaaatcggtaatacccggtgagtaaaccgcaccaccggcacagttaccggcaataatcgaaatctgcggaatgtatccggatgccattgtattatagtagaaaatctcaccatatccggctaaggcatttacaccttcctgaatacgggctccgccggaatcgttgatgccgataaccggacagcggctctcgattgccattttaattgcattagcaattttgaaaccgtgctgtttaccaagagtaccgccgataacggtgaaatcctcagagtaaatcacgactttttgtccgccgatggtaccgtaaccggtgattacgccatcataaggaaattgtccctttttaatgttaaaagcatcttctaagttcgtaatgttcgagccaatttcacgaaatgaatcttcatctagcagcatgcaaatacgctctaaagcgtgaagtttgccaagtttgtgctgcttttccatattgtaagttgacattgttcattctccattctttcttaagatatcacttgaaactacgaaacctatcatataccataaaaagaaaaaatgtcaatcctatgttggctttttttgtagaatagttgacgaaatgcgtatttgggtgctataatcaaatgattaaaaaataaaaaggatggactagagaatgattcaattttttaataatttcctaaagtacaagtatcttatgggacagcttgtgaagaaaaatatcaagctccgttaccgtcgttcttatttaggaatgttatggacactgattgagccgctgcttacaatgattgtattgtcggttgtgtttggcagtttgttaggaagaaacagtaccgatgctgcatttgcaggcgtgccattcccgatttatgtcttgaccggacgtttgctgtattcgttcttttcatcagcaaccaacagtgcgatgcgttccattcgtacaaacggcgctatgattaagaaagtgtacgtaccaaaatacatttatccgttttccggcattttggcaaacttcattatatttttgatttcgcttgttgtactggttggtgtaatggtatttttcttagcaaccggtcagtaccatgcaccgattaacggttatatggttatgacggtgattccgctcttaaatttgtttatcctatcaacgggagtcggcatgatattatcgactttatgtgtattcttccgtgatatcgagtatttgtggagcgttatgttaatgctcatcatgtattgcagtgcgattttctatttcgcaagcaacatgagtggtgacacacaaaaactggtaaaattgaatccattatttggcgtgattgacaatttccgccgcgccttttttggacagccttttgatatgagattattgctgtatacatccgtttttgcggttggaacattggttattggtatgattgtattttatcggaaacaggattcctttatcctgaatatttaaggtgtaaggcaaattggaggttattatggcgaagaagtcattagcaatgaaaatagagaatgtgagtatgaagttcaatctcagttctgaaaaagttgataacatcaaagaatatgttattaaaatgataaaaaaggaattgatgtttcaggagttttgggcactcagagatatcagctttgaagttcagaaaggtgaccgtgttggtattatgggattgaatggtgccgggaaaagtactcttttaaaagtaatttccggtgtgttaaaagccacacagggaacggttacaacaaatggcaagattgcaccgcttcttgaactgggagccggatttgacagacagtataccggtgctgagaacatttatctgtatggtgcgatgcttggttacagtaaagagtttttggaagcacgttacgacgaaattgtagagttctcggaacttggcagttttatcgatgtgccggtaaagaattattcttccggtatgcgtgccagactcggtttttccgtggcaacaattgttgagccggatattttgattctggatgaggtacttagtgttggagatgcgaaattccgtaaaaaatgtgaaaatcgtattcagagcatgtttgataaaggtgttaccgtcattttcgtatcacattcgaccagtcaggtcttaagaatgtgcaacaagggcattcttttggaacagggccgtctgattgcacagggggacgtcgaggacgtagtaagtgtgtacgaagcaaagatgagtgagaacgaataggaggaaaagaaaatgaaaaaagtgattacttatggaacttttgacttacttcatgtaggccacattaatttacttcgccgcgcgaaagcattgggggattatctgattgttgttgtttcctcagatgaatttaacgccggcaagggcaaaaaagcgtatcattcttttgaagaccgcaaaaaaattcttgaagcaatccgttatgtggatgaagtgctgccagaatatacatgggaacagaagattgatgatatagtaaataataatgtcgatgtttttgttatgggagatgactggaagggcaagtttgatttcctcaaagactactgcgaggttgtttacctgccgcgtaccgaaggaatttccacaacaaaaattaaaaatgatttgaatatgaaagactgagaaaatgattaaaaaaacaggctatgtgctgtttgctttctttttctatctgttccgcctattacccataaatcggcagaaagtattttttgtcgcaacgcatgatgacagcaaagagggaaatatcggcattgtggcagatgctataaaaaatcagtttccatccatgaaaatggtgtatctcacaaaaaaagacggcatacgaagaccattttcgtttttctttggaaaagcgtttcatatggcaacggcaacggtgatttttctcgataatgagttcatgccgatggcgtatatgaaatttaataaaaatgtgaaagtggtgcagttgtggcatggaaccggtacgattaagaaattcggcttggattcggataccggggaagtaaaaagactagcaaaaaaagcaaatgaaaatattacgcacttgattgtcagttccgaatgtacggcaaaatggtataaaagtgcgtttggtgtagacgatgaaaaaattttcccgattggactgccgcgcaccgatttgatgttagatgaatctaagaggcagaagatgcaagagcgtttttttgggcagtatcctgatttgaggggaaagaaaattacgttatacgcacctaccttccgagattcacaggttgaaaatccggaaatttgtttggattttgattcccttaatcaatgtatgggagagaatgaggtgcttcttatccgtctgcatccgcatgtggcagagcattgtcctgtcggtatatgggatatgtatccggataaaataagaaatgtttccgattatccgggagtggctacgctgttatctgtggcagaccaattgattacggattattcatctattatttatgagtactgccttttggaaagaaaaatgattttttatgcgtatgactatgaagtatttcagaaagatggtagaaatttttacgaggactatgagaaatttgtgccgggaatgattgtatatacgcagccggagctggaaaaaaactggcatacggcttacgaggatgactcacaacgagagcagttttgcaggcgcattttcaagtatcaggataaaaatgctgtaaatcgacttttatgtttgatttttgacaagaaataagatataatgttgtgagcgtattattaggctaatttgagaacggagggctacgagtgaaaacattattagagagaaagattagtttagtagtaattattttgcagtttttagtttccttgttagtttgtatttattttggaacaacagggcttgtaccggttaagtacatggttgcgattgcagtcgttatggttgtattgcttgtctatcaggtgatgagccagctgacaaactccagttatatatttggacgtgtgttagccgttctgttttgtgccgtgttccttgttggtgcgaactatgtgagagagagtatggcagcattccagaatgtcggtggtgcaaccaaaaaggttgatgttatttctttctacgtcatgaaggacgatgcagcaaagacattagcagatgctaaaaattactcttttggtattctaagacagcaggaccgtgagaatacggacaaagcggttcaggatgcaagtaagaaactgaacaagacattgaacacggttgagtatgatgatccgttgactatggtagatgccttgtacgcaaaagaagtgcaggcaattatcatgaataaaagttttgtagatacggttaagagccagtataagacattttctacggacaccagagagctggatgcaagcaagattgagtcagaagtagaagaattggttgataccgatgtaacaacaaaaccatttaatgtttatatcagtggtattgatgtatatggtaagattggacagacaagccgaagtgatgtaaatattattgcgacggttaatccagttacaaagaaagtattactgacatctacacctcgtgattactatgtaccgctgtacagtaagggcggtaaatcgtattccggaggtattccggataaactgacccatgccggtatttatggtgttgactgctcgattaatacactggaaaaattgtataacattgacattgattactacgtgcgtgtcaatttcaccagtctgaaaaagattgttgatttgcttggcggtgtagaagtgtattcggattatgacttcatttctgactggggtccacacggtgccggtacacattataagttcaaaaaaggttataacaaagtaaatggtaagaaagcattggcattctgccgtgagcgacaccatttcgcaaatggtgactaccagcgtggacgtgaccatcagcatatgattgaggcaattttgaacaaggtgatgtcaccttccgtactgccaaatttctcaagtttgttgaaagaatcgaagtccatgttccagacaagtatgtcaaaggacaagattgtatcgctctgcaatatgcagttgaatgatatggcaaaatggaagattgcttatgcgaatgccgagggtaccggagctaagaagacgaccttctcaattcgctcaacggcactgtatgtttgtgagccaaactacaattccgtgaagaagattacaaagagaatgaaaaaagtaatgaaggaaacgaaagaaagcgagagctcggcttccgataagaatgacgttattaagtaagacattacatgagataaaacggccgctttttagcggtcgtttgtcgtgaataagtggggaataaaattgattacgaaattacaggatttgtttattcttctccttaatccatggattccgattgtgggaagaataaaagacaaggtaaggtaccggctgattacgctgtgctttgtaattgaccttgttttgttttgtatcgtccgctacggacttcataaggaaaactatttttataatacggtttgtggtatttttgttatgtttgccattgccatattatcgcttgaccggacattggttcatattcactggagacgttctctttggattgcttggtttggtatgtgcatttcctttaccgtttcggatattctagtgccgaaaaaaatgtgtggactgggtctgattttagcttttgtctttaccgctgtattttttgtgtggcagaatcatacgagaaaagatttgttgtggcagtgcttcaagaatgccataaaatggtcgtttgccgttatgtcggtgatttcctttttgttccgtcctctgtatgagggaggcaggtatgccggcatttttacaaatccgaatacgtttggattgtatttgtatattattatcgctgtatttttgtcggatttggactggtgtgtggagaccggccggtcttgccggaaaaacattgtaacgtatgtttcgcttgccttatgctttttctatctggaaaaaagtcaggcgagaacttcactgattgcggttgcagcaattgtgctgctttggattgtactgcggttttatttggccaaaaagacaaaaaattaccggacctttttaggaaacttaggctgtatggcagtattcaccgtagtgctgtatcctctgtttttaatctgccttttgcatctgccaaacattgttggacatccgattgtgtttgaaggaaaacctttgtattatacaagtgaatttcaggggaataaagaaaaagcggatgagccggacgatgttgtggtgccacagtataaagatgtggaggagacacaaaacaagaaaaatacgattgcaccacgcaatatgtgggaacgcatttggtataacatcaagtattcaaagggcttgaatgccattacgaatggaagaattgatatttatcttgcctattgggataaaatgaattttaaaggacatgccagcacctcaatggtagtggatggggaaaagaaaaaccattcgcataacaactggattcagtttggttacacctatggacttctcagtatgtttttctatggtgtgattacgttattaggggtagcgttttctttgaaattttacctgacacagagaagaaaaaatgcaacatatgcttttttgataccggcaatctgtatcggatttgttattgctacactgacggaatgtttgtttctgccgtttgaagtatttccggcatttgcgtactggtttgcatttggtgatttatttgtgaaaaaagtaccaaaaaataaatttttacaggaattagaggacgaggcatgatataattttgacatgtaaacgtcttagtataaaaaaatgattgaaagataggagaaaaacatgaaggaaaataataaaatatggttgcgttatatcatatgttttgggctgattgccattctatgctacttgtttccatataccggagatgactgggcatggggaagtaaaatcggtatcgacagattaaacaactggtttgaaaattacaacggacgatatgtgggaaatcttatcgttttggcaatgacgcgctcaaatcttttaaaggcagttattatgtcattttgcttaacaggaattgtagcactttgcgagtatatatttaaaagaaaatgggttttttatgtaagttgtgttgcacttgttttgatacctaaattgatttttcgtcaggccgttgtatggacggcaggttatgcaaactacgtaacctcaatgtttttcacattgttatttatagcgtatgtttatcctatttttcaggagacaatgccacgaagaaaagtttggcattgtctgccgctctttgtgttagcggtaataaatgcattaattgtagagcatttgacaatttataatgtggttttggcttgtggtgtgcttgtgtatacaatttgtgttcatcgcaaggtggttgcttctcatgtggcgtatttaatcggaagtgtggcaggggcagcttatatgttttcaaattcggcatatcatacgatcgcaaataatcaggatcagtatcgtcaaatggcagagggaggagtaatcagtcgtgcatttgacaattatgtcaatgaaattgcaaagcatctttgcctgaataattgttggatgaatttagcaatcgttattgtatgtgccatgatttataaaaagatctattctgacgtaaataaaaacagaagtgtgttagtagcaaaaatttgtctggtagttatggcaggatttacgacatggtctttgttgtcgtcctttggcatcagtacatttgcaaaacagaaccggttattatattttgaagcggcttttgtggcagcttacatgattgccctcattatttattgtattcttattggcagtcaaaaaaaatgtttatggaaagttttgttttggaatgcgggaattgtttgtgttgccgcgccgttgcttgttgtaaatccgattggtgagagatgcttttttgccacgtatatactgtttttgatgctccttttggaactgcttatccttttagacggagaagagaaagaaagccggatttttacaaagacattttgtaagacatgcgcagttgtgtccattttcggattaggcttttatcttaatattttttcctcaatctatcaggtggataaagaacgattggctagaattgagagacaggtagaggcaggtaaaacgtccgtggaaattcggcacttgccatacgaatcttatttatggacagccactcctgaatgggagccatggattgagcgttacaaactgttttatggtttgcctgaggatttggaaataaaagcagtatgggaatacagtaagaaaaaataacaagattacggaggaatgttttatggaaagaaaaaaaatttcagttgtcgtgtccgtatataatgaggaattgtctttgaaccaattttataagacaacagtaagtgttttggacaagtgtgtttgggactatgaacttattttcgtaaatgatggcagccaagatggcagtattgaattgttaaaaggttttgcaaaggaaaatgccaaagttaaggtggtcgatttttcgcgtaattttggacatgaggcagcgatgattgccggtattgatcatgcacaaggggatggagttgtgtgcatggacgcagatttgcagcatccgccggcatgtattccggacataattgctaagtttgaggatggttatgaagtgatttcgatgattcgaacgaagaatgcagatgccggaattattaagcgaattacgtcaggtgccttttataaagttttgaatcttatgtcgccggttaaatttgaaaataattcttctgacttttttgctatcagcaaaaatgtagcaggcgttctgcgaaaggactatagagaaaaaatccgctatttgagaggatatgtgcagagtgttggattccgaaaaacaacattggagttcgaggcacagaagagagaggcaggggaaagtaagtacagcattcgaaaattgctgcatttttccattaatgcactgtgcagcttttcggatttgccattgaaactgggaatgtattcaggtgtatttgtggctctgtgtggttttatattgatgattttcactattataaacaaaattgtcaatggagcaccggcggggtattctacaatcattgtagttttatgttttatgtttgcggttgttcttatggtaattggaattataggagaatatatcgccgttttgtttgcggaaattaaggatcgaccgatatatattgtcagagatatttatcaggaagagaaagagactcatggaggagagaaagagtgaaagtttcggtaattgttgctgcttataatgcagagaaatatgtaacagagacgatggaaagtctcgccaatcaaagtatcgacgattatgaaattattgtagtcaatgatggttccaaagaccacacgattgacattttgagggattatgaaagccgttatgacaacataacagttgtggacaaagagaatggtggaccttcttcggcgagaaaccgcggactggatttggcaaaaggagagtatgtatacttctttgatgcagatgatgtcttagagttagacgccttagaggcactgtatgagcgtgcaaaagaaaaaagggcagatttagttattgctaagtatgatatttttaatcgttttcagacttttgcagtcaatggaatcaatgatttggtgcagatggaaaaaatagacaaatatgagccacagattctgtggacgttttcgctgtgtaataaattatttaaacgctcaattattgagcagtatgaactgcgtcttccaccgatttcctattcggaggatggggcatttttgatgcgttatgtataccgtacgaaccgaattaccggacttgaccgtgtgattttccattaccgcagaatgtttgatggtgaggcggagtcgattacggcttcgatttcttcttggaaaatcaaagactacattgaggcacaccggctgattttggagtcggcaaaagaaagtattttaattgatttcccacagtacaaagatattgaggaagtaaaagagaataatgacgatattcacaaatatttaaatgaaatcagccgaaaagaagtgcagattctgttggatcagttttatgcgaaatactggacactgccaaaggagacaattacgcatctggtttcagaaatgaatgataaaatttcaacattggatatgcgtgatatttcgatgttaaaagattctcacccggaatttgcacttgataatctggcggtagacaaagaggatttgctttctcatgcgtggtttaccattgccctttatggggagaaagaacaggaagaaaaatttttgttaagtattcagagtttgacactgcaaaatctgattgccattcggattataatgccgcttttctggaaagagacagtggaaaaagccggatttttacaggataatatggagttttttgatgtaaaaacaagagatgaactgtattatcaggcattggaacaggcacagacgccatacattacttttgcggatgccaaagtcagttatgcgaataatgcatttaagtatgtggttaagaactttatcaaatcaccggcagattttatgtcagaattgatatatcaccgcaattttggagatatgcaggcggtacttttcagcacggtggcattgaattccgtaaagacaggctatgaaaataacccatacatgggtatggattacacacttgccaataaattttttaagacggaatttttgaaaaatcaaaccctagataagtcaaaaagtctgctgtcacatctgacacagtggtaccatagaggatattttacgtttatgaatgaccgtattgtattctatgaggatttggaagcaacatatgtggattatgttggaacgaaggaaaccattccgatgatgaaggaatatttggtagatagaaaagcagatttgaacagcccggagattgttccggatttaaatgagattatgccgaagatgcttcgtttcccgtctgaaaacatcggtcagattttgttccgtaagatggtaaatttcctgcgacgctatccggtaaaagagcaggtgctgttttttacggtgcgaaaagacggtgaactagagggcaatgcaaaagcattatatccgtatgtcaaaggaaagaaagtgatttgtgccaagcgtctgccacataatccttttacgaaactttatatgtactataaaaatattacaagccgtgttattgtaacggatgactataaccgttatctgcgtcacttccagctgcgtcagagccagcgtgttgtacagttgtggcatgcctgcggtgcgtttaagaaattcggacagcggggaaccaacatgtcgattgctgcggatcatgcttatcatgtgcagtacaatatggtgacggtaagcagtgacagaataagaagtatttatgcggatgcctttgatatcgatgtgcacaaggtaaaggcgttgggatgtccgagaacggatgcattttatgatgaaaagctgatggatgagacaaagcagaaagtatatgccgcacatccggaattcaaagaccgctatgttattgtatatgcaccgacatttcgtgatataggggatgacagaacgcagtttaaaccggatttggattttgataaattatcaaaagacttactgccaaatcagatatttgtaatctgcccgcatccggtcatgaaaaataaaattgtagagaagtcttatgacaatatcgaagttatcagagatttctccacaaatgatatgatgttggtatcggatttgctggtaacggattattcttctgttatttttgaatatgcgcttttgcgaaagccaatagcattttactgttatgatttactcaattataatcggggcttttatctgaattatccggatgatttgccgggggatgtttatgagacgcagcaggcacttacagcgtatctaaagtcaccggaaaaagatacattgacagaaaaatatgaccagttcattgaaaaatatatgggagcgtgtgacggacacagcagtgagcggattgccgctatgattaatcagtatatggaggaagcgaaacatgaatgagacagaaattacatttttgagcagccgcggacgtgggctgagtaatgaccttgcgcttttgaaagattatcttgcgaaacaatccggagaggatgtaaagctccgctattatttgaataatgaaagacataaaaatccactggcagcacatggttaccgccgtgcgaaaaaggattttatggagggtatgacaaatgttgtctgtgtggatgcttctctatcaactaaaattaataacttagcaccggaaggcagtcggattttactgggtgttccgtatgattaccagtttaagaatatgtttttaatggagtcaaaaggaaaagaatttaatttaaatacctttgcaagatttacgcacatcattccgggctctccatttacggcagatttgttaaaacgggcgtaccgtttagaagataaagaaataatcgagggtgtttccctgccgtttgcctatgatataggggatgctaaaagaagagagaatgtctcggaactgatttattattactttccgcatgcaagagacaaaaagattctttctgttattgtatatggtgatgaagagatgaaaaggaaggattgggaaactattgatgtaaagcaatggatgaaagagcttggggaagaatggtttgtttttacaaacagtgaaattttgatggaaaatgcattttctatgggaaatcaatacaaaaaaagctttggctatgtaaaccggattctcccggttccggatttgttgtatgctacagacgttttggtgacaaataacggacgtttggcttctgcattttcaattttagaaaagcctttatatgtttgccactacaacaaaaattattttgaaaaatatgtaagtttaaaatatccggaaatgtattttgaaaatgccgggaggttgtgtgagacagcatatcaggtggatgtgtgcaatagagcacaggcggattttaacgcaagtatgtcatatggtattgagaaaaatgtatatgatcaaacgttgaaatgcttgttagattgaatgagaaagagaggaaaaagatgaatcgaattgcaaaatgggataatgcaaaatttgtgttaataatattggttgttatttgccatttttacgaaaattatttaggaagttctaaattggtaaattccttgttcttttccgtttatacgtttcacatgccggctttttttctgatttcaggtatgttttccaagaaaaccgtgaaggaaagaaaaattgtaaaagtagtaccatatctgctggtttatttgtttatgaaaatgtttggttattttgtatccggtattatgaatggaggaacatttatatcggttgatttcttcagggaaccgggtgccgcttggtttattcttgcgttatttttcatgtatttaattacgttttataccaaacaatttcgacctgcttatgttttgattgtatctgtttttgtttcaatggcagcaggttactccaatatggatacgaatcttttctgctggttgaggattgcaattttttatccatttttttatgctggatatgcattgtcaatggatactattacgaaatggacagaaaatagaaagttgaaaatagtttctgtggcagttatcctgatatattttttagtctgctatgtcggaattgataaattgttttgggcgagatttctgttgacgggaagaagttatgaggcacttacgcatggtgcattttatggtggtattttacggttgtttacttatgtgttatcctttggacttgtgttcgcttttttatgcatcattccaaaaggaaagaatattttttctcaattaggaacgagaactttgggtgtttatgtatttcattataatttcattaacctttttgtgcattcttgttggtataaggcattatatcataatttcccaaatacatgggaaattatacttgttttgcttggaattgtagtgaccttgatttgctgcttgaaaccatttgatgcatgctgccgtgcgattttgtccagtaaatggaaacttcgcctcgatgatgagttgaaatgacaaactatctgtgatatgataaaaacaacgaatttttttggaggttttagcagattatgatatttggagtattgttagcaggcggtgttggaagccgcatgggaaatgtagagaaaccgaaacagtatatgaatattggtgacaggccgattattattcacacaattgaaaagttctttgtgaatgataaatttgaaaaaatccttgttttgtgtccggaacagtggatttcacacaccaagaatcttataaaaaaatatttgggggagacagaccgtattgctgtgatggcaggtggcacaacgagaaatgagacgattatgaatgccatttcttatattgaagaaaactatgaagtggatgatgatacgattattttgactcatgattccgtccgtccgtttgtgacacatagaattattgaggaaaatattcgttatgcactggagtatggtgcctgcgatacggcggtagctgcgactgatacgattgtacagagtgaagatggcaaggtgatttcatctgtgccggaccgcagtaagatgtatcagggacagacaccgcagacattccgcttaaagaaactaaaatcgttgtatgaatctttgaccgatgaggaaaagaaaattcttacggatgcagcgaagatttttgttatgaagggcgaagacgtatatctcgtagaaggagaagtatcaaacattaagataacttatccttatgatttgcgtgtggcagaaacattgattcagtcgaagcaggaggattaagagcgaatgcttaatacagtataccagttggtggctcctcgtaaattcgaggtcacttatgaaaacatcggattgcaggatgatgacattatcgttcgtccgacacatctttcgatttgtaatgcagaccagagatattatcaggggcttagggaagaacatatacttcgtcagaaactgccgatggcattgattcatgaagggattggtgttgtacttcgtgacccaagtggcgagtttgagccgggggaagaggttgtgatgataccgaatacaccggtagaagaagatgagtttattgcggagaactaccttcgctcaagtaaattccgtgccagcggatttaatggatttatgcaggaatatgttaaaatccgcaaggacagattagttcgtctgccacagggaatcaacaaagaagtagcggcatttacggaaattgtcagtgtcagtgttcatgcgatttcacgctttgaccgttttgcacatggtagaagaaatgtggtaggtatctggggcgatggtaatttaggttatattacggctgtatttttcaaaacaatgttcccggatacaaaactgtatatttttggtgtcagcaaagacaagctttctgattttacatttgctgacgcaacgtatcaggtaagtgacattccggagaatatggaattagatcatgcttttgagtgtgtgggtggagccggttccggaaaggcaatcgaccagattattgattttattaagcctgagggaacgatctctatattaggagtatcggagtatccggtaccgattaatacccgcatgattttggaaaaaggattgagagtattcggaagcagccgaagcggaagagtggattttgaaaagacggttgaattatatagagagcatccggaaattatcaattacctgtctaatattgtaggtgcggtaattccggttcgttcgatagctgatatgaaaaaagcatttgagatggacattcagaagtcctttggaaagacgattatgctttgggagaaatgaggtatcttatgatagcagtgattgtaccaatttataatacagaaaaatatttacgggaaacaatagacagtgtcatttgccagacactgtcttttgcagagcatatccggctgattttgttagatgatgccagtacagatggctcatttgccatttgtgagcagtatcagaagcagtatccaaagcagattgtagtaaagcactatgacacaaaccagggtgtttctgcacttcgcaatgaaggcgtacggattgccggagagatgggtgacgaacttattacctttttagattcagatgacaagttagcagatgatgcagtggaaaaagcgaaaatgtattttgaatcacatgaggatatttcggttgcggctattgctgtaaaatattttggcacaagagacggagagcagcgtttaaattggcgctttcaggaaatggatgttgtggacattaaaaaacaatatacgtttccacattattatgtaggtggcgttttcttgagaaaacgtgttttaaatgaacttcattttgatgagaccatgaatttttgggaggatgcgctggcgattaatcaggtgattgtgtcagaaggaaaatacggactgattcaggatacattttatttttatagaaagagagaggatgagtcctctttagtggatacggcatggcataaaaaagagcgttatacaacgctgttatcgtccggttatggacagttatttgcctactcaaggaaaaagcaccatcgtattattccttatgtgcagtacatggtagcgtatcatatgcggcttatgatgatgaaaagtaagcagagcattatcgaagaaattttatcggaagaagagttggcggcactcagagatgatgtgcagaaggtattaaaaaagataaaagtgaaatacattttacagattccaacgtcacttccgattattgagggaatgctctcaatgcgtgccgggaaacaggtgcgtgccaaacgtgtctacaaggacaatgactgtgtacttatgtataagggcgttgaattagccagaatgtccgagcgctctgttaaattattccatatcatagaagatgaggaatcggagtttaacggtatgtggagagggcgtttttgcacaccgatttacgctatgaaaaaagaagattatatctttgccgagcataacggggtacggattgattccaaagaatttatctgccgtaaacagatttttattcttgggaaacgtctgcgatgctactatcatgcagggtttgccattgcgattccgaaagaatgggatcgtgctgtgtttggaatccatattgcagaagcagatgcggatattttgatgaatgagattgtatttaatgaggtaaggctgatttattttgaaggggaaacagaagaacatgatgaattcgaaatcgacagagatgatgaaaaagacatgtaaagatcatttttttaaagcagggcaatggttttggtttgtgtttgtgtacggcattgctttgattgcctttagcagtttggtacaaaaatctttttttgcgatgcttttactgccgattgttgtttatggaatatatcatttttttatgagagaacgaattgcccttaaagagataaattatcagattgttttttatgtcgtaagcattgtttttgctgtgtttatgtttcttgttgcttattccgtgcgtgtgcagattttttcatgggattggggaaaagtaattcgttctgcaagtgagtatacattaacagataagttgacagatactacgtactttgcaagatatccgaataatcagttttggtattgtattttgacattctttttcagaatggttcattttatatggccggagacgggaataaatgaattttatttagcgtctatagcacttggatgtgttatgacagtggcatctatcgtgttgcttcatcacatagcagtgcttatttggaatgaaaagaaggcgttttttgttggcttaatgacatggttttgtatgccgttgtggttatgggctatgtatgcttatacggatatagcaggaatgcttttgctggtagttatgctgtattgctacacgaaggctgttttgagtgaacccggctggaaagttttttgctggttgtgcttatttggagtggctgcatctgctgcattttcagttaaagttactgtgtttattctctttattgcagttttcgcctgcttgttacttcaaaaaaaatcatggaaaaagattattgccggtattgtcattgtagcaatttcgtttggagtcggtcatgaattgtgtaattatttaaagtcttctgtaattccgttagaagaatcgtattgcgatgcctatgaatttccgctgacccattggattatgatggctcttggatatgggggatatcagcaggaggatgtcgattttaccatttcatttaattcttatgaaaagaaaaaagaagccaatataaaagagatcaagaaacgattgaaggcacgttctttccatgaaagttttaaattttttggttatgataaacaagttagaacatggggagatgctacacttgccagctgcgtatatttagctgaagggccacaggagcctgacaatatattaaaacaatttgtgacattaaaaggaagcaaatactggatagctcttttgtatatgacgctatattatggcttaatacttgttgggatgtttttatcggcacgatttgcagtaaaaagaaaatctgatgcaaaagcggtggatatgccgatttttgcttcaagtattacgatgcttggaatagcattgtttcagactatttgggaatgtaattcaagatatttagtcgtatttattcctattatgattttgttagctgctgatggtttctttgcatggagagattatcttagagaggagaggataaagtgaaacactatcatttttcaaaatccgacacatcaattgcaaaattaattgctataactttgatgcttttgcatcatttatttggatttacggatcggattttgcctgagaatatgtaccagagtttatatatgtttcgcgggcagcctatagaagcagcaatctgtgcttcttttaaggtgtgtgttgcgttctttttgttccttagtggatatggaacatatctgagcctgcgtaaaagtaaatcaatttcgaaaatgattgcaaatcgtatatttcggtttttaaaatacatatggcaggttatgattatttttgttccaattgattttatattaggtgtgacaaaggtaaatcttacatcctcatggaccattcaatatgattttgaaagcattattcttagcatgcttggatttgaaaagtataatggtgagtggtggtttgttatgccatacatatttttgcttataatgacgccgcttatgtttcggtttttacagagaaaaaaagctgatttctttacggattttctcgttgttttggggattgctttgttttctttgtatggtatccctaagttgatgagttatgatatgttgattgattttaaagggacagtatggggaattctgctttgcaacgttgtttacctacttccaatttatctatttggtatgatttttgcaaagtaccaggtattctcgtattatcatcagatattaccgaaaggaatattaagttaccctgtattattatttgttgcagctgcaggtttttacatgcgttataaacttggatcttcttatgattttttcttggttggacctatgatttatgcgtgtgttatgcttattaagaaaattccgggagttatctgggtgtcaaaaaaggcaggaagatatattacctttgtttggttgattcatagtttctacgtgtttcaatttggacagaaatttatatattccttcggaaatccgatattaatttttatcgtgctggcagtggtttcttttgcttcagcagctgctgtttactggctttttaccggattatccaaaggagtcaagaaaattagatgctttcataatcggacagtgtaagtctgttttccaaaattatatcaatggcctcacgtacaggagcgtcgccggacttttgagtcagaacaaaatcaacatatggatgcaatgcggcagcgcagtcagccggtgcaaaggtaatgccggctgtttgcattgcagacagatcattcatatcatcaccaatatacaccgtttgttcaggagtgcagtcatatttcgccattacagttttcaagatatcagctttatcgcgaacaccctgataaagcacggtaatccctatttcttcgcatcgtctagtgacaatttttgaacggcggccggtgatgataataggaataatacccttttttattaagagtttaatacctaatccatcttttgcgttaaatgctttcattacctcaccgtcattaccaatataaatttttccatcggttaatgttccgtcgacgtccattgcaaacaatttaatttttgaaaaatcttttttcatgtgagtacctccggtattagtaattattcatccattaccgtttcaaagtaagatggtgtaatgaatgagatagggcagcttgattttcttgtatttttataatcaacaagcatgctttttatatctttatttgcttcttcagcatttaatgtatttctggttttttccatggctttttcaacgtaattcggattttcactattatggctgtaaccatcaaaacctgcgatggaaatgctattcacattcatcaggtctaacagacggagaagaagcacaccagaattatcaagctgctcccaaccgcattttaccaatcgcagaaaatcgataataaagagattatcatcttttcttgtcgttacatttgatgtcacaatttttttgcatttattaaaagctgcttcattacgccaatactggtaccggtttttgttgctgaaatatgcaaaatcaatcggataacaatcggtgagaagattaacgctaattacaataggattcttctctttataaaaatgctgaatttgtccctggcaggttttaatcgtatgaccgggaagaagaaccaaaatatcttttccactgagtgcattttgaagtgatgcaatggcagaatcatcctcacagtgtgtattttgataatccaaataggtcttttcgagtagcgagtagtcgtaccgttttcgctccaccgggtccaaacggtttagcaaaaagttaatgtcgcggcttgcaattcctgcctttgctgaaaggtaggagatgttatttacatgcgcactgtgcgaaccagcaagaaaatacgggatggagtagccccattcataactgttatggaaaccgtcgatataattgtctataagatctaaaacaatatcaatatcataaccactattaaacttacggttcatatactgcatgacaagctctgtatttgtatttcctgcgccacgtcccatgcctgccattgtgctgtctacaacaatatcgcggagtccctggctcatatcgataaaatcctgagatagagcaaaggacatctgcaggttattatgtgagtggaatccaattttagtatttgcccacaaattatgatgaaccagataaaatacgcgctgtaaatcttcacgatacagagaaccgaaggtatcgacgatggaaaaggcatatggttccaattcatttattttttcaatcaagtctaaaagttcagcatctgtatatcctaatatgtcaacaggctggacataaagtttgtatcctttattgacgattgctttacaaaaatcaataacttcaaaacgttcgcttttaaaaaagcaggcacgtacaccatcaattgaagtgccgtcataaggctctaagttatcaatatggtatcggctgtaatcggcaaggcagacataagatgaatgccttttgtctgtaggtaaaaatgagcggagctgtgcagcattattaaagatggttgtgccctcccgatgtggttcgtctttcagaaatccgcattcaataacatctatgccgctttctgttaaaccttcaataattccttttattgcggtattgccaaattgactgtcaatcaggtatgcaccatcgcgcagtgtacaatctaatatatttactcgtttcataaaaacctccctgttaaatttgattctaccattctgatggaagaagccaattctcatatggtatcatatgtccaaatgcgacaatggcccctttcgctgttggatagtagcggtctaccatactatttttaattgcaagaagttccggggcaatctgttctcccggaattttattgcttgaattgtaatagcgtccaaaataatatagggtagcagatttattggtcatcttattataacattgtgttaccatttgggaaatcgttttgtgtaaatactttccatattcaccaaaaggattatgagtggcaatcaaatcccattttttgtaggataagataagattaatatcttcctgcatagcatttttacatgtggaaagcatatcggtttcatactttccgttactaaatgtttttcggacgtccgggtaatccaaaatcaggtatttgtcatttgttgtacgcattgtttgctcaaaggctgttcttcgttttggattccagccatgcgtcatgcagacaacgagatattcaccttctataagatgtccgccgccccaaagtgtctcatcatccggatgtgcggtaatcatcactttttttatggcagttaagtcaaggttatctaacatttgtttcgtaatgtagccttttgtacgagtgattttaagattccagctgcatgtaagagctggatttgtcttatatactgcagtaatagtaacagtttcaattggacgaagggcagttactgtaccattttcatcaacggttgcagcggttttgttgctggatgtccatttgattcgatgatccgttgcgttggccggacctgtgactaactgcattttatgtgatgttccggattctaacgaaacaggattgttctttgcaaattctattgaggtatatggtatatcctcaatagtaatatgatgttttgccttttttttgctttctttctcgcgaactgttatagtaacctttcctgcatggtgggatgtgacaacaccatcctcattgactgtggcaatacttggattgcttgacgaaaaaacaagggtatcatccgttgtgttttttggagaaagagtagttgtcagtgctatttgttcaccaacaagtgcggtattttttccggaaagtgtgattttttttatcttgatgcgtttttttacttttaatttaaatgaagtgtgcttttctgttccttttaccgaagcggttatggttgtagaacctttttttttggcttttacaatgcctttttttgaaacagacgcaacttttttatttgaggaggtgaaaattactttcttaaaacgcgcattatggggttttaccaatgttttcaattccagtctatcaccggttgccatggcttcttttggtttgtttgttattttgattgatttggtacgaaaataggaaacgacacgtacagaagctgtaatatcgtttggtttaccgggaattttgagagaaattgtaacggtcccctttttctttccggtgacggttccatgtttgtttacggaagcaatgctggaatcactgcttttccatatccaagcggctttgttttgcgttgatagtgttgaatctttcacttgcattgtagtttttttcccgatttgtacggatttatcaggcatattctgagctgcctgtactttgatataagtactgctgcatgttaaaaaaaatgcagcacccaagaaaaataaggctttttttgttatagtcataataatagcatctccttttgttaaaaattctttggtttataaaataaaaaagatatgtgaagaaaatatgtcaaatggacacattgttttttcttattatgttttcaaccaaggcaacgtgttccggtaagtccacgccaatggaggtataggttgtttcttttaaacgcatgtgataccctttttgcaaggcgcgcagtggttcaataccttcacctttttccaattctgtctgctccatatttgcaaatttcaacaaaaaatcttttttataagcatagattccgacatggcgaaaaactcgtgctaactgaccgtcttttatattggacggaataacagagcgggagaaatacattgcatctcccgtgtcgtttgttactacctttactgtgcttgtggcacggatttcatcaggatctgtgatttccttttttaaactgccaaaataaaccgattcatcttccgtaaaaatggaaatcacttctcggatcatttccgggttaatgacaggttcatcgccctgaatgttgatatacaaatcaccatccgtgtgttcggcaacctctgctacgcggtcggagcctgtctgatgggtatcttttgtcatttttacattcatgttgtatttttcgcacgcggcacggattctttcatcatctgtggcaacgtaaatttcgttaagttccttgactttcatagcctgatgatagacccagtatatcattggttttccgcagatttcaaccaatggttttcccggaaaacggctggatttataacgtgccggaataacaccgattatcttcattttgattcctccatttttttactcaaaacatcttcaagttttacgcgtggaaagatttcaagatttccaccgcgagttgcattatagatatgaatattatgtttctttgcatacgaatcaagaagtgcatatacttccatggagcggtctatgatgtgctccccaatttgtttggttgttaaagtatttgcatgcattcttgtcttgattcggttaatatcggtttctgcaacttcttttgttgtgtaattatctgtaaaatgtccacctttatcatgagggtttgtacaatccacgccgagcagataaatttctttaaagcccatatgaaacgccatttcggcagctagagaaagtacggttgccttaatcatgcagtatgcctgaatgtttccgcggactttgtagcgttcggttggaatggtatggacgtaagtggtatcgaccggttttttgcgcatgcggcgataggtgcgctctgttgtaaacagaggagcctttaccattttggaaagttcgatgccaagcttggatgcgtaaattgtgtcagatacacagtgaaatgacggacgccagtcggttttgtcaaaaattttgtataccatgtttgtaccgaaggtgtattcatctttcaataaatgtaaatcttcaccggtcagactgggaccgtttccaatgagaaaacaccgttctcctttgtgactgtccttcaaacgctcgaggcgtaaactattattgttatggaacattccgtgagagcggaaaaatccgagaacattataacgcagtaacagccataaaatgcgcattcggttgagcgtttttttagtatagcgtacaaaacgttcgtagagggttctcttatgaggcagtgccctaagacacatatcaatcactcgtttgccggaattcccatcttcatatggattaaatttttggttaaattccaattgcttgtctcgataaggaaattcgcattcctgacggtggatggcatcaaccagttcctgttccgtttttgtgattggtcccggtaattcttccggcgacaggtaaagaccacgcacatcttgttcgtaggaatctgcgtcgtacatatgaaaaaccatcggacgcattaaatttgcatagtcaaacatggtggaagagtagtccgtaatcattaaatcactgactaaatacaaatcattgaccgactctacgtcacttacgtcatatatgacagggttatcttttatttttgccgctccaatttggtgatgggcgcgaaataaaagaatataatcgctgccgagcatgttcatcagtacattgacatcaaaaccatccggcaaggaaaatgccccattttcatccagtgatgagtcacgccaggttggtgtatagagaagaacctttttcccttccggaatatgtaatgcttcctttttcttttggatttcttcacttgtataatgaaaaagtttgtcattgcgaggatatccacttgcgacaaattttacagaagaatctccgattgcaaaagcagaagctattttttcactataataaggagacggagatggaaaaaaggttacttttttcccttttgcccggtatcgtctgtgcatatgagaacgtgtctgacgaggatcggaatctgtttcgatatcacagccgagtctctttaacggtgtaccatgccaagtctcgatatagatttgggtttttcgtggttttagataatcagcaactgtgatattgttaatccagtaacgagcactggcataatatctgcggtaggcagaagttcccttcttcaccagtatggtatgatggttttccagtaaatcaaaatgcgctgcagggtcagtgaatgcccacacaaaataaaacgagcggaatttttcatccttttgcagctcgtcatatatggcacgcacgctgtcagtggctttttttccgccataggattcaaagacaatatagttgtcagagactgtcgagtgcagttttgtaataccgtattttatccgatttttatagtaggacaaattttgtcttagcatgtaacgagactgcttgttcatggttgtatgttcctttccccaagtgttaatagatacctcatatactataacgatttataggtaaaaagtcaaatgttttgcaaatatatgaaaactgtggtataatgcccataataatgtgataatataggaggacaagtatgtcaaagggtaaaataatttatatggttgtaccttgttataatgaagaagaggtgcttgatgagacgacaaaacagttaagtgataaattgcaaaaattgatagatgcaggtgagattagtgaaaaaagccggattctttatgtgaatgatggttcaaaagatcagacatggccgattatctgccgtctgcatgaagaatatacacttgtcagtggattgaatctttccagaaaccgcggacatcagaatgctgtgcttgccggccttatgtatgcgaaggatcattgtgatgcagcgatttcaatggatgctgacttacaggatgatattcatgctattgatgagatggtagataaatttaatcatggaatcgatgttgtttacggtgtgcgcagcagccgaaaaaaagacacgttttttaagaaatttacggcagaaggattttataaaattatgaaatggatgggggttgacattgtctttaatcatgcagatttccgcttgatgagtaagcgtgttttaatgcagatggaaaattacaaggaagtcaatctctttttacgcggaattgtaccgttaatcggatatccggcagacaacgtatactatgaaagacaggagcgctttgcaggagagagcaaatatccgctgaagaaaatgttgtcgtttgcatttgacggcatcacttcatttagtgtcaaaccaatccgctttatattaagccttggtcttgtcatcttcttggcaagccttggaatcctgatctattcgattgtgcgccatgcaatgggtgcaacggtacttggctggagcagtcttatggtttctatctgggcgcttggcggtttgcagcttcttgcgataggtattgtcggtgaatatattggaaagatgtatctagagacgaaaggccgtccgagatttgctatacaggatattctaaatgatgtagaccgggccgagtaagagttcagagattttgttttgacggggaaaggaatgcaaagagaaagtgatagtggaaaaaatacaaaattttttgtgtgtggcagcgaaaaagatatttctttgcttacacatttttattgtggttatgattttgcttgagttcggaagacttgcaggtgatgtgtttccgttacattatcaattgttgaatgctttgctggcattgattgggttgacagcaatttccctccttttttttatatgctgcacgagaaaaatagcaagttgtgtttgcaaaaaaaacagagttgttatgttttgcatattttatgcggtaattatatttgtgatgcagatgtatctgtgtaaatgtatctatttttatacgacgtgggatgtcggtatactgcagtcggcagcagatgttgtgacacatggtggaacaattcaggattggatcagccaaagaggagattcgttttctcagaattattttaatgcttatccgaataatatttttttgacgattatttttgccggaataaaatatctgtcatctttatttggatgtgtagataattattttcctacgattgttgcaggggtgatttccacagatgctgccattgtgtttactgtgatgactgtttggaaattaacgcatagtcgaaaagtgactttcctgtctataatcatttgcacagtttttttaggattcaacccatggattataatcccttattcagatacatacgtacttccttttttgagtgcggttttgtatttttattgctccatgaaagatgagaaaaagggttatgcatcatggataggaattgtgatagcggcttcgctggggataaaaatcaagccgacggtggtgattgctttgcttgcaattgttctggcagaaatattttttttgcgaaagtgccaaattaaggaaattgctgcaaaatgtttaattgttgcaggaggaaccataattgttttgggtctgataaatagtttgagtgatgctgtgtatgaccagcggaatgcagatgcacaaatgacatggcagcattatctgatgatgggggcaaatgaggaaacacatggctcttattttggcgttgacagggagcgttcatggggaatatccgatccggagaagagaaaggaaatgcaaattgaggtgtggagacaacgtataagtgagaaaggcatttggggcacaataaagttttatatgcagaaattgataattgcaaatgatgatggctcatttgcatggggctgggaaggaaatttctttggtgaatatcgtggactgcacagtgaatttgcacaaaaattacaatctttttattatgcacaggataataagatgatttataatattttgcagagtatatgggtttctatacagattttggtttgtttctttgcaatattttttgataataggaataaaagagcacttttcattgcgatgacattgactgggattaatttgttccttatgatatttgaagtgcgtgccagatatttgtttatgtttgttccgttttatattacagcggctatgcttggccttttctatatgcaggaaaaagtcaagatgataaaagatagaaaatgtcatttgcaatagatagaagagaaggattaataaatcagtgagaaactttattcgcaaagcgaatcctttgtttcgagttgatttactaatccttctttttttatttcttgaacacccattctctttgaatctggaaactgattgcaaaaagcagggtatcgataatgcatttgcgaagtgtcgaataagtaataaatgtcagcagatgattgactaaaacagcagacaacaaaagctgaacaattgccaatgtgtaatatcttacgaaaagaaatggcgagcttgagtcatttttaaacacctgatttttgttcacaaaaaagttaaatagcgaactggcaaaacgtgaaatcacagtccgcattaatataagcacggacaaatcgaaaaacggaagcatccacttgtcggagatgatcggacgaagcagatagccaagcagccagtacaaagcaatgtcgataataaaactggataaagagcttagcataaacttcaaaaacactttgtaaatccgaatcgaatcaatgaacggattaaaatgcgagctttcattatttgccagataaattgtctgaatcggaaattcttcaattggaatctggtattccttcgcagcaatcagcatattcatttcatattcgaaccgttctccttttacatttgcaaaatgctctcttatgagaggggttggaagtcctctgagtccggtctgcgtgtcagaaacatgtatgccgcataaaagccggatcatctgccgagtcaacttgtttccaaaacggcttctcagaggaatttctttgtcgtcaaactgacggcagccaagaatcaaagaatccggatgctcataggttagttttgcacaagtgttaatgtccggaagtacatgctgaccgtcacagtccacggttacagcacctttgatatccgggcgctgctctaaaatatagttaaacgcagactttagtgcaattccttttccaaaatttacgacgtggcggattattttgcagtggcaagtctctttgcatgttttaaaatactttcgattggcaataagacttccatcatcgaccaaaatgatattggaaaagccatcgtcgtgcaattgtccaacgagtgataccatgcgctcatccgggtccagtgccggaatgatgatggcaatactttctttataattacccaaaacatttccccctgtaattctgaaatcgaaataatactgtaagtataagcctatatcgtttcagaatcaagcattcgtgattgacattctttttttacattagctttttgctgcgtttgccgcatttcgtttggcacggtaacgctccgttccatcgagaatttttttgcggatacgaagattttccggtgtaacttcgagtaattcgtcagtgtcaatgtaatccagtgcctgctctaaacttaattctttcggcggtgtaagacgcagtgcttcatccgcaccggaagaacgggtattcgtcaggtttttctttttacatacattgacctcaatgtcatcgctttttgcgtgttcgccgacaatcatgccgccgtaaaccttttcaccgggaccaacaaacaaagtgcctcgctcctgtgcattaaaaagaccgtaggtaattgtttcgccggattcaaaagcaatgagagagccttgtttacgataagggatttctcctttaaatggaccatagccttcaaattctgtattgataacaccgtttcctttggtgtctgtcataaattcgccgcggtatccaatcagtccacgggctggaatgataaattccagacgtgtcgtgcctgcatttaatggggtcattgcctgtaattcccctttacgctggctgaggcggtcaatgacatttccggtaaattcatccggcacatcgacataagcacgttccatcggttctaattttttgccattttcatcttctttataaagaacctccgctttgctaaccgcaaattcatatccctcacggcgcatattttcaattaaaacggataaatgcagttccccgcggccggacactttataagcttcggttgtgtcggtatcttccacacggagggatacgtcggtatttaacatgcggtataaacggtcacgcaaatggcggcttgtcacatattttccttcctgaccggcaagcggactgtcatttaccataaaatgcatggcaatcgtcggctccgaaattttctggaacggaattgcctgtggattttccggactacacagagtatctccaatgtgaatgtctgcaatacctgaaatggctacaattgagccaatcgttgcttcttcgacttccacacggttgagtccttcaaattcatacaatttggaaattttaactttttcatttttatccgggtcatgatggttgacaataacggcatcctgattgacgcggatggttccgttatcgacttttccgatgccgattcggccaacgtattcattgtaatcaatggtgctgattaagacctgtgtgtcggcgtccgggtcgccttccggtgccggaatataatttaaaatcgcatcaaagagcggcttcatgtcggtgcctttctcattgacatcgcaggatgctacaccttcttttgccgaggcaaagataaatgggcagtctaactgggattcatcggcatccaaatcgataaacagctctaaaatttcatcgacaacttcttccggacgagcttccggacggtcgattttgttgacacagacaacaaccggcaaagacagctccagtgctttctttaacacaaattttgtctgaggcattgcaccctcaaaagcgtcaacgactaagatgacaccatttaccattttaagaacgcgttctacttcaccaccgaaatcggcatgtcccggtgtgtcgatgatattaattttcacaccttcataggtaatggctgtattttttgataaaatagtaatgcctcgttcacgctcaatatcatttgagtccatgacacgttcggcaacttcctgattggcgcggaatacaccgctttgtttcaataattcatccactaaggttgtcttgccatgatcgacgtgtgcgatgatggcgatgtttctgatatcgtctcttgttgttttcatagaaacctccattcattcatgcaaaaaccacaaaatcgtattatagcacgattttttttgtgtggcaagttcgggcgtaaaacgcttaacaaaatgctaggtttttttgtttttttatggtaaaatagaattaatataaaaaaggaggtgctcttgtggggctgaaaaggaagaagcggttactgggaattttgattttttctcttgttattggcatgatgggaagtgccggtggagaagctgaggctaagaaaaagattattctaaataagaaaaaagccgtgatttatgttggcggtcaacttcgcctaaaagtaaagggaacaaagaaaaaggtgaagtggtcttcaaaggagaaaaagattgcgacagtttcaaaaaaaggagttgttaagggaaaacgtgccggtaagacaaagattacggcaaaagtaaaaggaaagaaacttgtctgcagactgactgtgaaggcgaagaaaaaggcagatattaagccgggggttacaaaaaaaccggatttggaggacaaaaagacgccacaggggacgcctgctccgagcgcggcaggagaatcgacagctaatccggcaaaagtgacacagacgccgacggcggaaccgacggtaactccgactgcggttccgaccgcgacaccggttgatacttcaaaaccggaaccggtattttcgaaagagagcggtagctatgaggattcgtttgaattggcattatatgcgccaaagggaagcaggatttattatacaacggatggcagcgaaccatcggttgatacggttggaagtaaggagaataccagcaaagtgccggcaaaacttccgacgaatgaatataaagaaaagattaccgtgaaaaaccgcgacagtgaggcgaacagactgtgttcgcgtgttaacattccttatatgtatgacccaatggattattataacgggccattttatccggaagtcagtgcagttccgaaagcaaccgtcattcgcgcaatggcagtggatgaaaaggggaatacgagtaagacggtgacaaaaacttattttgtagataaggatttggcagaggtttataagaatgcttccgtgatttctgttgtcacggatccggacaatcttcttagtgaagaaaaaggaatctaccgctatggcaactgggaaaacagtggtgctgaatgggagagaccggcggcagtgacgtattttgaagaagatggcacgataccatttgagacgacgatggggatgcggattcatggcaattatacgcgccgctgggggcagaagagtttgcgtttttattttcgtgaagaattaggactgaaaaatctcaaaggctatcagttgattccgggagctgtcaatgcggacggaaagccgacgaaaaagtataaacgttttatcttgagaaatggcggtaacgaatatgcctacagtaaaatgcaggatgtctttatccagagtcttgtgagtgaccgtgcatttacgacgcagagttcacgcccatgcgttttattcttaaacggtgagtactggggactttataatctgatggaacgctattccgataattatttggaggaagagtttggggttgataaagataatgtggttgtgataaaaaatgatgaacttgatgagggaaaagaagaagattacgctctctatgaacaactgcaggcaatggcagaccttgacatgtctttgaccgataattatgagaaatttaaaaaaatggtggatatacagagttatcttgactattatgcgactgagatttatattggtaacaaggattggccggataataatgtgcagttatggcggaccagagaggatgacggcagtgattatggcgatacgaagtggcgttatatgctctacgatactgaatactcgatgaatttgtggggacaggataataacggaaatacaaatcgtttgcaggaagcaagaaataaggatgcattatttgacgcactctgtaaaaatgactcctttaaacagtcacttgccgatacgctgatggatttggcagataaaaactttaagtcagccgatgctgcaaaaaaattagatgccatggcagcagtctaccgcccattgatggcgcagtacaaaaagcgctttggtaatggtgatgtggacagccgggtagaggatatgaagagttttatggcaaatcgtaaaagccagataaaaaagcatattcaggaatctttttcaattacagtaaaataataaaaggaatggagaataaagatggaaccggaaattacagatatttttgaccgcattatgaattggaagttacttcgatttatgtggcctttttataaaaaaaataaggacaaacttttatatttattttttggaggatgtacaacacttgttaatctcgtaattacatatggtttgtggtatggtttgaagtgggaacagtggtatgccgggaaatttgcactgggtacgttccttggaaatttaattggcattgtgtcggctattttgtttgcttatgtgacaaataaaaagtttgtatttgcgtcgaaaacaacaggaatgaaagaacttttggttgaatttattaagtttgttggcggtcgtgtgtccactttgattattgaactgggtggtgttcaacttgctgtaatattgttccctgattctaatacacttttgtttgtggcgaaacttttgactcaggttttagttattataattaattattttatcagcaaattatttgtgtttaagggaacaaaagaggcatcttttgacaatcaagactaaattttgatttgaatttgtccgatatacagattacggatgcgaatgtttattttagaatcagattttagatagatgatatagaaaggtatggttatggatatgagagaacaaattaagaaaaaattcaaaaaaagaagatatgcggtacttctttcgcttatggcaggagtgttgctgtttctcctgcgtgggcagttttctcatgcagccgaccagatttttattaagtttaatgaggcaaaattagacccggcagttacttatgatatgacgacaagcactatgcagttgatgcttggtactcctgatggggatcatgtctacgatgatgagcgttataaggtggagtggacgattgaggataccgcggcgcgtgacgtcattgcttccattagtccgggtacttcgaaaaacattggtattgtaaaagcactttcgcccggtgatgtaacggtgacattaacggtaaaggacagtatggacggagatgctgtgttaggtagtacgacttgtaatatccgtgtcgtattctcgattgatacatcgaccgatgactccatttataaatttgttcacgaaaatgatacggcaagatctcttgtgatgtattcgaacagtgcaccggttaatcttggtttgaactttggttctgccaactcttcgaatactcagtggtcaagtgcgaatgatgaggttgcaaccgtgacacagagaggtggacttgtctcaccggttggtgccggtaagacacaggtgattgcgacgtatacaccgaccggtgctacggagacgtatacggcatatctagatgtttatgttatccctcgtgtttcgacaaccaatggggcaaattatggaacggcgattgacgcccagttaaattccggtgaatatttatacacggatacgaactttgcaaacaatctggaagtaatccgaagtaaaattatatgggttgttaaaaaggatgatgatcagggaaattcaaaaattattgcagattcccttggaaaagattcggatttgatttcgattacgccgacggcgagtcgaagcaatgaactgcggattgaaggaaaagcgggtgagtatgacctgtatttctatacttatggcagttatgatgaaaacgtggataatggaacaacagcatatacaccgaccgttgtgcatctgacaattaagagtgatattcaggacaaaacggagattttaagtattggtgatggatatcattttgcggaaagttataatatgacgctggaagattttaatgagtgtttcagtgtggatattaagatggcgcagggagcaccggattattccgaatatgcggactttgataatacaaaggcagaattaacggcaaaaaatgtcggtaacctagtggcaacgctgaccgtgagaagcggcagggaagcctatgttcgcagaattttaggacttgccgagaatgaggcgctgccggcggctttcacaacaaagattgatattacggataacattcggttaaatcggacgtcaatgacgattgtggttgggcagaaagagcagttaagtgttaaattaaatagtatttattccggttccattacatgggagagcagtgacccgaactatgtatcggtagacagactgaccggtttgattgaaggtaagaaagtgacaacgcaggatgttgtgattacagtaactttggatgccggaaatggtttgtataagactgcaacctgtacggtaaaagtagaggctacggtatccggctttaccttgaatccgggaacggatcagcagatgttagttggcgatcatcttacagtagttgcaaacatcaaacagaccgttacccttgcaccgcttcgctggattagtagcaatacttcggtctttacggtagaacaggcatcggacggcaagagtgcaattcttactgcagttggtggtggacgtgcgacgttgactgtttacagtactgtgaataacgagtacaaatcgtttgaggtgacggtgcgtattccaattaatgaaatttcatttagtgccgcacagatgcagttagagctttacaagagcggttataatatgaaagacgaagtgaagtggggtccaaccaatgcgaccgatacagcgcttacatgggctagttccgatacttccgttgttgagttagacaaagatggttatatgaaattcaagggagccggtacagcgcttgttagtgtgtatccgacctacaatccatacaatgtaatggcatcctgtctggtaacgattatcggtacgccggatagtatgacgataagtcagatggatgtgacgatgaatgtaggtgaggcggttccgttattagtagattttaatccgaaaaatacggcaaccggtattacgtggacgccaaatgatgatggtatcgtgacggtaacttatgatgaagaacgccgcattgctacattgaccggtaaagcaccgggaactacgaatattaatgtggtgacaaccgaaggtttgatatcgaatgtaaaagtttctgtgaaacagccgtcaacggcgttgaatctgacaccaaaagacgtaacgcttaagaccggtgacagtgtgaacttaaaggcaacctttacaccggcaaattcaacagatacgattgtatggaagagttataataccggtgtggcaacggttgatacgaatggccgtgtgaccggtgtgaaagcaggttcgacatttattcaggcgactgcttacaacggaaaagtggcaggaccgacgacagttattatggttactgtgcaggatggtgtgaaaggagtttccttagactcatcagaaaagacggttcgtgtggacagttccgttacactgatacctatttttaatccggcaactgcttttaataaggcgatgacgtggaaggcttcaaatagtaatgttaaaattgaggcggttggtatttccaatctgaaagtaaccggtgtaaaagccggtacggcgatggtaaccggtacgacgacagatggtggattttctgtatcctgtttgattacgattctgccaaaacagaaagaaaatgatacgaaggtgacggtatcgccgaaaaccaaatatttggctaaaggcaagtcattctatgtgacagccacagttaccggctcaagtaataaaaaggtaaaatggacgagcagcaaaaaatcagttgcaaccgtgacttccggcggtaaggtaaaggcaaagaaattaggaacgacttatatcaaagcgacagcgaaggatggttccggtgcgtacgccagatgtaaagtgcgtgttgttcgtaaagtgaaaaaaattaaactgaaccgctattcgggcagactgcttgttggaagtacgttgaaactgaaagcaactgttcttccgaaaaatgcgacgattaagtccgtgaagtggacgacgaataaaaaatcgattgcaacagtcagcagtaccggacgagtattgggaaccggcgagggtattgtaaagattaaagcttcggcaaaagatggttccggtaagtcagcaacttgcatacttcatgttgttgagccgattgaggcaacgggaattactgtggcaaacagccagattaccgtggcgaaaggaaagattgcccagtccggcattaccttaaatccggtcaattcgacgacgaagattaaatatcactccgataatccgagagtggcaaccgtaaataaatatggtaagattaagaccaaacgtgccggagaggctacgatttacggaacgacttcgaccggactgtatggttattgtgatgtattggttgtagatttaaaccgcaaggcagtaactcttcgtccatacgataccgaacagcttcatgtaaatgagattagtaccggtgtaacatggtattcaagagatattaacattgcaaccgtatcatcgaccggacttgttaccggacgtaagagaggtataacaacgatttatgcggttgtcaacggtgtaaaactcggatgccgcgtgaacgttacaaaattaaagtagtggaatgggaggagactattgttagtaaatttacatgtaaaaaactttgcgataatagacgagattgatgttgatttttcttccgggttaaatattcttaccggagagactggagccggcaaatcgattttgattggctctatcggcatcgcgctcggtgcaagagtttcgcaggaaatcataggaaagcatggcgactctgcgatggtggagattgttttccagattgaagatgaagagacaaaagagaaattatcaagattaggtgtagacccggacgaaggacagattgtcatttcccgccgtattacgggaagccggagtgtaaaccgaattaatggtgaaaatgtatcggtcagtgtgattcgccaggtggctgccctctgcattgacattcatggacagcatgaaaaccagtcattattgcagaaggataaacatttagcaattgtagatgagtttgccaccaaacagtgtgtcgctctgaaacaagagattgctgctttataccgtgaatatacagcgctgaaaaaacagtggcaggatgaagatgtgtcagatgaggagcgtgcgagagaacttagttttctggaatacgaaaaacaggaaattgagcaggcatctttacaagccggtgaaatcgaagaagtggaagaagcataccgcagagcatccggcgctgagacaattgtggaatcgcttggtctggtacaccgtttgacaagtgatacggccgcgggagctgtgagccatgcgttacagagtatgcagcggattacaggctttggtgatgaaattcggaacttgcaggaagaacttttgcagattgagggacttttagatgattttaatcatgaaacagcggattatatgcaggacttttctttcgatgccaatgagttttcggaattagagaaaagactcgatacgattcacaatttgcaggcgaaatacggaagtacctatgaagaaatactttcacatttggaagaagtagaggataaactgcaaaaacttgcagattttgaacagtataaggagaaacttcttgctaaaataaaggaatatgagtcggatttgacaaagaaatgtgagcagttatcaaaagaaaggaaagaaaccgcttccattcttcaggaaaagattaaagctgctttatcagatttaaattttgcctatgtagattttgaaatttcatggagccgcaaagatacatttggtgcggatggatgggatgaagctgaatttttgattgcaacgaatccgggcgagccaaagaaaagcctcggaaaaatcgcatccggcggtgagttgtcccgtattatgctggcaattaaatcggtttttgccgaaaaagaccatattgagaccttgatttttgatgaaattgatgccggaatcagtggacgtacggcacagaaggtttcggaaaaactgaaacttttaagtaaaagccaccagattctatgcattactcatctggcacagattgcggcaatggcagatacccattttttgattgaaaagatggttgatgaaaatcattcggagacagtgattcgtccgttggataagttgcagagtgaacaggaactggcacgtattcttggcggtgttgagattacagagtcggtacttgaaaatgcgagagagatgaaagcgttagcaaaccaaaaaagttcagatagttttcagaattagaaaaatagaagttggctatactaaacagaaggaaccaaaacaatagtaagttttgtaccttctgtttttattttgccaattatgggaggaatgaatatgagaaaaaaagttcgttttttgctggctggattattagtggctgatgtattattgattggatatttgatgtatgattatattcaaaataaaattcctgattctgttttgacttacgtcggggaaaaacaggaactggacctgccggcgttttttaagaccgagcaaagtgttccggctctgcatgtgcaaaatcaggatggcagtttttctatgaaatcaaaccggttaggaagttatgaggtatcggtccgcttatttggtgtgctgccggtaaagaggatggacgttaaagtggtgaaaaggaaaaagatttttccgagtggagagccaattggtatttatgtggagactaatgggctgctagtgctggatacgactgaggtcccggcaaaagatgggcttacttatgcgcccggtgaaaatttgttaaagccgggggattatattttggagtggaatcagaaaaaggttgctacgattcaaagcttaaaccgtgaaattcaggggacaaaagataaaaaggttacggttttaatacgccgaaacggagaaaagataaaaattgccatgcgtccggtgctttcatcagatggcacatataaaatcggaacatgggtacgagaggatacacagggaatcggcacgcttacttatgtaacgaagaccggtgaatttggtacacttggacatggaattacagatgttgataccgggacgctgttgaatttacacgggggtgaattgtttcagacgcagatagtcgatattatgaagggggagaaaggaaatccgggagaactgcagggatatatcaatatgattgcaaaaaatacgataggaaaaattaaaaagaacacggagcagggtgtgtttggtgagatgaaacaggagcgtgtgtccgcctattccggaaaggcgtatgaagttggcagaaaacaagagattgaagccggaaaggcgtatctgtatgcgaatcttgaaggcagggcgagaatgtatgaaattgaaattgaagatataaaaattaatgcaagggataataagagtatggaaatcagggtgacggataaaaagcttttaaaactgacaggcgggattgtacaggggatgagtggttcgccgattatacaaaacgataaaattgttggggctgttactcatgtttttgttgatgacccgacaagaggttatggaatttttattgaggagatgttggtgcagtaaaaagaaccgcatttgctgtcaaaaaccgaaactaggagtcgaaagatgatgaaatataaaaagaatataaataaaaaattaaaataatttagaatttactcttgtaatatggagaaaagaggtatatacttttaattacattgagtttataaaaaatttataattatttcaagggggtactagttgtgcagaaattaaaagtattaattgcagatgataatccaagaatggcatccatgattcagaatattcttatggatgatgatgagattcaggtcgtgggaacggcagaagatggagtagaaacactgggaatgattgaggaaacggagccggatttgcttttgctggatttgattatgccgaaattagatggtcttggtgtgatggagcggctgcaggaaaagcagaagatgaaaaaggtgccggagattattgtggtgtccggtatttcgcaggaacgaattacggatacggcatttgccttgggagcttcatattacttattaaaaccattcgagtcggaaacacttctttctcatgtacagaaatttaaaccgggtgcgagggcaaaactcattgctacgggaaatgagaaccgaagaaatgaaaaaatggcgaaatataatcttgaatcggatgttaccaatatcattcatgaaatcggggtgccggcacatataaaagggtatcagtatttgcgggatgcaattatgatgtcagttgacgataaagaaatgttaaattctattacaaaaattctctatccttctatagccaaacaacatgggacaacaccaagcagagtagaacgagcaatacgacacgcaattgaagtggcgtggagccgcggaaaagtggatacgattgatgaattattcggatatacggttcataatggaaaagggaaaccgacaaattcggagtttgtagcactaattgcggacaagatacggttagaacagaaaatgaaagcctaaaaaaatcttttcaccgctccctttttggtgtataataataccaatatgattttgtgtcaaaaagaaaggggagaaggatattgaagaaagtattatttgttgcttctgaatgtgttccttttataaaaaccggtggattggcagacgttgtcggttcacttccaaagtattttgataagagtaaatatgatgtacgggttatgattccaaaatacactgcgataccggaagagtataaaaaccagatgcattatatcacgcatttttatctggaacttgcatggcgtaagcagtatgtcggtgtgtttgaaatggaattaaacggtgttaaattctattttcttgataatgaattttattttagcggcagcaagccttatggagaaatttatcaggatattgaaaaatttgccttttttgataaagcggcgttatcaacactgcctgtgattgatttccgcccggatattattcactgccatgactggcagacggggctgattccggtatatttgcatgatgcattccagcagagcgaattttaccgtggaattcagtcaattatgacgattcataatttgaaatttcagggtgtctgggataaaaagacagttatggatacggcagggctggatgcatactattttacacctgataaattggaagcctttggggatgctaattatctaaagggtggtcttgtttacgcagatcagattacgactgtaagtaatacctatgcagaagagattaagaccccgttttatggagaaaaattagatggcctgattaatgcgaagtcggggtgtttgaccggaattgtgaatggccttgactacgatgagtataatccggcaaaggatccacttatttatgcaaattatgatgcaagaacatttcgcaaagaaaaaattaaaaataagcgcggccttcagaaagaacttggtctttcacaggatgataagaagtttatgattggtattgtgtcgagactgaccgaccaaaagggctttgatttgattgactatgtgatagaagaaatctgtgcagaagatacacagcttgtggtacttggtaccggagaggaaaagtacgaaaatctgttccgtcattttgcttggaaatatccggaccgcgtatcagcgaatatttactattccaatgagcgttcgcacaaaatttatgcagcctgcgatgcctttttgatgccatcactctttgaaccgtgcggattaagccagctgatgagtcttcgatatggcacggttccgattgtaagagagaccggcggactgaaagataccgtagagccttataatgaatatgagagcaaaggaaccggtttctcattcagcaattacaatgcacatgagatgctcaataccatccgctatgcaaaagatgtttattataatagaaagagagagtggaataagattatcgaccgcggtatggcaatggatttttcatggaagaattcagcgaagaaatatgagcagttgtatgacagaatgtaaaaaaatacaaattatttgaatttactcttgaattttattacggaattgggtagaataggttctagaagtttgtatattttttaacaaaccaaaattttaactatttttaggaggaaatatcatgtcagtaaaagtagcgattaacggatttggacgtatcggacgtcttgcattcagacagatgtttggtgcagaaggttatgaagtagtagcaattaacgatttgacaagccctaagatgcttgcacaccttttgaagtatgattcttctcagggtaaatatgagaaagcagatactgtttctgcaagtgatgattccatcacagtagatggtaaagagattaaaatctatgctttcccggatgcaaacaactgcccatggggtgagcttggtgtagacgtagttttggagtgctccggattctatacatccaaagaaaaagcacaggctcatatcaatgcaggtgctagaaaagttgttatctctgctccagcaggaaatgaccttcctactatcgtatataacacaaaccacgagacattgaaagcagatgatacaatcatctccgcagcttcttgtacaacaaactgccttgctcctatggcagatgcattgaacaaatatgctgcaatccagtctggtatcatggttacaatccatgcttacacaggtgaccagatgactcttgatggtcctcagagaaagggtgacctcagaagatctcgtgcagcagcagtaaacatcgttcctaacagcacaggtgctgcaaaagctatcggccttgtaattcctgagttgaatggtaaattgattggttctgctcagcgtgttcctacacctacaggttctacaacaattttgacagctgtagttaaaggaaaagacatcacagtagatggtatcaatgccgctatgaaagcagcaactacagagtccttcggatacaatgaagacgaaatcgtttcttctgatatcgtaggaatgagatatggttctctcttcgatgcaactcagacaatggtttgcaaagttgacgatgacacatacgaagtacaggttgtatcttggtatgataacgagaactcttatacaagccagatggttcgtacaatcaaatacttcagcgagttagcataagtcttgatttaggacaaggtttgaaattgatcccaaaaagggtccggtcggttggaccggaccttttttcatagaaataattaaaatggaggtttgttatgttaaataaaaaatcagtagatgatattaatgtaaaaggtcagcgcgtgttagtacgctgtgactttaatgtaccgcttcaggatggtaaaattacagatgaaaaccgtctggtagcagcacttcctacaattaagaagttgattgccgatggcggtaaaattattctttgctcccaccttggtaagccaaaaggagagccgaaaccggaactttctttggcaccggttgctgttcgcctttctgaacttttgggacaggaagtaaaattcgcagcagatgataacgtagttggtgaaaatgcaaaagctgctgttgctgctatgaaagatggcgatgtagttcttcttgagaatacacgttatcgtgcagaagagacaaagaacgaagataatttctccaaagaacttgcttctttggctgatgtttttgtaaacgacgcatttggtactgctcatagagcacactgctcaaatgtaggtgttaccaaatatgtagatacagctgttgttggttacctgatgcagaaagaaattgatttccttggaaatgcagtaaataatccggagagaccatttgttgcaatcctcggtggtgccaaagtttcttccaagattccggtaattgagaaccttttggataaagtagatactttgattatcggtggtggaatggcatatacatttatggctgctcatggtgagccggttggtaaatctcttttggaagaggattacaaacagtatgcactcgacatggagaaaaaagcagaagaaaaaggtgttaaacttttgattcctgtagataatgtagtagcagatgatttctcaaatgatgcaaactttaaagttgttgagcgcggtggtattccggatgacatggaaggtttggatatcggacctaagacaagtaaattgtttgcagacgcaatcaaaggcgcaaagacagttgtttggaacggaccgatgggatgttttgaaatgccaaactttgcaaaaggaacgattgcagttgctcaggcaatggcagatttgaaagacgctacaacgattatcggtggtggtgatagtgcttctgcttgcaacaaccttggatttggtgacaagatgacacatatttctaccggtggtggtgcttcccttgagttcttggaaggaaaagaacttcctggtgttgcagcagcaaacgacaaataataatataagattttgattctgtggtggtattttatatgccaccacagaaatttttggagaaaaaaacaataattacacatttagtgcaggttgagaagatattttgtataaggagtgatattttatgtcaagaagaagaattatcgcaggaaactggaaaatgaataaaacaccaagtgaggctgttgcacttgtaaacgaattgcttccgttggtgaaaaatgatgatgttgatgttgtattttgtgtaccggcaattgacattgtaccggttgttgaggcggtaaaggaaagtgatgtaaatgttggggcagaaaatctttattttgaagaaagcggtgcttataccggtgaaatttctccgaacatgcttgtagatgccggagttaaatatgtcattatcggacattcggagcgcagagagtattttgcagaaactgacgagacggtaaataaaaaggttttgaaggcatttgaacatgaccttaccccaattatctgctgtggtgagacgttgactcagagaaaacagggtatttacgtagattggattcgtatgcagattaaaattgcattccagaatgtaacggcagatcaggcaaaaaaagcagttattgcttatgagccaatctgggcaatcggaaccggtgagacggcaacagcagaccaggcagaagaagtatgtgcagcaattcgtgcttgtatcggtgagatttatgatgcggctaccgcagatgcaattcgtattcagtacggcggttctatgaatgccaagaatgccgcagaacttttggcaaaaccggatattgacggcggactgattggaggcgcttctttgaaaccggattttggtcagattgtgaatgcataacgcgaatgaactcgggaacttgttaaaaagtgaaataaactattgacaagaaccgtatcagtatgtataatatgtcttgtgtctgtcaaagagatggacacaagataaatgcgcgagtggctcagttggtagagcacaaccttgccaaggttggggccgcgggttcgagtcccgtctcgcgctctaatataaaaaagagtgattccaaaaggaatcgctcttttttacttcgagccccgccgtggctcgaagttcgaggtctcggctgtcgcctcggtcgtagcaaaacggtgtccaccggacaccagctacgtctcgcgctttcatattaaaaaagagtgactccaaaaggagccactttttttacttcgagccctgccgtggctcgaagttcgaggtctcggctgtcgcctcggtcgactatactgttagaagtatttcgacaccattttcttcaattgcttttaagtcttcttctaatgcatcgtcatcggtaataagaatatctaaagtgttaataggacaaatacttataatagaatctgtgccaattttactggtagggtaaagtccataaactttttttgcagacgcaagaagagtgttatacagacataaatttctggttcgctggatggataatccgaagtcagcaccacttgtttatgtgtaaaaaaacagatgtcaattctcttgaattacggaaactaaaaaatccgccatccgtttattttacacaaacaacaagcggtagcccttgcattttttttcatattttgataaactgtaaaattgagaatagaactaactatattattgtgttttagacgcagaaatgaggcagatatggaattaattagtatacgcgatttgtatcgcaaccaggaaaagtatgtagaacagacggttacggtcggaggatggttaagaagcgtcagagattccaaaacatttggattcttagtggttcatgatggaacatttttcgagccgcttcaggtggtatattcagataaacttgataatttttcagcaatttccaaattgaatgtaggagcagccgtgattgttacgggaaaagtagtagcaacaccgggaacgaaacagccatttgagattcaggcagatgaggttgttgtagaaggtgggtctgcaccggattatccattgcagaaaaagagacactcttttgaatatcttcgcacgatttcccatcttcgtccgagaacaaatacatttcaggcagtgttccgtgtgcgttctttgattgcgtatgcgattcataaattcttccaggagagagaatttgtttatgtacacacgccattgattaccggaagtgactgtgaaggtgccggtgaaatgttccgtgtgacgacattggatatggaaaaccttccgatgacagaagaaggaaaagtagattacacaaaggatttcttccgcaaagaaactaaccttaccgtaagtggtcagttaaatggtgaaacgtatgcgatggcgtttaaaaatatttatacatttggaccgacattccgtgcggaaaattcaaatacgacgcgccatgcggcagaattttggatgattgagccggaaattgcatttgcggatttgaaggatgacatgatgttagctgagagcatgttgaaatatgttatccgctatgtgcttgaaaatgcaccggaagagatgaaattcttcaaccagtttgtggacaagggactgattgagcgtctgcagggagttgtggatgcagactttgcacatgttacttataccgaagctatcaaactcttagaagagcacaatgataaatttgaatataaagtaagttggggatgcgatttgcagaccgagcatgagagataccttacggaagaaattttcaaacgacctgttttcgtaacggattatccaaaagaaatcaaggcattttatatgaagatgaacgacgataataaaacagttgccgctatggactgtctggttccgggaatcggggagattatcggaggaagccagcgtgaagatgattatgataagctggttgagagaatgaacgaatgtggactggataaaaaagattatgaattttatctggatttgcgtaaatatggtacggcacgtcatgccggatttggactcggatttgagcgctgcgtgatgtatttgacaggcatgcagaatatccgcgacgttattccgttcccacgtaccgtaaataactgtgaattataaagcatacatgaggaggttagcaacatgaatttaattattccacaaggctatcagtccgcactggatatccgtgagactgaggtggcaatcaaaaaagtaaaggatttctttgaaaaggctttggctgtcaatttgaatctgacacgagtttcagcaccactttttgtagatccggattccggattgaatgacaacttaaatggtgtagagcgcccggtttcttttgatattttggagcagaacggaagggtagcagaaatcgtacattcgttagccaagtggaaacgtcatgcgctgggccgctatggttttgctcatggagaggggctttatacggatatgaatgcgattcgccgtgatgaagaaaccgataatgtacattctttgtttgtcgaccagtgggactgggagcgcattatcgacaaagaagaacgtaatgtagatactttgaaagctattgtaaataaagtatatcaggcattgatggaaacagaagattatatggcaatgcagtatgactacattaagaaatccctgcctgagcagattacctttgtgacaacacaggaacttgaggaccgatatccggacaagacgccaaaagagcgtgagtacgaggcagtaaaagaatatggtgctgttttcctgatgcagattggagataagttagcttccggagagccgcatgatggacgtgcaccggattatgacgactggtcattaaatggtgatattatcgtttattacccggttcttgatatggcatttgaaatttcttccatgggaatccgtgtggatgaaaaggcattgaaggagcagcttgaaaaagcaggatgcccggagcgcgaaaaccttccgttccagaaagaaattttggaaaagaaacttccgtataccatcggtggtggaatcggacagtcaagaatttgtatgtttttcctgaaaaaagcacatattggagaagtacaagcatcgatttggccggatgatgtgtgggaagaagcatcgaagaaaggacttaatattttataatggataattttaccttttatgcgccgacttattttgattttggtaaaggcgccgaaaagcatgttgctgatttaataaaaaaatttggcggacataaagtgctgcttcactatggaggaggctccatcaaaaagagcggactttatgataccgtgatttccgtattaaaggaaagcggtttggaattttgtgaacttggtggtgtaaaaccaaatccaagaagcggactcgtatacgagggaattgaattgtgcaagaaagaaaaggttgactttattcttgctgtcggcggcggaagtacgattgattcgtctaaggcaattgctgccggtactttgtataatggagattttatggatttttatcagggcaaggcatctgttgagaaagcgcttccaatcggaacgatattaacgattgcggcagccggcagtgagggttcgccaaatacggtaatcaccgatgaaaaaacaatggtgaaaaagggaacaaaaagtgatttgcttcgtccgaagttctctattttgaacccggaacttacctgcaccctgcctccgtatcagtcggcagcgggagcaacggatatcatgattcatgtttgtgagcgttatttttccaacacagaggaagttgagattacagaccgcttgtgtgaagcaattttaaaaacaattgtatatgaggcaccgcgtgtcattgaaaatccaaatcattatgaagcgcgtgcaaacattatgtgggcaggtatgttagcacataataatgtttgcggtgtcggtcgtgtgcaggattgggcaagccaccatatcgagcatgaattgtcagctctttatgatgttactcatggcgcaggacttgcagtaattgcaccgctttggatgcgttatgtctgtaagaaaaatccgggcaagctcgctttatttgcaaaccgtatctttgaggtgccgatgaatgagaaacatccggagaaaaccgcactcaaaggaattgaggcgtttgaagcatttttgaaaaaaatcggcatgccatcttctttcgcagagattggtgcaaaagaagaggatatcgagcttatgaccgataagcttttgaaggggcgtaagaccgaaggaaattatgtgaaattgaatcgtgatgatgtgattgcgatttatcggagtgcattgtaaaaattaaggaggcagatatggaccagagagaatttctacgtcagatggaagagttggtagattttggacgaacgaaagaaaatttgctcaccaaacaagaaattgccgattattgcagtgactggaatttaacagaggaacagatgccatttgtctatgcataccttaaagaacatcggattgaggtagaaggatatcgtgcgccggtagagaaaacggaagaagaggctgtcgaaaaaagcgaaaaggattccaaatatctgcgcttatataaagaagaactgtgtcagttaaagcggtacgaagaagaggaacttgtgcgtttgctcgaacagttgcgaaggggcgaggaagaagtaatttcttctgttatcgaagcgcatctgcaccgggtcatgcagttggcggataaataccgcggccgtggtgtgccggtggaagatttgattcaggaaggtaatttggaattaaccgcctgtgttgcgatgctctgtggaaatgaagaagttgtggattatcaaaaagccattgaacatgcagtgagaagccggttgattgaattagtagatgaagaactggcaggaacggacagcgtgcatgcactgcttgggcgtgtgaaccttttgttggaggcaacgaggacattagcacaggaatacggacgtattgcgacaattgaagaactttccgaatttacccatatggatatcgaggaaattaatcagtacgtcgatttgtcccacaatgaaatagaactgggaaaaggtgaaaatgaacgaaaataaagaatttaaactggaggctctcgttgagcctctttgcttatggtatgaaaaggaaaaacgcagtatgccgtggcgggatgatgctacgccgtatcatgtatggctgtcggagattatgctccagcagacaagaatagaagcggcaaaagcatattatgaccggtttacaaagtgtctgccggatattccttctctggcagcagtttcggaggaagaacttctgaaattgtgggaaggacttggatattataaccgcgcacgcaatttaaagaaggcagcttctcttttggtggagcggtatgatggcaggctgccggccgattatgatttgctgctttcactgccgggaatcggcagatatacagcgggggcgattgcatccattgcttacggcttagcagagccggcggtggatggcaatgtgcttcgtgttacgatgcggtatttaaattgcgatgaagatattatgaagatgtcggttcggactaagatggaaaaacaacttcgtgccattatgccaaaggactgtccgggcgaatttaatcaggcactgatggaactcggggaagtaatctgcattccaaatgggaaaccactctgtgaaaaatgtccgctttctcatttgtgtcttgcccacaaagaagggcgtgagatggaactgccgaaaaaggcggagaagaaaaagcgccgtatcgagaaaaagacagtccttgtattccggcagggtgaccggattggaattgtaagacgaccaaatcaagggctattagccggtatgtgggaatttccatcaaaagaaggacatttgacgatgcagcaggtgaaagagtatttgtcagaaaccgtatcctgtgaggtgacggtaaaacgattaaagagcggcaagcatattttctcccatgtggagtggcatatgcgcggttatgagattattcttccggaaggaaaaccacaagatgtagtgcatgggcttttgctttgtgacttgtcagaggtccaggaaaaatatccgataccggttgcttttcatattttcttacaccagatttgagtgtgtaataacgtaaaataagggctttggatgaatttccggctcttatttttatatttcgtaaaaacacatgatatagtgcatactgcaaaaaaaatacaaaagaattacaatatatagtagacaatgcatacctcgtttggtataatgattcctgtaggaaaaattatgaacgttagtattggtacggattgaaaggagttgtacaaaaagtgagggtaatcaaaagggatggccgaaccgtagaatatgaccgaaacaaaatattgattgcaatacggaaggcaaatgcagaagtggatacgtttgaaagggttaatgatgacatgattgatggcatcgttgccggtatcgagaatatgaaacgtgatacgatgcaggtggaagatattcaggatatcattgagcagaaattaatggc

SEQ ID NO: 680 - DNA, 12341 bp, unidentified
  source 1..12341: mol_type = unassigned DNA
ttacatcttatctatgagtgcggcacaggtttttgctgtgagaagtccatcaagaacatcttcttttttgccatccttaacgatttcgccatttgcaataacaattattctatccgcaatattaaggatacgctcctgatgagatattataagaatagtgccgccttttttctcatacattttttcgaatacagaaataagattgctaaagctccaaaggtctattccagcctctggttcatcgaatatagtaagctttgtgcctcttgccataaccattgctatttcaattcttttaagctcaccaccagaaagacttgcattaacctcacgatttatatattctcttgcacaaagtccgacatctgaaagataatcacaaatttgagcaaccgaaagttttttgcctgttgcgagatttattaaatcctgaacggtaatacctttaaaacgaaccggttgttgaaagccgaaacttatacccattcttgctctttcagtgatatttttgcctgttatatcaacaccatcaaatataatctgaccgtctgtcggagtatatatacctgcaataatctttgcaagagttgattttcctccaccattaggacccgtcaatgcgacaaagcgttcatcaatcctcaagctgacattgtgtataatttctttttttccctcgtcattttcagctaaaaaagaaatattctttaattctaacattttagactccttctatataatagattccgtaatttatattatacaccattttttgcattttgcgaagtattatacccgactttttaaaatttagtaaagaagctttccctattagcaattattaagagcttgttctaaatctgcaatcaaatcttccttatcttctattccgcaagaaatacgaataagctctgctggaactcctgccgctttgagttgttcatcattcatctgacgatgtgttgatgaagcaggattaagacaacaagttcttgcatctgcaacatgggtttctattgcagcaagcttcaagtttttcataaacgcttccgctgcttttcttccaccctttaagccaaatgatacaacaccacaaccaccattaggaagatatttttgtgcaagtgcatagtatttatcacttggtaaaccagaataattaacataagctacctttgggtgattaagcaaatattctgcaaccgcctgaccattctcaacatggcgaggcatacgaacatgaagtgattccaaacccaaatttaggagaaatgcattttgtggagattgaatacaaccaaaatcacgcataagctgtgcagtgcattttgttataaaagcgccctcctttccaaacttttctgcatatgtaattccgtgatatgattcgtcaggtgtgcataaaccagggaatttctctgcatgaaccatccaatcaaacttacctgaatcaacaatagctccgcctactgctgcaccatgtccgtccatatattttgttgttgaatgtgtaacaatatctgcaccccattcaatgggacgacaatttatcggagttggaaaagtattatcaactataagtggaactccatgtgagtgtgctgcttttgcaaatttttcaatatcaagaacagtaagtgcaggatttgcgatagtttcaccaaaaacagcacgagtattatcctgaaatgctgtattaagttcttcctctgtgcaatcaggagaaacaaaagtagctgtgatacccattttagccatagttactgcaataagattaaatgttccgccgtatattgatgacgatgcaactatgtggcttccacactcacaaatattaaagagtgcaaaaaaatttgctgcttgtcccgaagatgtaagcattgctgctgtaccgccctcaagctccgcaattttagccgcaacatggtcatttgtaggattttgaagtcttgtatagaaatatccagattcctccaaatcaaaaagcttgcccatagcctcacttgtatcgtatttaaaggttgttgattgaataataggaacttgtcgaggttcaccatttcctggagtatatccaccctgtacacatcttgtgtttatcttatattttgacattctaaaagctcctttgataaattttgaataatttctcatataattatatcagattattgcataaagtcaataattcctctatgcagagtttttgaacaagtaaacgaaaaatgatatatcaggcaaagaaataaagattgacaatttaatggctacgaatattagcttaccttcttcataaaataattgaaatggaaagtatgaagattatcgttatataagttgcatattctaacgcagattgatataataaatttataaaattaagattgaaaggaattaaataaatgagtacatttgaaactaaagattacattctacaagaagatttggattatattgcgaactcttttcctgatattaataagcttaaaaattccactattcttgttacaggtgcaacaggacttgtcggctcttatgctgtaaaggctcttgcagctataaatcgtattcataatgctaatatgaaaattcttgctcttgtaagaaatcctgaaaaagcaaaaactgtattcagcaaacttctcgagcgtggggatatttcacttgttatcggagatgttcttcaaaaaatccaaactgaatataaaattgattacataattcactgtgcaagtgttactaattctaaagaaatggttactaaaccagttgaaacaatctgtgttgctgttgatggtacacgaaacatattagagcttgctaaagaaaacgatgttaaatcagttgtttatatatcaagtatggaggtttacggttctcccgatgcttctctaccatatgtaagcgaaaataactatggttatgtagatgtacttaatgtaagaagttgctaccctgagggaaagagaatgtgcgaatgtctttgtgcctcttatgctcacgaatataatcttcctattaaaatagctcgtcttgctcagacctttggtgcgggagtaagcaaaaatgaaacaagagttttcgcacagtttgcgagaagtcttataaatgaagaagatattattcttcatacaaaaggagaatccactggaaactattgctacactcgtgattgtattcttggaatactttatatacttattcgtggtgaaaatggcgcagcatataatatcaccaatgaaaatacaaatatgaccatagcagaaatggcccaaatggttgcagaaaaaagcggaaaaatctctgtggtattcgatattccaaaagatgcattgcaatttggctatgccccatcagtaaaaatgaaactttcatcagaaaaacttcgttcactcggttggaaaagtgatattgacttatcagaaatgtatgaaagaatgattaaaagttggaaaaacacttaaatcaaaaatagtactgcgttgtataaactgtgttattttattacaaaaattaacataataaatggttatatgtacacgaacacaaaaagtcacttttgtgtggtaatttttcttaaaattcgatacttatatctattatgtaatctaaaaaataaatctaaaaataacataataaagactttttattttaaaataaatataacaaaaaataatttagtaatataataacatacccaaaaatccctttatattgcaattttcagctaccaaattaatattttcggtagcttttttgtttttataccaaaataaaatttacttatttttagcttgaccaattcgtaaaaagtaagtataatgaagtaagaattatgctttaatttcgcttataaaaagtcatttttatattaatatttcacgatgaaatttatactgttttaattatatatttgagaatctatttctaagaaaataataaggagaatttataatgaatgaacaacatggtcttatattcgatcgtttaaatgaattttttgaagaactcaatcaacaagatgttgcgccaaatcaagaagtaatagaactttatattaaagaaatatatgctgaggtaactagcctaaatgcagataataatccctatctatcaagacattccgttttagagcgtttatataatttagcagacttaacttgtgattttgctgaaatttttgaggaaaagttctttaatcatcttaatgctcttaattttagaaatattgagcttaaaattgcaaaacaatataaaatgaatggcggaaatgatttttggagaaatatttgggaaatatatgcagatatagctttgcattactctgctttaaatattgattctaaagctctcagtaatgctaaaacagctttaaaactaatgattagaacagaagcaaagccagaccctaagtggatttctttccttaatagcagaattgcttatgcctatcaggatattgctccggataagtctataaattattttaataagtcttctgatgcacttattgaatataacaaagttaaagattgctatgaaaacaatatgggaattatattaaatgatataaacattgcaataattatgcttgagattaatcaggttgacgatgctattaagcaatgtctaaagtgcttagatacattaaataatctttttgaaaaatatggagaaaatgaagaattagtaaattatatttcacatacatatagtattcttagcagagcttactttgaatcgaaagattacgataatgctgaaaaagctattgaaaaggggctttctttctgcaaacgcctacaagaaaacaaatttaataattattgtgaaattattgatgttctttactctactaagagtcttattctttgcgaaaaacaaagatatatgaaagctattgaattacaatataaattgcttgatgtttggtcggactataaagaaggatttaagcgttcaactaaaatttgtgatatatatgtcgaaataagtatgattttctcaaaatatcttgatgaacaaggtatgtctattgaatcagcacgacttgcttttagagagattaagcaatatactgataatgaattatttatgtcggataaatatgctttatctgttcgcagaagatgctatataaatcttgctgatgcttatttcagagcaagaatgtatcaatctgctatatcttcttacactaatgctttggatattatgaaagaagaatttgatatggaatctgaaaagatttcacttgtatattcatactcctataccttatatcagcttgccatgcttgattttaaatacaatagaaaagctgaaggttgtaaacgccttagctattcttatagaagtgtttgcacacttaaaaaatatggtggtgtttacgaagtattatttaatatggttagaaatgctctatcaacttatgagaaaaaatttgacggaaaaattattgaacttgatactgcacagtaatattaaaattctatttgaatacacaaaaaatcctcgaagtcatttttcgaggattttttatttatagagtatataggaatgtagtgaaaacgatttgctatatttttgaataaaatgccattaaaaaggttggattaacacaaattttatgttataataaaaactgaaattaaaatttgaaaaatggaggatttttcatggaagaatataaaaagcagtttattgaatttatggttgattgtcaggtacttaaattcggagatttcgttacaaaaagcggccgtcaaacaccatttttcgtaaatactggattttacagaacaggtgcacagcttagaaagcttggacagtattatgctgaagcaatcaacaaaactttcggacttgattttgatgttctttttggaccagcatataagggaattccgctttccgttgctgcaactattgcaattagtgaaaaatataacaaagacattcgctattgctcaaacagaaaagaagtaaaagaccacggtgataagggtattcttcttggaagccctatttctgatggtgataaagttgttattattgaagatgttacaacagctggtacatcaatcgaggaaacacttccaataattaaggctcaaggagatgtaaatccgattggacttgttgtttctgttgaccgtatggaaagaggaaagggtgaaaaatcagcactttccgaaattgaagagaaatacggacttaaaacaactgcaatagtaactatggcggaagttgtagagcatctttacaataaggaatataagggcaaggttataattgatgataagcttaaatccgctattgacgcatactatgacaaatatggcgtaaaataatattgaaaagtctataaaagtagaaccctcggtttgaccgggggttctactttttatagctttgtatagcctattgaatgcagcaaaaatgaaattactgtatgctttacatttgaaaaaatataatcaaattcaccagcatactttacaatttcgccattaaagcccttcttgaaacgatatactccataattagaatgattttcttcatcacaatgaggtattcccataaaatcatatatatcacattgtgattcaatagcccattttatcatattccactgcattaaataatttggcataagatttctttgagtatcacttgacgctccataaacatagctgactctattgccatatcttactgttaatgctcccgaaattgcctcaccatctggagagtagcacatataaagtctggcattttcttcaaaagcataaagaaatttctcaaaatattccttagagcgaatggcaaaaccatctcgttttccagttgcttgcataagctcacaaaaatcatcaagcttttctacgccataatatttgcaagaaacgcccttacgaacagcaagccttatattatatctccactttgaatgaaacgaggaaaaaatctcatcttcggttttatttttaatatcaagtatgtaattacgctgacactgaattgtattatcttctggtgtattggcattatatttaaaacccaagcgttttaaattgtttatggattcaatatcatcatatgaaatcatagggtcgattttaagcatatatgctttgtgtttttctgcaagaagttttgcctgttcaataattttgctaagtatatccaaattgtgacaatcacacacaggaccccttggagcatacataaaaactgtatgcataagcggaatattcttaattagaatttgcatagttcctataatatttccgctctcatcacgaattattattctctccgatttccattcgttttttattttgcaccaattttcggattgtgtaaaactacctgaactatttaagaatacaaatttttcatattccgacatatattgtttcattttgaaattcctccataacacttctgcattatctgaataaatcaaatataactcaggaactgttacagagtattctgttttttgcaagaaaattgtcaaaatgtgcttttcatactaaagcctgtaaatttcttatcacttatgctgtaatataaaatcgtatctgaatattttgaagtgttgtcatttccacttaaaacaagtatcagttcatctccattagaaaaaactgtatattgtgagtttgaaatcattgatgaaataactactcttattggaaatgcaaacttatcatcggctattgttgaaaaaacatagtttccgttatctacatacatttcaggcatataaattgatgatatataatcatatattttattactctctaagggttgttcggcaacatcttcttcatattcgttttgttcagaaaaatacatatctgtgagtgctaattcagaatattgcgattccataggtttcgttaagtaatctatggcagaacacacatcttctgaaatttctttgcttttttgatttatttcttgagaatctggtttaggtggattttcacttcttactctgaaatataagatactgttatctcctaatttcacaactaaatctaaaatttttgttttattattttggtttgtatatttgaaatcttttatatgcataattgatgcattattgtcaaattcaacattttgagaaaaatctgtattttcttttggaatattatttatatcaagagtttgaataacataaaatatcatctcattaatgttctccaacataatctttttcaatgcttcatcgtcataattatatctatcatcacccaaactatttgcaaacatatctaagctttggtcataaatgtgacttgtaatatatgatggtgcggaaatcaattcatcttcacgatatgagagccacggataaaaccgagagttatctccgtcatctacaaagataagctgtgttatatttttcttttcctcagtaaagatttcatttttatagtcaggcaacatttttccacagaaaattatacccgttatttccgctcccatagcaagtgtcaaaagcaaagtcggaagtataaatttcttaaatttgctcattgattttaccctcactttgctttatacaaatacttataatagtacctttgccaagttcactttcaagctctatttttgcattatgctttttggcaatctctgcacacagagcaagtcctaagcctgctccgccaagttttcttgaacggactttatctgccatataaaacggttcaaaaattcgctttttatcttcctcagctattcccataccataatcacgcactgtgattacagcatactctccctcactacgacaagtaagctcaatctttcctccctcaaatgacgctttaactgcattatctacaaagttatatatcactgatttaaataaatctgcatctgcatttattattaaaggttcaatatgagtaaaaagtgttatagacttagctttcatcataggttcaaaaactatactaagttcattcaatattacatctgttctgaccggattcaactcaagctcagaatctccagaggaaacaagttccataagcttaccagaaatagcctttaaacgctttgattcctctactataatagatgaatattcattaagctcatctggggttacatttttctttatccttaaaatatccgcaaaaccaagtatagatgtcaatggggttttcatttcgtgagaaaggctatctataaagcgttttctatcctcggctattgattctattctgttataattttcctcaacagaaacagccatagaattcacattatttgcgagctgttgaaattcttcactgccacttgtacttactctaaggctataatctccactggctattttattgatggttttattgattctgccaagaggtctgaaaagtaattttataagtaaaagtaagattacagcaatcactgctgccaaaacaacagaaagaatctgcacaaaaaatagttccttatttctctcattataaacttctgtaatattattcgccgtaaaaactttatattccttgccttcaaagcttgatattgaaccaacaaacatatatgtattttctccacaatccaatattattgaggcgagattgtcttcacttgtaatcttttcagaaagtgtttttatatcaggcttttcttctccataatatgatatgttattttcgctgtctgatattatggcaagagcgttttcttcaagctgttgagaaagtatatgctcgataaccttgtctatatcatctttggagagcataaaggcttctgatttcattctttgataagttatattattgcttattgatgcacaaataaactcgtgtgaagacactgcacgacttctctcgcgagttattgtcatatgttgattatttgaaagaacgactaatgctgtggcatttatagcggcaattacaagaaataaagccgaaataaacaccttaaaccatagcttcaattagttcacctctggttatgatttactttcaagcctatatccaagctttggaacggttatgagagaatcctgcaaatcaagttttttgcgaatttgctgaacatgagtatctactgttcgagtttctcccatatattcatatccccatactgctgaaatcaagcgttctcttgtaagagctatatcaaggttttgcataaagaataccgtaagctcaaattcttttggtgtaagctgaatttctattccttgcttttttattatatggcgtgaaatatctacagttatatcgccatattttattatattgttgtttttatgtctgcgtcttagtataacctcaattcttgcaagaagttctactgcctcaaatggcttaactatatagtcctctgccccaagctttaaaccttttaccttatctgtaacatcttgtaaggctgtaaggaatattacaggagttttttctgtatctatgtgttccataacctgaaaaccattgaaatttggcaacattacatcaagcaaaactaaatcataatcgttctcatttattttttgaatagcagtttttccgtcataacaagaatcactttcatatccagctattgaaacagttgcctcgagcatttttactatatttttatcgtcctcgactataagcaatcttatcattgaatttcttcctttaaaataaatttatcattaaaaattatagcataaatatagaattgtttaaacctgtttatagagtaaataagcagaaaaaatgtcataattttgcaaaatttcagaaaatcattaaatttaaaattaatattcatttttcagataatccaccgtaaagctattcgttgacacttttcactctcaatgctataattacttatattcaaaaattattttatattgtaatcaagcaagtggtgattttatgagcaataatcaatattttacagacgataatcaatatagagagtttctcgataaaattgaggttttaaaccacgatgaggaatttgaaaaaattattgatataataatagaaattcctgaaaacgacagaccttatgaacttaatgtactattatcaggtgcttattttagtttagatagatatgatgaagctatcgaacttttagaatctattgaacctgatgataacgaagaagaaattgctaaatattatttctatcttggtatgagctattatcatagtggaaattatgatgaggctatcccttgctttgaaaaaactcacgaaatagacccaaaggatatagatactttgctttttctttgctttgctacatctgaatatggtaatgatgaacttttttctgaatattcacaaaagcttgaagctttagataaagaattatatgattcatattttaattctcaaaatacagtagctgaagcttattctgatgaagaagttataagccttgaaatgtttatcgaagataacataggtgaatataataatgttttgcgagatgtttcaactactgatataagctgtgaccttttgcttattccaccaaatgatgaacatgagttttatacgcttgtaacctgtggaatgggtgctcacaaaatgactgttccaagtgatgaattttatgaccgagctgagcttgttttatgcttgccaaaaagctggcatgttaaaagctcgaatgaaaaatggttctggccactaagacttatgaaatctcttgcacatctacctatattggaaaattcatggattggttgggggcatacaatctcaaatggagaaccatattttgataacactgaactttcgggtgttattcttggcaattcgcctttaatggaggataatgttttagaacttccgaatggtgaaaaggtttgtttttatcagatatatcttctatatgaagaagaaatgaattataaaattgataccagtgcagacgatttatttaatcttgttggagagctaaatcctgttcttgatattagcagaaaaaatttctgcgaaaatggacgcaagaaatataaaattccaaaatcaattatggaagacttatttgaaacaaaagattcacatactggttgttttgctacggacagaataattgtagacggtgctgaaatcagatttatttatcgtgaaatgcctctcgataatcaggatagtggctggagatttatggctggcgatgaagatgatgagtatatgaatgatacaagcaaatctggaatatatcatctgaatactctttgcaactatgagccaagtattcttaaatttcttgacgaaccatacggctctatgtttatcaaaaataaaaatggagaatttgtcaagtttgagagataa

SEQ ID NO: 681 - DNA, 13919 bp, unidentified
  source 1..13919: mol_type = unassigned DNA
atggatacaaagtatatattcgtaacaggcggagttgtttcaggacttggtaagggcattacagccgcatcattgggaagattgttaaaggcaagaggatataaggttacaatgcagaagtttgacccttatatcaatatggacccgggtacaatgagtccgtatcagcacggtgaagttttcgttacagatgatggtgcggaaacagaccttgaccttggacactatgaaagatttatcgacgaaaacctaagcgtaaattcaaacgtaacaacaggtaaaatttattggtcggttatttcaaaggaaagacgcggtgactatgagggaagaaccgtacaggtaattccgcatatcacaaacgaaatcaagtcaagagtttaccgtgttgcaaatacgcaggacacagatattgttattacggaaatcggcggaacagtcggtgatattgaatctacaccgttccttgaatcaatcagacaggttgtaaaggaagtcggtaaggaaaattgtatgtatatccaccttacacttgtaccgtatctttcaacatctggcgagcaaaagacaaagccgacacagcacagtgttaaggaacttctaagccttggtattcagcctgacgtacttgttttaagaactgaaaagcctcttgaagaaggacttgcagaaaagattgcgctattctgtaacgtatcacctgaatgtgttatcgaaaaccttgaccttgatacgctttacgaagtccctcttgcacttgaagaagaaggacttgcaaaggttgtatgtaaccgtcttggacttgaggacagaaagccacagcttgacgattggacaaagatggttgacgtcgttaaagaccttatgaacggcggcaaggaagaagttacaatttcacttgtaggtaaatatgtatcattgcacgatgcatatatcagtatcgttgaatcgctaaagcacggcggaatacagaattactcaaacgttaatatcaagtggataaacagtgaagaagttactgcaaagactgtggataaacttcttaaagattctgacggtattcttgtaccgggcggttttggtgacagaggtattgagggtaagattattgccgctcaatatgcaagagaacacaaaattccgtatcttggaatttgtcttggtatgcagattgcggttatagaatacgcaagaaacgtacttggctacaaggacgcaaattcatcggaacttaaccctgacacaactcaccctgtaatcgatcttatgcctgaacaacgtgacgttgaagatttgggcggtacaatgcgtctgggattgtatccatgtaaggttacaccgaacacacttgcacaaaaggtttataacagtgatcttatttatgaaagacatcgtcacagatatgaatttaataacttctacagaaatgaaataacagacaagggaatggttatttcaggtcagtcacctgacgataaacttgttgaaatggtagaaattcctgatcacccatggtatatcggtgttcagttccaccctgaattcaagtcaagacctaaccgtccgcacccattgtttgcctcatttatcaaggcggcattggacaagaagaataaggcggctgaataattggattgcctgcttgacagaaaggtaagattaacttgaaatattattggaagtatataaaaccgtatatgttgtttttcatattaggtcctttgcttatgcttacggaagttgcgggggaaatcgtgttgcctaaaattatggcgtcaatgattgacagcggtatcggtgcggaagtcgcaggacttggaacgggatatattttgtcgcgggcgttgtttatgattgcgtgtatcggtattatgataatcggcggtatcggcggtcatttctttgcgattagggcgtcggtttatttcagtgcggatttaagacagggagtatttgaaaaggtacagaacttctcatttaagaatatagacaacttttcgacaggctcacttgttacgcgtctgacgaacgacattacgcaagtgcagaatatggttagaatgcttctgattatggcaatgcgttcgccgggtatgctgataggcggtattataatggcttgttcaattaataaagaacttgcgcttatattggcattcgttattccgatactggcggtattgataggattgctgttaaaaaccgcgtttccgcgatttggtgcaatgcagaaaaaacttgataatcttaattcgggtatacaagagaatataacgaatgttcgagttataaaatcttttgtacgacaggattttgaaacagaaaaatttgaaaatgccaactcagaccttatgaatactacaatgagagccttgaaaatcgttataacgacaatgccgattatgatgttggcaatgaatataacaacattgcttgtggtatggttcggcggtaattttgttgtaggcggaagtatgggcgttggcgaccttactgcgtttacaacatatattacgcaaattcttatgtcacttatgatggtttcaatgcttttcttacagctttcgcgtgcgcttgcgtcatcgacaagaattacggaagtgcttaaaacagatgtagaccttacagatgaaaatgcgggtcaaaaggataagaaagttgaaaacggcagagttgaatttaaaaatgtttctttcaagtattacgaaaaacgtaaagaaaacgtacttgaaaatatttcgtttaccgcagagccgggagaaattgtcggtataatcggcacaacaggctcgggtaaatcgtcgcttgtacagcttataccgcgtctttatgacgttacagacggtgaagtgcttgttgacggtgtgaacgttaaggattacggtcttaaaaatttgcgtgacggcgtcggtatggtacttcagaaaaatgtattgttcagcggaagtatcgaagaaaatcttcgttggggtgacgaaaatgccacaatggaagaaattcgtgccgctgcggacgccgcacaggctgacggatttgtaaacgcatttacggacggctataatatggagctcggacagggcggtgtcaatgtttcaggcggacaaaagcagagattgtgtatcgcaagagcacttttgaaaaagccgaaaattcttatacttgacgacagtacaagtgccgttgacacagccacagaggctaaaatcagacaagcgtttacaacgagtttgaaacactcgactaaaataataatagcacagagaattacatccgtaatagatgcggataaaataattgtgcttgaggacggaaagattatcggtatgggaaatcacaatgagcttatgaagaattgtgaagaatatcgcgatatttactattctcaaacagataaagaaaaagaagtttcttaatatttgtacatcttatcagcccacgataagaaatgtattgactatgtgggcagaaaggctatggaagtaaaatgcctccaatgggaccaccgaacagaaacagaaatcagaaaaaacagaaacctaaaaatacaaaggcgactgcaaaaagactgttttcgtatttggaacaggaaaagcataaaattgcggcggcatttgtgtgtgttttggtaagttctgcgtcaacattgtgcggctcgtatcttttaagaccgattattaacggacttatagattcgaccaaaacatctcagcagaaaatcacttcgcttatggcaggacttgcacttatggcagtggtttatgtactcggtgtcggtgcaacatatttgcagggacgtattatgatcagcgtttcacagggtactctgaaacgtatcagaaagcatttgtttcgtaaggtgcagaaacttcctgtcagatattttgacacaaaccctacgggtgatataatgagccgttttactaatgacgttgatattatcggcgaaatgcttaattcgactcttgtacagattttctcgggtacgataactttaatcggtacacttgcacttatgctttacacaaactgggtgcttgcggttgtgacgatcgtggtatcaccgattattgcaaaaatcggaactgccatagccggtaaatcgcgaaaatattttatgaaacaacaaaccgacttgggtaaagtaaacggttatatcgaagaaaccgttacaggtcaaaaggttgttaaggtatttaattatgaagaaaatgtcgtaaatgaattttccgagcttaatcaaagtcttagaaattcacaggttaaggcacagtttataagcggaattatggggccttgtatgaacgcaatgagccaggtcaactacacattgacagcttgtgttggctcgataatcgctttcgcgtcacgttggggcggaggtgttccgttttccgcacttgacataggcggtcttactgttttcgtaaactattcaagacagttttcaagacctataaacgaacttgcacagcaggttacaaatattatgtcggcacttgccggtgcggaacgtgtatttaacgtaatggacgagacggaagaaatagatgacggtaaaaaacttgtacttgataaagtacacggtgacgtcttggttgagggtgtgacattcggatataatcccgataaaacaattttgaaagatgtttctgttttcgcccatccgggacagaaaatagcacttgtcggatcaacaggtgcgggtaaaacgacaataaccaacttgattacacgtttttataatattaataaaggaaaaatcactattgacggtgttgacattaaggatataagccttgaatgtttaagagaaaacatcgcgatggttttacaagatacacatttgtttacaggcacaattatggaaaatatccgttacggcagactttcggctaccgatgaagaagttcgacaggcggcgaaaacttcttgtgcggatatgttcataaaaaatatgcctgaaggctatgatacaatgctaaagggggacggttcaaacctttcacaaggtcagcgtcagcttttgaatattgcgcgagccgctttgtcaaaagcaccgatacttgtgcttgacgaggcgacaagctccgtcgatacaagaacggaaaaacatatcaatgagggtatggacgctcttatggaggacagaaccacgtttgttatagcacacagactgtctacaattcgtaatgcggacgcgattatggtacttgaaaacggtgagattatcgaaagaggtactcacgaagaattgcttgaaaagaaaggcagatattttgaattgtatacgggactcaaagaacttgattaatttatgctatatggcatagaaaggaatggtcagataaaatgaaggtatatcagttaatctatacctctgtacagcatagcctgtccgatcccgaacttggacttgtcaatcagtcggggctgagagtgttttcatgcacacagggacttacaaagcaaaatattgatgaaacaataagatttgctacttacagacttccgaaaaacaatgaaattaaatatacacagacaccttgcgatccgacagtgcctgaactgtttccgaaaattttcagaacgttcagactttcagatggaagatatgttgcaatgcagatttcttatgccggttatgattttgacggtcaaccgggcaatgtgtttgctcatgcatttatatttgatgatgttgacgaaaactttttgccggaaagatatatcggacataagcgttacagaacgcatcttaccgaaaaggatttaaacggtcagattgttcattatttgaaaccgcttgataatatcgcaccgtctgaaggtgtcgaaaataaggttatcaactttatcggcgaacataagtatgaattgacttatgttttagacagagcgacaagacttctgacttcagatgatattaaaaatatatgtatcgcggcaaatgacgcggaaacggtgcagatgtatttgcttgcattaaagtggattttaccaatcagtctttccgaaaacacaggtatttcaacgtataacgtgtacttaccgtcggataaacaaaaacagattgtgttccacggaactataaaacagcataataacataacaggtcaagccattgaggcgagaaaaaattgtatctatattgatatagaaaatacaaaatttccgcatagtgcaaagtcaatgctgttgggatttgacattgatgaacttcgtgaaatatacagaaagtatcatttcacgtcaatgacacagctgcttgactggcaggcaacttgggaaaatacaaccaaaacaggtataggcggaaaacttattaagctaaaaaaatcggcaggtgataatgctttcaaaacacgtgtgcttgaactttatccggctataaacgaccttaatatgaaaaacgtaaaatttgaactttcaaagattatgtttgacaatattgaattgttcccgaatgaaaaagaacgcgtgacggaaatttatatgggtcaatgtatcgaaaaactttgcaaaggcgagaatgttgattttgtaaatcctttgggcaatggcgaaaatgcaaaagaacaggcaaatgcgataagagcaaagctttcgatttatatgaattttgttcgtgaaaatatggacgatatttcagataagaataaaaccgaactgcttggactgttcggaagtataaagcatatggcagaggttgatacctggaaatcgttgtttacaaataaagaagatttaaaattattcgtgcttttggcatcgcagattgtcataacaggtacgggacttaacgcctttacgcaggtaaagggttgggaaaagtccgatttggcagaattggttgcatattttgaatcttcgacaaaagatccgttcttaaagaaaagctgtataaagtatatatacaacaataacttggattggtctaagtacggtatttcaaaaacacttcatgcgaaaacaaaaggcgaaagagaacaggatttgcagaaaatcagacgtatgctttcaaaggtcggatatataccgtatcagcgtgcgacatatacgagcttgaaacctgaagttacggacgatataagaaataataattcaccgcttttgatttcaagactgctttatgcggtttatcgttggcagggaacttacggcaatcagatgaaagccgaaaagtgtgcaaacagagtcagaaaactgcttttggaaatgagaaaaacgcagacttcgtgctttaattttatgattcctaaattggcacttgaaataatcgagtcaccgggacattatcacgaagttatgattaatacggaaacaatgcctccgagcttttggaattggttcttaatcggctataacaagagcaaggaagacgaggataaaatgcttgcgtatacgagagtgtacagtgcaagtaaagcgaaaatgtcgagaattccggcaaagaaaaaaatgcgtgaaacttttaaagacgtagttgaataggagagattatgatgaatataaaaaagaaaattatggtaatatttgcaaccggtattatggcattttcagcatcaccattcgtattggcggcaactccggcacctgcaaacaacactcaacaggcagaacaagttgacacaaccaagcaagatacggctaatcaaaataacacagccaatcaaaatacacaggcacaaattccggcagcaggaaatgtacaaactcaaacggacaattcaacacaagtttcaaataagaaatacttgtcaaagggatgggctgtattttggtttatattcactattataatcaatgcaattatcagcttttggattggaaacagattttataaactttcaaagaaagataatcacctttcatttgaaatcagagcattgagaaaagatattgaggaaaaattcgtaaacaacgtaggcggtttttcagaacaagaagttgatattaagaatctaaacgaaagtcttgcacttgatgatgaaggtttaaagccgactgcaaaacagcctgcacttaatgaagtcagtgcggaagaagaagcacgtttcagaagatgggaagaggcacagtctaaaccgagaaatgaaagagtaaagcctaagtcagtattaaaagaagaatttgacgaagaacttgatgacgttaagaaaataaagagaaagaattatcagcctaaacgtaatccgagcgaagattttgagggcgagaaagaaaacgaaaagtctgaaaaagtcgatatggacgctacaagggaaatcaagctaaagggcgagggtgtaaaatcaaaagccaaagaacttttgggtgatatattcccgtttaaagaggactaaaattaagtaggcaagccgtggcttgtttattgttaaaaagactgtcgtaggacagtcttttttgaaaagaaaggtactgttatggatttaaaagatgttcagccatatatagaggacaaagtctgtatggttaccggcggcggaggttcaatcggcagtgaaatagtgcgttcactgtcaaaactcaatgcagaaaaaatcgtaattgtcgatatatacgaaaacggtgcgtacagtgtaaaatgtgaagtcggcgacaaggtggcggttgaaattgcgtctgttcgcgattatgagaaaatggactgcattatgaataaatatcgtcccgatattgtatttcacgcggcggcacataagcacgttccttttatggagcttagtcccgaggaggctgttaaaaacaatgtaaagggtacagaaacggttgccgatttagccgaaaaatataatgcggacaattttgtgctaatttcgactgataaagcggttgagccgataagcgtgatgggtgcaagtaagcgttgttgtgaaatgtatgtgtatgaaaagtcgctgaaatcaaaacacactaagttttcgacggtgcgtttcggaaatgttttaaattccaacggttctgttattccgttgtttaaaaaacaaatcgaaaatggagttgtgacggtgacggataaggacgttacacgattttttatgacgataccgcaggcggttgagcttgttcttatgtcaattacgattgcgaatggcggcgaaatttttgtgtttgatatgggcggagcggtgagaatacttgacgttgcggaaaaagttataaaagacggtggaaaagtgccgtacaaagatgtaaaaattgagtttacaggtctgagaaaaggggataaacttcacgaaaaactgttttttgactttgaacaaccgcaaaaaacacgctatgaaaaaatattgcgtgtaaacggcagcagtatagaaaattttgcggaaatgcttgataagctgtacgaaaaagcctataaaaacgacagtgacggagttcgtgaaattataatgaaaatgacaaacagttaagggggaagagttatgaaaaaattgctttgtattataggtatcatatttgcgacaatgatgtcaacaacggcatttgccgaaatgttttcttttcagagcgttttgggagtgaatgatatatccgatattcaaagcgcggttatagtgggagataacggaaaatgtgcggatattgaacaggaagatttagaacagtggcttaatgtgtattggaattttcagggctatgagcctgtgattttaccgcagtcgaataacggctattattatattaagctatggaacaaggataaaacaaaatcttatgttgtgaatgcaaattcgggtatattagtaggaagatacggtgaaccgagcaaatctcacggagaggttaaggaaaattatttgtggtattttccgtatataggaaatgcaagaaatgcgttatatacggaaaattcaatattgcaaaccaaatatttatatgaaggatataacttgcgtgatgttacatctgatgatgtggcggttgtgcctgaagacaatatattttcatcagacggtgcgagcgattgggcgaaagaagaaatgcaaaaggcagcggcttgtaatttactgccgatagattttacaaatgaatatacaagaagtataacaagaaaagaattttgtgatttgatttatcgtcttaccgcaacggaatttaatccgattgccgactcaagaaaaggtcaacaggacgcaataaagcaggttatcgcagaaagacagcttgaagataaaatcagcgaagtttcatattccgattgtgattatgaaaaaattaaatttttgtcgggtgcagggataatttacggtatggacgacggaacttttgcacccgatgataatattacccgtgaacaggcggcggctattctttacagaacggctggatttttgggaaacaagacgattgtcgagccgaatggtacgacatttgatgatggaaaattaatttctgattgggcgagagagtctgtttcgattatgaattcaatgaagattatggaaggagtttctgatactgaatttgctccgaaaggcaactacaccgttgaacaggctattgcaacaatggtaagactttataattgttattaaaaacgatgttgcaaaaatgaaagaattgttgtaaaatacattaataactatgtaatttgggagagggtttaattggatatacatgaggcattgcaaaccgccggacagtatatttatataggttttcgtgcattgcttgaggggctgcaaaagctgttcggaatgttggcagattggtttcaaagtctgccatggccgaatgcgataaagcttttcagcaatgatacggctaataaatatttgtttttcggtattgcaatatacttgcttttgatgaatatatgggcattcgcactgttcggtgcggataaatcaaatgcaaagagaaaacagagaagaataaaagaaagtaaattgatgaaagtatgctttttcggcggtgcgacaggcggtattatcggtatgaatgtgttccgtcacaagacgctgaaaaagaaattttcggtcggtataccgattttgttcgtattacagcttattttaaacagtttcatactcggatttttgggattttggacgtttttctaaaaggactggaattttcaaagaaagtgtgatataataaaataagaatttgtcggaaaggaagatacggcagtggaattgaaagatattttatcgacagacgataaattgagaattatacaggaacttgtaccgggtaaacaaattacccttgcacacgttattgcaagtcctgaccctattttatatacgaaacttggacttaatcccgaaattgacttcggaagaagtgcaatcggaatacttacaatgagtcctgcggaaacggctattatagcggcagacttggctacaaaaacatcaaatgttgatttaagctttgttgaccgtttcagcggtacgcttataattacgggtatggttgcggacgttgaaacgtcacttcgtgcaattatggattatgccgaaagaactcttaaatttactgtttgcgagataacaaaaacatgaagaagataatacttatcggtagaagtgagtgcggtaaaaccacgcttacacaggcacttaaaggtgaaaaaatacattatcataagacgcagtatgtcaacagatttgatgttataatcgatacgcctggtgagtacatacaaaccaaaaacttgggaaatgcgattgcaatgtatacttttgaagcggacgttgtgggacttttgatgagttcaagagagccgtactcattgtatccgccatgcgtaacaccgctttgtaacagacctgttatcggaatagttacacagataaacagtgacggtgctgatcccgacagagcggaaagctggttaagacttgccggttgtgaaacgattttcagagttgattcaaaaacgggcgagggcgtttggaaaataattgattatttgcgtgaggacggcgatgtattgccgtgggacgaagaagaaaaaacaagcagatagacgaaaatgtctatctgttttttcttgcacaaaattttgcaatttgcatatgatatagcataatatcgaatgggaggcagaggatatgtgcggaatatgcggatttataaattttaagacaaaccttgtcaagaacgaacgagaaaatcttgctgttgctcaccgtatggcagaaaaactgcgtcacagaggtccggactcttggggagaatgggttggcgaacacgcagtgtttgctcatagccgtttggcggttatagacgttgaaaatggacttcagccgatgaaacgtacagtcgagggacacgaatttgtgattacatataacggtgaactttataacacgaacgacataagaaacgatttgaaatctcacggatacgaatttaccactgcatcggatactgaggtgctattgtatgcctacatacattacggcgaaaaatgtgccgaaatgctgaacggcatatatgcgtttgttatctgggattctatgcgacaaagaatttttgcttgtcgtgacagattcggcgtaaaaccgtttttctatacacagaaaaatgatgtgacggtgtttgcgtccgaactgaaatcactgtttgaatatccggacgtatcggcagtgcttgataaaacgggactttgtgaactgtttgcgctaagtcccgcaagaacacagggtgtcggtgtgttcaaagatgtaagagaacttcgaccggcaagatatatgataatcaaccgtcacggaatgacaataaagaaatattggtcgcttgtgagcggtgagcataaagacagttacgaggaaacgatagaaaaggtgcgttcgcttgtgtatgattcggtgaaaagacagcttatttcagatgtgcctattgcaacatttctgtcgggcggacttgattcgagtattataaccgcaatcggtgctatggaaatgaagaaaaaaggcgaaagaatttcaacgtattcgtttgattacgaggataataataagtatttcaaagcgtcgcattttcagccggacagtgatacgaaatgggtgccgagaatggtggaggcatttgatacaaaccatacatatcttgtttgcccgaataacgtgcttacggagcttttggaggaggcacttttggcgaaagatttaccgggtatggcagacgtagacgcgtcactgctgtatttctgtcgtgaggtgaagaaaaatcatacagttgtgctttccggcgaatgttcggacgaaatattcggcggttatccatggtttagggagaagaaagcgtttgaaacacacggtttcccatggtgctatgatttgtcgataagaaataatattttgcttgacagtgttcgtgaaactttggatatagacaattattcgcgtatgcgatatgaagaaagtattgcggaagtgccgatttttgacggcgataatgatgaggaaaaacgcagacgtgaaatttcgtatctgaatataaattggtttatgacgaatttgcttgacagaaaggacagaatgagtatggcaagcggactggaagtgcgtgtgccgttctgcgaccacagacttgtcgagtacgtttggaatataccttgggaaatgaaaaatcgtgacaatgtttctaaaaatgtattgcgtgaagcggcaaagggaatcttgcctgaagatgtacgtctaagacgtaaaagtccgtatccgaaaacgcataatccgcattatgaggaggcggttaagacgttgcttgacggtattatatccgatccgaacgcacctattttggcgctttgcgataaaacaaaattaacgtcacttttggacggcggttcgtcggattacggtaagccgtttttcggtcagcttatggcaggaccgcagtttataggatatattgtgcagatgaattatttgcttagagattataaagtgagaatactgtaa

SEQ ID NO: 682 - DNA, 22023 bp, unidentified
  source 1..22023: mol_type = unassigned DNA
tgcaatgtcaagagttgctgacagagagggctatcctgaaatcgcagaagctttcaagagatatgcttttgaagaagcagaacacgcagcaaagtttgcagagcttctcggtgaagttgtaacagacagcacaaagaaaaaccttgaaatgcgtgtagacgctgaggctggtgcttgtgcaggaaaatttgagcttgctaagcttgctaaggctcaaaaccttgatgctatccacgatacagttcacgagatggctaaggacgaggcaagacacggtgcaggttttgcaggacttctcaagagatatttcggcgaataatttaatattaaactaatttgggttggcacatattgtgtcaacccattttttatgactttaaaacattaaaaatttacaattttgttactttcactcattttaatgaaacttgttaaaatatattgacgtattctaacaagtgtgatattataaatttatacaaatgtaaacttatatagaaaggaaaaaaccaatgatataatatatttttataggcttgactatggtaatgctttatctaatgagaaagtagttatttttagaacttgtaatgcaggagagaggaacttctgcaaaaaatatggtgattattggaaaaaaattttatcatttgggctttgatggaggcactggaaattgtttgttgaggggtggaggaggtttgacattataatgattgtaaaaaatataaaaaagatttgtgctgttattataatattgatatttatatcagttagtacgtttttaattgatagctgtttagctgaagataataaatctccaatattttcttttccatatgcacatataaatgatggtggctcggtttgctatttgggattgggctatcaaattatcaaatggaaaacttattctgaagatttgaagttttataatgttggtgttgaaaaacactatatttttggaataaatttatatccagaaaatcctaatattccattgttgaaagaaaaaatataaggaggcatttatatgagtaaaaaagtaattgcaattttgctaatgtctgctttagtactttctcttgcttgtggctgtaaaaacaatgatacggaaagcacaagcagtacagcttctaaaactgagagttctgtaagctcaagcacagaaagtagtaaacagagtgaatcaaaaacagagagcagtaagcaaagcgaatcaagcacagataaagattacgaagaaatgatgagctatgtaaataagctttcaccggaacttacaggtaatcaagttattgacatcttaggagcaccagatgcttattctggttctggaattcagtatacatattggtatttcggtaagcatcatatattgatggaagatcttaattaccgtattactatatatgatgatagaaccggtaaaagtacagaaatatataccaaaaaaagagctttgagcagtcagcagactgaatcagagacagtaagtagcgagtaaaacgaaaaaggtcggtacatagtgtgctgaccttttttaaatgactttaaaatattaaaagttcacataattgttataattgcttaattattgtaatactgttataaaattattgacttaattaaacaaaaatgatattataaaaatatacagaagtataatagttgaaatgagggatttccaatggtttgtaattttttaataaaatatagaatataaggaggaatttatatgagtaaaagggtaatggcaattttgctaatgtctgcactagcattttcacttgcttgtggctgtaaaaacaatgatacggaaagtacaagcagtacagcttctaaaacggagagttctttaagctcaaataaagaaagtagtaagcaaaatgactcaaaaacagagagcagtaagcaaagcgaatcaagcacagataaagattacgaagaaatgatgagttatgtaaataaactttctcctgagcttacagatgaacaagtacatgaaattatgggaaaacctgatgaagaatttggctccggaataaactatgaagtatataaatttggaagatatactgtgaaaataataaattttaattcttgtgttattatatgtgatagcgaaactggtgaaactactaaaatatattaaataaatgaacgaaaatatataatataacaatctaaataaattacaagctataaattatgtgaaaactgccaaaaacaaaaaaagctattgactttttaagaccactggtatatactaacacttgtaaacagcaatggcgctgtagaacgacaaaaggttctacagcgtcattttttattcagaaaaaacttacaaaggataggtgttgagtaatgtcaagtgtacctgagatgtttggaagtcttgttttcaacgactctactatgaaagaaagattgcctaaagatatttataaggcattcaaaaagactattgatgagggaaaacctcttgatttgactatcgcaaatgcagttgctaatgctatgaaggattgggcagtagaaaagggtgcaacccattacacacactggttccagcctatgactggcattactgctgaaaagcatgatagctttatctctcctgttggcgataaggttattatggaattctctggcaaggaacttatcaagggcgagcctgacgcatcaagcttcccatcaggcggtatccgtgctacttttgaggcaagaggatatacagcttgggaccctacttcatatgcgtttattaaagacggttcactttgcattccaacagctttttgctcatatactggtgaagttcttgataagaaaacaccacttctccgttctatggaggctatcaatacacaggctcttagaattcttagacttttcggcaacacagaggctaagagagttattacaacagttggtcctgagcaggaatacttccttattgataaggaaatgtataagaagcgtaaagaccttatctactgcggaagaacacttttcggtgcaagacctcctaagggtcaggagcttgaagaccattacttcggcgtaattaagccaagagtttccgcttatatgaaggaacttgatgaagagctttggaagcttggcattcttgctaaaacaaagcataacgaagttgctcctgcacagcacgagcttgctcctatttttactacatcaaatgttgcaactgaccacaatcagcttacaatggagatgatgaagaaggttgctgaccgtcatggtcttgtttgcttgctccacgagaagccattcgcaggcgtaaacggaagtggtaagcacaataactggtcaatgtccacagacctcggagagaacctcctcgagccaggcaagaagccaagcgaaaacaagcagttccttctcttccttgcagctgttatcaagggtgttgatgaatatcaggacctcctcagaatttctgttgcaagtgcaggcaatgatcaccgtcttggtgctaacgaggctcctcctgctattatttctatcttcctcggtgatgaactcaaggatattcttgatgctatcgaaacaggtacagaataccatgcacagggtagagctattatggacactaaggttgctgttctccctaacttctataaggatacaacagaccgtaacagaacttcaccattcgcatttacaggcaataagtttgaattcagaatggctggttcagctgaaaacatcggctgccctaacgaaatgcttaacacaatcgtagcagaagaacttgagcagttcgcagatgttctcgagaaggcagacgattttgataaggctgttattgatgttatcagaaagacatatcaagagcataagagaatcgtattcaacggcgataactactccgatgagtggcttgaagaggcagaaagaagaggtctttataacctcagatctatgccagaggctatgcctcattatgttgctgagaagaacctcaagctcttcaagaagcacggaatctttactgaggcagaggttcgtgcaagatatgagattcagctcgagaactactctaagattatcaacattgaagctcttacaacacttgatatggctaagaaggacattgttcctgctgttgttaagtatttgaagcttcttgctgattctgcaagtgtaatgaaatctattgacagcgatatttgcacttgtgcagaaacagagcttcttaaaaagctttctgcacttctcacagactttactaagaagattgatgttcttgataaggctgttgttggtgctaaggattacacagatgttcaggagcttgctaactactatagaaattctgtatttgcggcaatgcaggagcttagagcagtagctgatgagatggaatcaaatatgtctgctgaatactggccatatccatcatacggaaagttgcttttcagcgtctgatttagagctacatataaaagggataaaaggggtaactctatataaatgagatgataaaatgcggagttcttgctaccgcattttattatacaatattttgaaatttttaatatttaaaaattttaaaaatgagaggggaaatagattatgggcgaatattctgctgtaaataccatatgggtattagttggtgcggcacttgtttttttcatgcaggcaggcttcgcaatggtcgaaacaggtttcacaagggctaaaaatgctggtaacatcattatgaaaaacttgatggatttctgtatcggcacaccactttattggctggttggtttcggaataatgtttggaacatcttcagcatttttcggaaacattgacctctttgcggtagggggttacagcggtgcatatgatagtatacttcctgacggagttccgttatatgcatatatgattttccagacagttttctgtgcaacatcagcaacaatcgtttctggtgctatggcagaaagaactaagttcagtgcttattgcgtatattcagcaatcatcagcttgattatttatccgatttcaggacactggatttggggcggtggctggcttgcacagcttggcttccacgatttcgcaggttctacaacagttcatatggttggcggtgttgcagcacttgttggtgcaatcttcctcggacctcgtatcggtaagtatggcaaagacggcaagccaagagcaattccaggtcatagcttgacacttggtgctttgggtgtattcattctttggttctgctggttcggatttaatggtgcttcaactgtttctatgacaggtgatgacacaatcgcaaatgcaggtttgattttctatacaactaacctttgcacagcagtttctacactcacagttatgtttattacttgggttaagtataagaaacctgatgtttctatgacattgaatggttctcttgcaggacttgttgctattactgctggttgtgatacagttgagccttgggctgctgctgttatcggtgtaattgcaggtttcgtagtagtatttggtattgaatttattgataaggtttgcaagattgatgaccctgttggtgcagttggtgttcacggaatgtgcggctttgttggaacaatctgtgtaggtattttctctaatggctacggtacaaagggcaagggtcttatatatggtgaatttgaatgtttaggcattcaaacactcggtgctgtggtagttgcactttatgtagcaattgctatgacaatcgtattctttgtaatcaagcatacaatgggacttcgtgcttcaagagaagaagaaatcaagggtcttgatattacagagcatggcttggtaagctcttatgcagactttatgccaaatgtatcttctgttgctcttgatgatacagacgctgatgttggtgaagttcctgttaatgaggctgttcctgtacaggttgcatttactcctaaggaaaagaacacagtcacagcctctgatgttaagctttctaagattgatattgttctcaagcaatctaagtttgaagacctcaagaatgcacttaatgaaatcggtgtaacaggtatgacagtaactcaggttctcggctgtggcgtacagaagggtaaaactgaatactatcgtggtgttgaggttgagatgaaccttcttcctaaggttcaggttgaaatcgttgtttgcaaggttccggttaaggcagttattgatgcggcagtaaaggcactttatactggacatattggcgatggtaagattttcgtatatgatgttgaagatgttgttaaggtaagaactggtgaaacaggttgcgacgcacttcaaggtgaagacgatatttgattatcgcatttagggtacttacatatactttctgaataaatatgcggcaagcttgctcttgggttattactcaagggcaagcttcatttttgcagaaaattctgtaaaatatttttttaaaagacttgactttttattgatggtttgatataatatcattcgttgacaagagatgtcaaaaaagttgatatttgcgagtgtgctggaattggcagacaggcacgtttgaggggcgtgtgttttacgacgtacgggttcaagtcccgtcactcgcaccagattattacggtggttttaaaaaatcaccgtattttttgttatagtatgtatcagaattttcagatattaggcaaatgaagaagtatattccataggatttgaatgatgttaagtacttgattattaaagtaattttggaaatcctgttgtgtttatgggaactgaaaccaatcgtttgaaaatgctgtttatttttccaacaaaatgaggaagagaaattggtaaacaattgatacaatatgatattcggaattatgaaattcaagaggctgctatcaacgaaaagaatatataagaagttggattttataagcatttaggctttgaaatatataaactaactgattgtgataaggaaggaaaatcttaattaataaaaatttgtaaaattattttaaaaagttcttgacaattaaaatactttttgatataatactacttgttgaaaagacaaattgatatttgcgagtgtgctggaattggcagacaggcacgtttgaggggcgtgtgttttacgacgtacgggttcaagtcccgtcactcgcaccaaatttatgaagtccgttgcataagcaacgggctttttcgtcaataaatttttatttggagaaaacaaatatgaatcaatcagaaagacaactatatttaatagacgcacttcttggtgaacaacctatgggcaaaggtgcttttatacctcagggggaaactgagcgttggaattttcttcgttcgctttttaatatccgtatgcctaagagagcaagtgagaaatttattgaaattcagaacgaatttttgcaagaagaaatccgcaaaaagggtataactgatatttctgagcttgagcctataattgatgatatttacctatggaaaggtgacataacaactcttaaatgtggtgcaatcgtaaatgctgcaaattctgagctgcttggttgctttaatcctaatcatttatgtattgataatacaattcatacttatgcgggaatacagttaaggcttgaatgtaatgatattatgaaagctcaaggacacagtgaaccaataggaaaagcaaagattacatctgcttataatcttccaagtaaatatattattcatactgttggaccgatgatttttaataaggttatgaagaaggattgtgacgcacttgaaaactgttatcgttcttgcctatcgcttgctgatgaatatgatgtaaacagcattgcgttttgctgtatttctacaggtgaatttaaatttcctaataatatagccgcagagcttgcagtgagaagtgtaaaaagatataagcaagaaacaggcagtaggattaaagttatttttaatgtatttagggaaaatgataatcaaatttatagaaaattacttgaagaataaatggaggttaaggctatgaatgaaactataaaaaatatgattgagagaagaagcatcagaaaatatacctctgagccagttccacaagagattattgatgaaatagttgaggctggaacatatgccgcaacaggcagaaatgctcaatcgccaattattattgaggttactaacaaggaattaagagataggctttctgctcttaatgcaaagattatgggcaaagaggaaggctttgacccattttatggtgcaaatacagttttgattgttcttgcagataaatcaaaacctacgtatctttatgacggctctcttgttatgggaaatcttatgcttgctgcccattcgcttggaattggtagctgttggattcatagagcaaaagaagaatttgagatgccagagggtaaggaaattcttaaacagcttggcatagagggcgattatgagggcataggacactgcgttttaggctatactgatggcgatatgccaaagccacataaacgcaaggattcttatgtttataagataaaataagttataaaagacttcatatacacagtgtttttatggacaattccatattaaatactgtgtatttttatgttcaattttgccatttatgtattataaatttattgtaacttgacttttgtgtattgggtgattattatatattttataggagaattatttattgttattattttagcttaatagcctttacttttaggggaatttaatataaactttggctacttttgtgtcattttataatggcttttaaagtgatatttctatttctgtcgaggacagttttaatataattaaaattaaaacggaggtctaaagtttggatacaaaaaaaaagaaaatatctggaaaaacgatttttaatttcatagtttttgctttgtgtggctttatgattgtatacttctgcttttctaaaggtggtttggtagaacttataaactcatcacaacaaataaatattttttggcttatgcttgccataggtgcgcatttacttaatattgtaattgatgcagtgattttacatagatttttaaatctttcaactaatggtgttaagataactcatagcataaaggctgcattggcaggacaatttttctgtgccgttacacctagctctacgggtggtcagcctatgcagattatgattttatcacattatggtgttgatgccggaaaggcaacatctgcactcgttcaaaaatttctcgtatggcagtttacattgacaggatatacaatagctgtaatacttctgaaatttaatttctttgccgagcgtttaagtccgtttctttgggttatgtctgcgataggctttatcgttcaagcggctatgatatttatacttatattagtatcattttcacacaaaattacattcaggcttataaaatggttctgtaagataggaaacaagcttagatttattaaaaatcctgaaaagactcttgataagattgagcaacagcttgtatacttccacaagagtaataaagagctttctgaacacaaaggttttcttgctataaattatattcttacaataatacaaatgacagctatatatattgttccatattgtgtttatcgtgcattaagtcctgatagcactatcaatgttggagtttttgatattattagtgcccaatcatttgtaaatatggtttcaagccttgtgccacttcctggtgcatctggtgcggcagagcttagcttcgctggattctttagcggtatttttgatgaaactactatgaaatctgctattcttatctggagaactattacttattatggaacaatattcatttcggctccattctctggtatgggaaagaagaaagcaacagagcttgttactgaaatgcaggaagacattgaagaagttgaggaagaacttgagataggggaaaaaagtggtgaatgatttatgggtgatataaataagccagagataagcattattatacctatatataatgttgaaaaatatcttagtcgttgccttggttctgtcgaaaagcaaacctttaaggattttgaggttattatggttgatgatggctctactgatggcagtgcaggtattgcaaaggaatttgcaaaaagagatgaaagatttaaatttttctcaagagaaaatttaggtgcatctaaaacccgtaactttgctatggaacaagccactggagaatatatttcttttatagattctgatgattatgtttcttataattttcttgcagtgctttatttagctattaagcgtagtgatgcagatattgctatgtgtggatttaatattcattatgagcaaaacgctaagaataaatctgttaaaagccttaaggcaggagaatatagcagagatgaagctttgggatatttgcttaaagataatgagattcgtttctttatatggaataagctttggaaaacagatttgctgaagaataatgatattcaattcagggatatgtattatgaagatattcttttttgcacaaaggcttttgtcaaaataaataaacttgtagtagtagataagaaagcttattactattcaagaagaactaagacttttcttgaatcatctatgagcgataaaagaattaatgattatatctatacagtagaatttttgcgtaaatttcttgaggaaaacaatctttatgataaatataaggattgctttaaggttcatgcaaatcatgtctattggtctttacctattttgaatattcaagcaagtcatagctcaaagaaaaaaggttgtataaagagaattattgatggcagaaaacaagtcaaaaagtataagccataaataaattttatataaatcaggcaggaggtattataatgcaggaaactaaaaatcccgaaatcagtataataattcctgtctataatgtagagccttatataagaagatgccttgattctattaaggctcagacttttactgactttgaagccattattgttgatgactcatcgcctgatggaagtattaaaattgctatggaatttgttgcgagtgattcaagatttaagatagttactcgtgaaaatggcggtcttagtgcggcaagaaacactgggatagaacattcagtaggcagatatatagcttttattgatagcgatgattttattgctccaacttatcttgaaaagctttataatgcttgtgaggaaaataatgctgatatgtcatactgtggctttacttattatattgataagaacggtatgaaaaaaaatcagatgtttattgttaaagattgtgttatggaacataatgaggctgtggcaagaattataagtgaccacggacttcatagctatgcttggaacaagctatataaacgcacaatttttactgaacataagattacatatcctactatgtattttgaggatgttgctacaagcccgaaaacagttttttatgcaaataagcttgctgttgttggggaatgtctttatttctatgttaagcgtcagggcagtattcttagcacaatgaatgttaagaaaataaatgacttgctttattcggttatgattataagcaactttttgagaagaaatggcgaatatgcttcttttgaaactgaaattaggcgaataattacaaagtttaaacttgttaatatctattcaattataagacagcatattttggctttttcatttaaaggtatgcacagcaatcttaagacaaactttaaaatggcaagatatattttagattgcgaatggacaccaacagaaggcttaccagaattgccttatgctgttaaagcaccaattaaaaaagataaaaaataatattctgaggggcgaattattttcgctccttttattatttgtgtccatataggcaagcatagtttgccctacgcttagttaataaacttccataagataattaaaagtttcgctcaagcctttttaaaggcttgcagggtcgagggacgaagtccctcgtgggtgttaagggcaaagcccttaacacctcttgccaaaagggcggacagagtccgctcaaatcggtagtttattggtaacttcttaattattagcaataaactgcttaagcctaaaaatatattattttagtttttatcggaatttagaataatttcgaaaaaaataaaaaaacttttgaaaaaagcttgacatttaaaagcttatatggtattataattctcgcagtcacaacagtggcgaagataaatggagaggtgtccgagtggtttaaggagctagtcttgaaaactagtgatcccgaaagggaccaagggttcgaatcccttcctctccgccaatttttattattttatttgttttatttaccattggaggattacccaagtggtgaaggggctcccctgctaagggagtaggtcgggaaaccggcgcgagggttcaaatcccttgtcctccgccataagtccaccgtaattttgatagaattgcggtggactttttctatgcctaaaaaccgcatgaaatcaaggttttcaccattccagagcataaacgaaccccgttgcagagcaattctgcgacggggttttgagctttacatgggttttgtggctttctgctctgccataatcgttaaactggggatatttgtttaatcagttaagtttctattattggtacctttgaggattgtcttgctgtttcgctgtgggacgccacccttccagttctttgtccagaccgatacggagaactttgtaaggggcgaggaagtcgtcgataccttgtttcagactgtatgtataaatgtgttcgccgaagtaagaaatattggatacctcttacttcggcgtagtagccacttcaccaacgagcgaaacgctgcatcaggctgtgagaattcttctcggcttctgaaaattcgtagtcgatttggtcaatcagtcacaccgcagtttcgtcccatggggtataactccaagcacagctttcgggaatacagtggaacaatcagcgtttcctgtacggtgtttttctcaatcttgtgtttcatttcaacgaatgaatatcataatgttttctataatcttatcccagcgacacatcaagcatcatcatcacactgaagccgactgcaaagaaaaccgttcctatgttggaatgctttccctgcgacatttcgggaattagctcctctaccacaacatagagcattgcacccgcggcaaagctcaaaagatacggtagtgccggaatcacgagctgtgccgcaaggagtgtcagtactgcgccgataggctcaactattcccgaaaggacgccgccgagaaatgctctgcctttactttcgccctcggctcggagaggcatggatattatagcaccctcgggaaaattctgaatggcaatgcctattgataaggcgagtgcactcgtcgccgtaatttgcgtatttcccgcaagaaagcccgcatacatcacacccaccgccattccttcgggaatgttatgcagtgtcaccgccaacaccatcatagtggtgcgaccgagcttgcttttcggtccttctgcctggtcactccctatgtgaagatgtggaatcagtcggtcaagcataagcaaaaacagcacaccgaaccaaaatccgataaaggcggggaggaaggacagcttgcccatatttttcgcttgctctatcgctggaatcagtaggctccaaatagatgccgcaaccataactcctgcggcaaagcccgcgagtgcacgctgcaccgaaacaccaagtgactttttcataaagaaaacacacgccgagccgagcgtcgttccgagaaagggaatcaatattccgaataatatttccatttgcttcaccgcctttgagttgcgtttttatttgtgtcttccgaatcccgcctggtcacagtattcggaatgcttctttaagtatgagtctttatcaccacagataatatagtcgcatttgcagtcgtccacgcagttgaacgtccgtatcagacttgtgttgagtagctcctccgctgccagttatgccgtaaattcataatagatgggcttatctttattgtaaggtgcaactatcatctcataatgtgccatttgttacagccacatttcgcccgaacaaacgctttgtacatcagctttctccagaacggcttgttgcagtcaacaaaccgtagcttgcggaaggtcggcagaatcagattttttctccattactatgagacatgaaaagccgttcaccgtgactgtttcataatacaccttgtagtcggtagacataaatatgccacgatggaggttttgcttttcgatttcctttcgcagcacgtcctacgacaaggcgaatttctttttcatgatagagagcttgtatatgcaaaaatgctcaagctttatttcctcattttcgtgctgtgacgcacagccagcccgctttattcttgtgtatctgaatatcttgaaatctggcctgttccaaatatacatttaattcagtgtccttatagatggtcataccgtctattatatctgtccacttttcgtccttgcttgtgtcgccgttgctttcgttgcagatgagaaaggttccaccaggtttcagcactcgccaaacctccctaaagcactgtgataagttgggccagaaatagattgtttcaaaggccgtgaccacatcgaactgccccgattcaaacggcaactctgatacgcttgcacacaatacggtgcagcgtccttttgtaatggcagatttgttgactttctttgatttttctacgctgacggttgaatagtcgatgccttttacaataccctgcgggcattttttcagcattcttttaatgtttgctccgccaccgcagccacaatccaacaccttgtcgtccggagtaagtttcaaaaagcgaagtccccacctcgccacggcactatgtccaatgttcatcatagcaaccataatttttccgccaaacccctcaggcttgcgagtgttttcaaaaaatgacattttatcatacctccgattttgcacattcggtataagttaatgggaatgatgctttcaggatggtgcttttcagcaccgtccaagcattctgccacaggaagttcagatattccttgtagagatggaagcctgtaagcctcctgaaaaatgccctaaccttgcctaaaaacgaatttttagagtaggtgagggttggcacaattaacacactttcgtccttcggtaccagttcagtgttcgttgcaaacttagctactgtcttagctttcacaatcagtcgaataagcttgtacatctttttatatgcctcctaatcctttcgcatgaggtagttgtataaactggtccccagagttcttgtatgctaacattgctatcattcctttttcgatagatttgtctaattgatacatataaaacacaaagttagatttaactaacttatgcatctttgaaaagccacatctctgtggcgttttggcttattcaaataattccctgcaagtgccgtgcaatagagtttctggcacttgtgggtacagctctcctaattgctccttgtgcgagactgtgaaaattggtatatgtaaagtcgtagcaacgattgaagtccctcgttttgggacaaggtcatatttctccgaaggctgatgaatgtatgttacgtttctttcagtagtgccttgcggagctgttctgtttcgtattcggtaaggtaaaagccaagattgaatctttcaaaaatatgaccgtttcggttcttttagtcatattatatcatgctactttttattttgcaagaggtgcaagaaaaaaacatactcattttaacagaaaaatcggctcggtttaacgcaatgcttcatgataatactgcacccactaaatggagaattgcccctctattaaatagtttctgttaaaattagggttatttaccagagttccatcgtgatttagaattacggtggaatttttgttggctcaatggtcaatatagttgtggtagaaaaagagcttacagacaaaaagtagagcatattttaccaaaatccgttaaaatagaattgcttagaaagttgaaacggaggacaaaatatgctctacaagtattttgtcagcgatatgtggaaaccatttgcaaacattggctcggtattgttcttggtattgtttgagaacgctgaacaaattgttgataaataccactggacacaccagcttttctggacttttgaaggcgtcagaaaagaagaatgaaaagttcagcaaatcacattgcaaatactttaaaatttcaagaaaattacttcttaagagatttgacgaattgactgatgagtaaaaacagcttggattaactcggcatttgattgtggtattcttcagcttgttaagtatgcaaaaacaatgcagaattagttgacaagaatattgagttagttttctataccaatcaccaacagcaaaatcaaggttctcaaaagaaatgcttaaggctatagaaatttcaagcgatttcgcaatcacattttacatatgttttccaacaaacatatatattctacaataaaacaagcgacagtttaattctctgccgcttgtaagtacactttattctatttttcgggttaccccaactattgatattgagccaaaataattttagtttttcatatggttgaatgttggaacaatttcagcaattagcttatctatgccgtccttatcatttttgagggctaccttttttagctcaataagtttttcatgaaatttttctgtatcaagctctattggcttgccaatgaagatttttttgtttgcagtctttttcataccctcttcattaagaaggatttcttcatatagtttttcgcctggtcgcagaccagtaaactcaatcggaatatcttcatatggcttaaagcccgagaggcgaattagattttctgcaagggtcaaaatcttaacaggctctcccatatcaagtatgaatatttctccgcctttagcaagtcctcctgcggttaagacaagagaaacagcctctggaatagtcataaagaaacgaataatatcagggtgagtaactgtaacaggaccaccttcccgaatttgttccttgaaaagtggaataacagaaccattagagccaaggacattaccaaaacgaacagcaacaaatttagtttcactttgcttatccatagtttgaactatcatttcacagatacgctttgtagcacccataatatttgtagggtttacggccttatctgttgaaatctgaacaaattttttgacatggtatttatccgcaagcaataccagatttaatgttccgaaaacattattttttactgcttcttctggagttgtttccataagaggaacatgcttatgtgctgcagcatggaaaataacatcaattttattttgactgaaaaggtagtcgagcttgcgtttatcacgaacagaagctatttgtgtatcaagatttaacttttcgtgatattgacgaataagttcttgctgaatttcataggcattattttcataaatatcaagtatgatgagttttttaggagaaagctttgctatctgacggcaaagttcagaaccgattgaaccgccaccgcctgttacaagaacagtttgtccggtaatataagcaccatatttttcggtatcaaagacaataggttctctgccaagcaagtcctcgacttctacctgtctgatttttgatgttactgatgcaccatctttgataaggccatatacatttggaataatctttacttcaaggtgagtctttgcacaaatatcaagtatgcgtttcttatctgcaaggtttatctgtgagattgtgaaaaggataacttcaatatcctcacgctcacatatttctggaatatcatatgttgaaccttctattttgacaccgccgattctgcgtccgattttttctgggtcgtcatcgactaagcatataggaacatattcattctcgggtgatttggcaagttcacttagaacagttgcagcaccttcaccaccgccaacaatcataagtcttcgccgatttttattactggtgttttttcgctcaatgattttattaagtcgataaaccaatctaaatataaatgtaagaaaggttgagaggagcgacattataatgtagattcttgcaccataatttaatcggttttcgtctgtgccaattatcattgtaaatgacataaagacaaggttagctgttaaggaggctatgcccgcataaaagaaatcctctatatccgcatatcgccacatcttatcataaagcctgaaacatagaaatacagctgtaaatataatatttataaagaggagtccccacataaagggttcttcccagccctttaaaatgaagctgcttttgttgactacgaatgatatatagtaagaaacattccaaagacagaagtcacatagaaatagcaaaagctttctatgtgttttgagctttttatatagtttattcattttttatccttactgcgaaagaatgaatatctttcaactatttggttttaatttatcttaaaaagtgtaaacttgaaattttacgctacttaatagaagtatataacgaatctgtgcaaaattcaatacttttacaataattataagttaaatcaagattttaatatactttatagaattaaaatatccattatctattatataattaaaaatgagaatggactgccattcactcatacgattttttgtaagctatttaaaaatttcactcaagcttttttaagctattaattgatataaattttatgccttgaatgattttcagaaattattttgatttattgaaagttttgtctgtttactttttatgtcggatattgtataataacatattagaattttatgaagttacatatatattgtgccactgtgtcttgatttattaccttggcctggaaggggaatgaagcaaaataatgatgaaaataggtttggatataggttctacaacaattaaatgtgctgttcttgacgataataataagcttatatataaaagctatgagcgacattattctcagataactgaaaaaattgcagaaattctcgaaaatatccgcagaaatgttaagggtgcagaaaatgcttatttcgcaatgtctggttcagcaggtatgggtgttgctgaaagctgtgaaatagatttcgttcaggaagtttatgcaactcgtgttgcagcaaacacatttatagagaatactgatgttattattgagcttggtggcgaggacgcaaagattctttttctttcaggtggtatggaagttagaatgaatggctcttgtgctggcggtacaggtgcttttatcgaccaaatggcaatgctattaaatgttcctatggacgagctcaatgagcttgcaaaggaatgtgaaaaaacctataccatagcgtcaagatgtggcgtttttgctaagagtgatattcaaccattacttaatcaaggtgctaaaaagagcgatattgcaaaaagtatatttgtggcagttgttaatcagactattgcaggtcttgcacagggcagagaaattgcaggaaagattgtatatctcggaggcccgttgacatttttgcctgagcttagaaagagctttgatgaaactctgaaaacaacaggtatctgtccagaagattcgctctattatgttgctatgggagcagctttgtgtgcagatgaaagaataaattttgatgagattatcgaaaaggtaaagcattatagaggaagcggaaactttgcttttaataagcctttatttgaaaatgaaaaggaacttgaagaatttaaggcaagacacgcaaaggcaactgtcgcaataggtgaacttaaaggctacactggcaaggcatatataggaatagacgccggttctactacccttaaagcaactgttatttctgaagataagaaaattcttttctcgcaatatcaatctaatagcggtaatcctgttcctattgttaaggaaattcttgaaaagatttacgatattaacccagatataaatatagtttcttctgctgtaaccggatatggtgaagaaattatcaaaaatgctttcggaatagatataggtgttgttgaaacaatagcccatctgacagccgcaaagaactttatgcctgatgttgaatttattattgacataggcggtcaggatattaaatgttttaaaattcataatggtgcaatcgacaatattttcttgaatgaggcttgctcatcgggctgtggttcattcttgcagacctttgcaaatgctcttgggtattctgttgaggaattttctaagcttggacttcttgcaaagcagcctgttgacctcggttctcgctgtactgtctttatgaattcatcagttaaacaagcacagaaggacggtgcaacaatagaggatatttctgcgggtttgtcaattagtgttgttaaaaatgcactctataaggttataagaacttcatcagcaagtgagcttggaaagaaaattgttgttcagggcggaacatttcttaatgatgcggttcttagagtatttgaaaaggaaacaggcagagaggttatccgcccttgtatttccggtcttatgggtgcttatggtgcggctctctatgctatgaataaatgcaagggtgagggaaaaagcactattataaagcgtgaggctctaaatggcttcttccataagattgttaccaccaattgcggactttgtaacaataactgccgtcttactgttaatacttttagcgatggcaaaagatatattgcaggaaaccgctgtgagcgacctataactaaaaaatcccctgataatagctttaatatctatgaatataagagaaatcttcttgacagctataagcctgtaaaaggctcgagaggaaaaattggtatccctatgggactcaatatgtttgaacttcttcctttttggcatactttctttacaaagcttggttttgaggtggttcgttccccatattcaacaagaaagctttatttgagtggtcagcatactattccaagtgatactgtttgcttccctgcaaagcttatgcatggtcatgttcagtggttaattgataatggaataaagacaatattctatccttgtatgtcatataactttgatgagcatatgggcgataaccactataattgccctgttgttgcgtattatcctgaggttattcacgcaaatgtccgagatatagaaaaggtaactttcttctatgaatacttaggaatacacagaagaaaagaatttccatataaaatgcatgagcatctcgaaaagtatttcggaaaaattgatgttaaggaggttaaggcggcggcgagagcggcttatgatgaatatgaaagctatcttgcaaaaattcgcacatatggcgaggatattataaaaagggcagagaaagaaaataagccgatatttgtcttgtgtggcagaccttatcatgctgaccctgaaataaatcatggaatcgacagaatgattgcaagctttaatgttgcgataatttctgaagatgtagtaagtaacaaggttgataagttcccgacaaccgttcttaaccaatggacatatcattcaagactttattcagcggcaaggtatgtttctacaaagcctaatatgaatcttgttcagcttgtttcattcggctgcggtgttgacgctattacaaccgatgaggttcgtggaatattggaacaaaagggtaagatttatacacagattaagattgacgaaataacaaatcttggtgcagttaaaatccgtatcagaagccttttggctacattagatgagaattaa

SEQ ID NO: 683 - DNA, 29970 bp, unidentified
  source 1..29970: mol_type = unassigned DNA
tgatggtgaaggttcaaaggttatttgcaaagactaatttgaaaattccagtttgttggcgcggtcaagttttttcccccacacacccatttaaaaaaaagatgcacaccacaaggcaacacgccccttgcggcggccagagggctggccgccctacaccctgcccggagggcaactgccaactgacgggacgtcggggacgccgccccctaccgctgcacaaaacaaaatgcgggagactgctgacgaaaagcagtctcccgcatttattggtttagaatttcttcggttccttctttgcaaagaaggaacaccgcatccccttaatacccgctgccggcctcgccggaggtcagcagcttgacggcacgggaggtgccgaggcggtctgcgccgaggtcgaggaacttctcgatgtcctcgacggtggagatgccgcccgcagccttgatcttgcagcgacccgcaacgtgctttgcgaacagctcaatgtcgtggaaggtcgcaccgccggtggagaagccggtagatgtcttgatgaagtcggcaccggcctcgggcacgatgtcgcacatcttgatcttctcgtcgtcggtcagcaggcaggtctcgatgatgaccttcagcaccttgtcgcccacagcagccttgacggcagcaatgtcattgcggacgtcgtcgtactgcttgttcttcagccagccgatgttgatgaccatatcgacctcggacgcgccgttgtcgatggcagttttagcctcaaatgccttgcttttggtgtccatagcgccaagggggaagccgacgacacagcagaccggcacgcggcccgccatatactcgacggcctgcttgacgtagcaggtgttgatgcagaccgacgcgcagtggttggcgatggcctcatcgcagagggtccggatctggggccaggttgcctcaggcttgagcagggtgtggtcgaccttgctcagcatttcttccttcgtgtatttcatcggaaattttcccctttctcacaatgcttgcacaggcgtgcctgatgcaggcccagggcagcgaaaacgatggaggtgatgctgaccgtggcaccgatgatgcccaggatcagccccaccagacggaatgcgtgaccgcgaactttctgtttcataggggatgcctcctttgggggacgtagttttttgtgcacgagctgcctggctccatgggtcagcagcgggtgcttgagcacaaattttgccactttaaaaataagcatggtatgctccttccggatgatgcgttacttctttttaaagataaacaatttgctgaaaacgtagttggacacgataacgatgacctgactgaacagcttgacacccatggcccacagcttgccgttggccgcggcaaacgcgacatgcggtcccagcaggctgacgcccagccagatgatgacctgatccatgaccatcgtggcgatgcggcaggagacaaactgcccgaactccgcccaggccgccttgcccttgttcgcgcttttgaacacgaacgtgcgatttgtccaataggcaaagaggatgcagatgcagttgtccagaatattgccgatgcccgcggcaaagtctgtaccgaacgccgcctggaagcccgcaaagacgaccaggttcagcagcgttgcgactccgccgaaaaacaggtaggccagaccctcatagtatttttggatgatgtctttgagtttttgcatgatgtacccgttttacgtttgtaggggcgggcactgcccgcccgcagggcgtcgaggacgccgccccctacaggttacttgtacaaaaaggggcctgcctgttacaacaggcaggccccatacggttgcgcaatgactaagaattattcagcgtcctcgccgttctcgtcgaggcaggccttcatggacaggctgatgcgcttgcggtcaaagtcaacggcggtcagcttaacgcggacctcgtcaccgaccttcagcacgtcggagaccttgttcacgcgctcattgctgatctcgctgatatgaacgagaccgtcaatgcccggcatgatgcggacgaaagcaccgaacttggtgatggagacaacgggagcggtgaactcggtgccgacgggaacctcattctccagcttgacccaggggttgtcctcttccttcttgtagccgagggagaccttctggttctcgggatcgtagctcttgacgtagacctcgatctcgtcgccgaccttgacgacctcggagggatgcttgatgttgttccagctcagctcgctgatgtggcacaggccatcgacaccgcccacgtcaacgaaagcgccgtaagaggtcaggctcttgacaacgcccttatactgcttgccgacctcaacattggcccagaactcctcgcgcttggccttgttggcctcggcagtgaccttgttgatggagccgacgatcttgcggccggcgcactcggtaatgaccagctgaacgtgctggccaaccagcttggtgtagtcctcgtcacggcgcatggtggcctgagaacggggaacaaagacgcggacgcccttgacgttgacaacaacgccgcccttgttggcctccatgacgtcgccttccataacggtgccgttctcggcagcctcggagacgtccttcatgcccttctgggcctcaaaacggacgcgggacagggtgtcaacaccctcctgatcgttggtcttgacaacaaccagatccagctcgtcgccctctttaacaaggtcttccatcttggcgttggggtcatggctcatctcgcgcaggggcacaatgccggtgtgcttggaaccgtcgacaccgacgatgcactccgtcggggaaacgctgatgaccttggcttttacgatctttccggtgtaaacatttgcattggcttcggtagctttgagcatctcctcgaagctcatgtcgtcacggatctcttcactcatactgttaagtacctcctcaattatagacgaaggcgttgaagccccggctgtcacgcccacacgcgccgcaccagcaagccaagcagggtcgagttcatcagcagtctcgacgttgatggccttggtatgccgcgcggcgacctgtaacagcttttgggtattggaagaatgatgaccaccaatgacgaccatgtgatcgcatttttggctgaggtcttccgcttcctgttgcctcgcccacgttgcattacatattgtatcaaaaattctggcttttgtacactctttttttaaaaaagctttgcaattttcccaactttccacgcgaaatgtcgtttgcgcgacgacgtagatggattcttgttgcaaaagcgtggggagcaatttttgcagctcctccagattggcaaaaacctgcacagggccgcttgtatggccgactattccctgtacctcggggtggtcggcatcgcctgcaacaagcaaaagcgcaccgtttttgtccgcttccatcgcgattttatggatttttgcaacaaacgggcaggtggcatcgtgatacgccaggctgcgtgtgcttattttatcatagacgcttctgggcacgccatggctgcggatgatgacctcatacccgtcgggcacggcgtcaatatccgggcaggtcacagcgcccttcgcctccaggtcggccacgacctgagcgttgtggatcaacgggccgagggtcgcaaccttgcgtccctgcgccaataaatcataagtcagcttgaccgcgcggtccacaccgaagcagaagccggcggttttggcacggataatctccatagataagctccttttgtaaactccttgcctccctctgcgagacagactcccccgaaacgggggagatggcgcttgcgccagaaggggagcagtggccccgcagggccggagggagagagccgtgtctttatccgaagcttcgggcctcggcaaagctctctcccccaccgcctgcgggcggagccccctcccagagggggccaaggggaatgtcattccggcagctgcggcttgtcgtccggtgcagcgggttcctccgctgccgtttcagccaggcgcacagcaaaggcgttgtcggccagcagctgctccagctcgtcgcgcaggcggtttttcatacggcgcagctccgccattttgtggctctgatccctgatctgcaggtccgcggcggggatcggctcgccaaagacgatgcgcaacttgcagaaaaggtgcagcctgccgtccttggtgccgtagatgatgcgcacaggcagcatgtccgcacccgcggcggcggcgatcacaaatgcaccgctcttgatcacgcccagcttgccggtctttgtgcgggtcccctcggggaagatcatgatgcccgtaccatttttgcactcgttcgtcagcttttcgacggtggtggtgtcgcccttgccgcgctcgatggaaacagcgcccatgcagcgcaggaaccagccggccagcggatttttgaacagttcctccttggccagaatgcgcagccgcttccagtcaaatatcgttatagcgatcaagacagggtcaaggttggcaatatggttcggtgcgatgacgtaggcgcgtccatcgcggacggccttcaaattctcgcgcccgatgacctcgaaccggaacagaatgtgggccagcacccagacgatgggcagcagaatccagtataaaagcatcgtcagcccccttagatgtgcgcaagaatcgtgcgcttgagcaggtcaaagctctcctgcaggccgatgctgcttgtgtccaccagaatggcgtcgtcggcctgtttgagcggggccacggcgcggtggctgtcctggtagtcgcgctgccggatgtcggccagcacggtggcaaagtccgcgggctggcccttctcggccagctccttggcgcggcgctgggcgcgggcctcggcgctggcagtcaggaagatcttgaccgtggcgttgggcagcacaacggtaccgatgtcgcggccatccatcaggatgttctggctttcggccaggccgcgctgggtgtccagcaggaagctgcgcaccgcggggtgtgcggccacggcggacgcagccataccgatctcctcggcgcggatggccgtgctgacgtcctcgccgttcaaataaatatgctgtgcaccgtcgatcaggcggatgccgagcttgacctgcggcagcagtgcggcgacagcgtcggcgtcatgcgggtcaacgcccgcacggacggcgtacaggccgatggagcggtacatggcgccggtgtcaacgtagatatagccgaggtctttggcgagcgccttggcgagactggatttgccggccccggacgggccgtcgattgcgatggaaatcatagttatcatccctttaaatagaatcgtctttggcttctccctttgggggagaagctgccgcccgcaggcggctgatgaggggagagcttgcgggggctgcccccgttagagggttaccgccgcagagccgcaggccgggcacgcccggcccctaccgggtggtttctccttcccgtgcagttgccgtaaggtctgccctcatccggccctgcggggccaccttccctctcggggaaaggctggggttacagcgctctggctgccgccacggcggttgaccaggcgatttgcaggttatacccgccggtgcgggcgtccacgtcaaggacctccccggcaaagtacaggcccgcacacagcttgctggccatcgtcttggggtctacctcacggacatcgacgccgccggcggtgatgacggcgtgctccttatcgcccagcgcgctgaccggcacctgccagtgcttgcacaggtcaacgagcgcctgcttctgctcccgcgtgatctgcgcagccttcgtggcagggtcgatgccccacttttcgacggcgacggggcgcatcgagttgggcaaaagctttgccagtgcgccctgtgcgctgtggctgccctgctccgcaaagtcgcgggtcaggcggtcatagagcgttttttcatccagcgcgggctttaagtcaaactcacagatatagcggtgcttcgttatatcctcaatgtaggtgctggccgacaggacgagcggcccggacaggccgaagtgggtgaacagcgcctcgccctgctcggtaaacagcggcttgccgtcgcagagcagcgtcaatgtaacgttgcgcagggccaggcccatcatgcggcggcaggccgggtcggggctgaccagactgcacaggctgggctgcggcggcatgatcgtgtgccccgcctgccgcgccagcctgtagccgctgccgtcgctgccggtggccggatagctgatgccgcccgtggcgatcagcgtgttttctgcccgcagcgtctcgccgcgatccgtcacagcacccttgcagacgccgtcctcgatgaccagtttttttgcgctgccgcgcacaaattccgcatcgcgtgcataatcgcgcagcgcggccagcacgtcggcggcgcggtcactccggggaaatacccgccgcccgcgctcggttttgagcggcacgccgagtgactcgaacagctccatggccgccgacggcgggaaagcgtaaaggctcgaatacaaaaaccgcccgttatgccgcacatagggcagaaactcccgcacgtcgctgtcgcttgtgacgttgcagcgtccctttccggtgataagcagcttttggcccggtcccttggggttgtgctccagcacggtcacggtcagcccgcgggcacaggcggccccggctgccatcaggcccgccgcgccgccgccgatgaccagtagatctgtcatgcgttctcccttcgtttgtcagtttttctcggtcttccgtacaaaagcaccccggcaaatgcgtacaggaccagcagcggatgcaccgttgccaggtacatcgtgctggtgccgatgccgaagctggacacctcgacaaaggcgatcatggcacagcgcagcagcgcaatgccgaagatgccgaacagcagcagccacggcacaacggtctgtgccgtgcacttttgacgccgcttcggcaaaagctctgccagctggcacagcacggcgcagagcacgcccaccgtaagcaaaatactgcagacccgcgtccagccctgcatgacggcaaaaaccgccttttggtacgggctgtagtagggcgtgtcctcccccgcgttggcggcgctgttgaagccgcagtgcaggtagccggaccaggcggcaaagtcgtcctcggtgccgatggaccgcagcgtctcatagggcgcacagtcccgcaggcccagcacatgccaaaagccgttccaggtctcggccagcgtcgaaggaacgtaagccgccgagatcggctggctcgtcgctacgcgcctgccggtgcggctgggcagtgtgcccgcgtcgcaggcggcgttgatcttatcggccacagtctgccagtaggcgtcggcggtcttagcgtcggcgtagatgccctcaaactgcgcggcgcggcggatggcccaatagaagctgcccgcgcggtagtcgtcgagatttgggtcgcggaaatcattctgcagctgggcgtcctcctccagccagtaggccaacggctccaattccggcacagcgtcgtaaattttctcgcgggcgtcggcgggcacggagaggtagggcgcagtgctgtcggtgtccacgcgcatcatcgcgcccatggccgcggcaaaggagccttccgaaaagtcggacagtgcaaacacgccgtagtgtgtgtaattgagggtgcagaaggtcagcacgccgacgccgagcatagcatacgggatgacctgcgcggccagagccttccagcggcgcttgcccgccagtaccacggccacaatgacggtggccgccgcggcgaacggcagcaggaacagcccggcgtcctcgcggtccagatagccgcaggccagacccgcgcccgccgcggccagccacggccagagcggcttttccggcgtgagcaccgcgcacagcgccatgcccgccatgcccgcaaagaagtacagacacagcgccggaaagatgttgtcccggtagacgcgcagcgtgtaggccgcccagctcgacggcagaaacgccagcgccgcaaacagaccgagcgtcagcacgcggccctgtgcggggtcttttttgcgccacagcgtcgaaaaggcaaacgccgccagcagcgccgccccgcaccagagcgccgcgccgctgataagatacggcagatgcagcgcgtgcagcagtgccagccacaccgggaagaacatggccttggacagcgtcagataatcatacgcgcccagccactgcccggctgtgatatggttggccgcgcggaacatcagctcgtcgtccagcggcgcaccgcccacccagatgtacgcctgctgaaagcccgtcagcgccagacgcaggcagaccagcagggcgcagagcacccagaaagcgcggcgggacagccgcgggcgaaaatgcttcatcggtaacttcctcatgcgttatttttgcagcttctcaatgctttccacaagatatttctgctgcctgaacgtcagatttaagagcagcgacagatacttgacgacgatggtcagcacggcgaacagccccgcaaacccgacggtgatgacgaacatcgtcgtcgtccaaccctctaccgggtggccggtggcgaagatgacgagggtatagatcagctcggccagcgccaacgccatcatgcagagcgtgacggtcacgctggccttgaagccgaagttcgtgtagagcgtcaggctgtccagcgccagattgaaccggcccttctgcttaacggtcagctggccgtcaaattccagatcgaccatccgtaagccgctggccgcgtaggccgccttgcggtagggcaggtgcgtgctggacgcatggacgcggttgatggcgcggcgcgtcaccagacggaacgcatcggtgcgcaggcggtaggcgctctgggaatgggcgttgaacaccttataaaacaggctgctgccgccgcgcacggtgcgcgggcagaccgacacaatatcgctgccgtccagcgccgccctgtatgcctgcataataagcgtcggcgcgtagcagagctcggtggagtcgaactcatagacatagtcgccgatggcggcatcgaggccggcgttcatggcgtcctcgagcccgtggtagatgctcatgtgcaaaatcgtcagcggggcgtcctgttccctgccccaggcgcgcagctgtttgaccgtgtcgtcggtgcaggcgtcgtccacgacgaccagctcatattgtttaaagttggcgtccagctctgcggccaccgtgcggcagaactccacggcgcgcgcgccgtcattgtgcaggtagacgactgccgaaataaaattgttgtctttaagcatcatacatccaatacctcgtccaggtcgtataccgtgttgatcttgccggacagcacgctgacgagcttcggctcatcgttcatcacgcggaccaccgtcgggcgcgagtcgtcgatctcgctggcctttaagatgggcttcatgctgaacaggctgctgtggtaggcaaagccatattcttcctttaaatacttgcgggccagctggctcatgtagggccaggcgctttgcggcttggccgggcactcattgcagttgtacaggctgcccggcttgcacacgccgccgcattcctgctggcacgggaaggtcgcgacgctgtcatagctcgtctcatgcggggtgaaggtcacgctcgtcaggctgtgcaggccggtccggccgaagggcatcaggctgaaaaacggcccgtccatgaccgtgatgccggtgtttttcaggcttttgtccacggtgcacaaaatgatctcgcacttttcgtacttaatgccgaacggcggcaggccgagcatggcgtgtacgtcgttgacgcccgcataggtcgcgttgagcaggtagggcgcttcggcggtgatgccccccgcctgcacgcgccacgcgctgccgaccttctcgatggccgtcggcttgtggctgtacagtaccgcaacgttgggcagtgcggcgagctgctccacaaaccagcgcttgagtatctgcgcatcgtaggtgtactcggtggtcaggaacgcgccgtcgcagaggcccgggttgaagtagcgctcgggcgcaacgtcgtcacagcggatgcctgccgccgcgcagaaccggcggaattccgccgcgttcgtccaggagaagtgcgcactggtggcgtagacctggtcaaactcggtgtgcaggcagaagccgtaatcattgcagaaccgctcaaaatagtgggcggacttgatggctgtggagtagctgcgcgggtagtggtagcccatgtggacacgggcctggttgatgtaggtcgcgcgcatgaagggcgcggggtcgcgctccagcacaaggacgcgctgccccgccgcgccgcatttctgcgccgcgtacaggccgtacagccccgcgccgaggatgattttatcgtaggtcatagagcgtttcccctttttacattccttcggacgattgccgggtggatatggaatctgccccggcattgtaggggtcgatgctcatcatcgacccgggcactttgcggctgccgccaagtgccgcgggcgagcaccgctcgcccctgcatctttgcaaaatataacttacggattatacttcccggccagcgcattcagcagcaccttcatcaggtcgctgttgcccttgaagccgctgatcttcgtcggcgtcttaccggtggcagggtaggcgcgggtcacggggacctcacaggccttcaggcccagctgggtcgcgcggatgcttaaatacgccagcagctcatacccgccaaacacatctcgcagcgggcggacatccgggtgggtcaggtactcgcggctgtaggcgcggtaggcgttggtcgtatcggtgaaccactggtgcgcccccaggctgacgagcggcgcgtggatgagccgcacggcggcatagcgcaccggcggcgtgttgatggcgtggccgccgcggataaaccggctgccctgcacgaggtcatagccctcctgcagttttgcgataaactcgggcacgtcctcgatggagtccttgttgttgccgtcgatggtcaggatgcctttataattgcgttccagcgcaaaatacatgcccatgcgcagctgggcgccctgcctgccggggccggttttcgtcagcagcgtgttgacgtggtagagcgccagcgtctcccgcttcatgctgccgtcggtggagccgccgtcgcagatgacgatgtcgcagagctggtcgatgcccgccttctgggcgcggcccagctcggtcaggatgcgcgcgccctcgttgatgacggggatcagcaggcagtagtcatggcggcggccctcaaactccacagccgtgtagtcgggcacgccgttcaagtttgtgcgctcatactcgatcatgcgaacacctccgcgatatagtccatcgtgcggcggatcgtatccacgtcggtgtgggccatctcgacggagacgaagccgcggtagccgacagcccccagcagcagcgccagctccttgtgctcggggcggcgctcaatcgggaccagacccggctcactgatgtggacatggctgacatactgcatatcatcgatgaagctctgcaagtgctctccctgcgccagcacggtggacaggtccagattgaccgacaagcccgggttgtccagccgcttgacgagcgcaaaggcgtcggcggtgccgtttaggtagttcgtgtacatcggcgggttggcctccagcgccagatgcacgccgtaccgcgcggccaggttgcccgcctgcatgaagaacgcctcggcggcggcatcgttggcccccagcgggcgcatacggttcttcgggcagccgaacaccagcgacgggcagttcaggctgtgggcaaactggaacgcctgcgccgtgtagtccagcaggtgctcggtgtcggcagggtcaaagatattgcccttctggccgtaccagatgctttgcagactgggcaccgagaagccccagcggtttttgaggtagccgccgaacagcagcgcactcgtcaggttttcatacggtgcttcggagaaaatgcgggtcggggccagctccaggccggtgaagcccgcctgctgcatggccgcgtatacggtttcgtcatcgtccttctgccatgcaatgttcgagatggcaagctgatagttcggcatgggtcagtccctccaacttcgcataaagcgcgtaatatcatccaattcttgttgttttgtgcaaaggtaatcgccgctgccgcccaaaagcgccgcgtggcggctgcgcaggtcgtagtcaaacgggggcttgggcagttcattgtgccagtccgctttgccggtcacggcggtgtagacctcggcggcagagaccggtggcgtgcagaggtgcagcatctttacatcagcggcgcgggcagcctccatatccgaccagagacggcctaaattatagaactggtagcggctgcgggcatcggtgaaagccagggcgttgaagtcgttggctgcaaaaaaggcgcgcagcgctgccgggtcggcgatgccgttcagcttgtaaaagccgttgtccgccagcgtgtaggctgatttgacaagcggcgattttgccgccagctcgctgtatttttccggcctgagcatggccggggtgatggtgtgcaggtcaaagaggaaatttttcctgatgccggcgccgtacagtgcgggcaggcgcataatgagcgcgtcggggaagtcctcgcgcacccagcgctccaattgcagacggtttttgccgtaggcgggcagagcttcggtgtcctgcgcggggctgtcctcatagacgccgcggctgtctgccagcacggcaatgctggaaatcaggacaagtcttttgggcgcgatttggcggatattctcccgcgcggcgcacatgacggcaaggtcggcctccgggtcggcgttggccaggaacatggccgccggcacgcccgcgtagacacagaggtccgggcgggtgccgtactgcgcggttatgtcactgctgtggcatgccgcggcgaaggtatgtttggccagcaggttgccccccacaaacccggtggagccgacgagcaagtcacagaacatagcaattcccctttgcacatttatacaaggtacattatagcctattgcgggggaaaaagcaacgccccgtgcggaatcgcacagggcgttgtaaataattgctatgtaggggccgggcatgcccggcccgcaactgtacggcaagccggcttttatggcaaagccccgggccggacatgtccggcccctaccgctcggtcatttcaaaaactcctcaataattttcagtccgaccgccccggatttttccgggtggaactggcagccgaggacgctgccgtggctggcggcgcagatctcgcgcccgccgtagacggtgtcggccaggcggtcctcatcgcggatgggcttggcctcgtagctgtggataaaatagcactcctcgccgggcttgagcgcggccagcgccgtgccggaaaaatccgtgcgcccgccgccggggtagagcggatcccagctgatgtgcggcaccttctgcggatggccgtccacgtccgtgtcgaggatctttaccacacggcccggaataagcccaaggcccttgtgcaagccgaactcctccgactcgtcaaacaacatctgcattcctaagcagatgcccagcagcggcgtaccggcggcagccttctggcgaatcggctcgatcagccccagccgtgccagaccgtccatgccgtccttgaacgcgccgacgcccggcagcaccagcttttccgcggccagcacgtccgccgggtcactggtcagcagcgtttcggccccaaagtgggcaaacgcatggcggacgctcaacaggttggacaggccgtagtcaatcactgttaccttcatacctggcgcacctccaccccgcccgcgcggatgtcctctttcagctccgtcacggtttcttttttgtaatgcagcacagcggcacaggccacggcgtccgcgcccgcgttggcggcgtccacaatgtcgtcgccgcagccgacaccgccgccgcagatgaccggcacgttcacggctttcgtcacggcctcgatcaattcaaggtccataccctgctgtaacccctcgttgtcaacgctggtcagcagaatttcgcccgcgcccagcgccacgccgcgcttggcccactcgacgacgtcatagcccgagtgggcgcggccattgtcgtagtaggcttcccacttgccgggccaggtgcggctgcgcttggcctgaatcgacagcaccatgcactggctgccgaacgcctcggcaacctcggtgataagctcggggcgcttgatggccgccgtgttgatggccgccttgtccgcacccatcgacaggatgtggcgcacatcctcaacactgcgcagcccgccgcccacgcagaccgggatatagacgtcgtccacggttttgcgcacaatatcgcttaaattgttgcggttgtacaggctggcgacgatgtcgatatagagcagctcgtctatcccggcctcataatattctttggcaaacgcattcgggtcgcccagcttgcgcagtccctcgagctggatccccttgacaaggttggtgtccttgacgtccaatcttgcgataagtcgtatttttttgctcatagctgaacctttctaaagccttcccctgtgggggaaggtggccgcgcgaagcaaggccggatgaggggcgcgtatgccacgattgcccgcaaacgggtcgccgcggaacgtccacccctcatcagtccgcttcgcggacagcttcccccaaggggggaatccttttcgctcaaatttcgtggtgcgttcccctcgggtcgccccacagtacctcgctgtcgccctcgtagggggtgtggcggagcttccacatattgtcctcccacttccagatgttggggctgcggaagcggtccgccaggtccataaagtaatcgcggtccatcctgggctgctcaaacagctggctggcccaggggaagtgctggcggtccagcgacagatatttgaagatttccttttcaaaacggtccgggtactcgccgtcaaacttcttgcagagcgccttgccctcgtccagcgtgatctcctcgttgcggatctcctgcgcggcgtcgtaggtcgtgcggccgatgccgtacttgatgtaggtcgtgtagtagaagaagtcgtcgatcttgtcatcgatggagttgtacttggagtaggtgccctgggtgcgctccggcgcggggcggaagccgccgtgctcgacgctgtagtagtacgcgccctgcggatgccacttctcgtaatagcccagataccgcacctgaatgtgatttttctcaaggttggaggtctcggacggcaggtagatggccaaatcggccttgtccactttgtagtcctcctccagctggcgcaggctgacaccgcccagataaatgtggtcgtagtcgttgaccgcaaagaagtgctcatcgcgcagggcggagttgttgtcggcaatcgggttgccgaactcggcctcgttctcgccgtagaacaccagcgggatgccgaacttcgcggccatcttgggtgccagctgcttctggcccagaatgaacggctggaacgggtggaacaggttctccgtcgcaaggcgggtcagcaggcggtgggtcatgccgttgggggtgcacaggtagttgtcaaagcccgcgtggatccacgcctgcatattctcccagccccagggcgtgtagatgtgcggggcccaggtgacggtcagcggatgcataccgtacttgtatttcagcaggtgcgcggcgtagaagctgtccttgccgccggagccgggcacaaggcagtcatagctgccgtcgttcttgcggtactggtcgcagagctcgcgcagctccttctcgcgcagggcccagtcgatatggccgttggccttgttgtggcaggcatggcaggcatcacagacgccgtcctcctgaatgaccatcgttttcttgatggagttgatcgtgtgctcaaactcatagcaggagttgggcttctggttgctcatgacgcattccttgcagaactgcacgtgcttgggcaggccgtagtaggcctcgagccggtcctccgggatgtccggggcgtacttgctgtagtcaatgtcgatgtgacggggaatcttttccatattctttacactccaatcggctctgtatcaaaatgaaaaggcgccgtccgatagcaatgctatcagacggcgcctttgccgtatgcgggtattatagcacagttttatgcgggatgcaagagggcatcaggcagatttcgcacggcggaactgtgcgcaaacccatagaaccaacagcaccggcacagctgataccactgccgcacagcctgccaccgccggagcgaatgcgccgaaccactgacagaacaatgtataaccgatatcccctgccgcagtccagctgcgatatccgctgccaaaggtcagccacagcgccagtatgacacccgctcccaggcagccatccgccatacgcagcagcccaccgcaaaacatacgccaccggtcggccaacagatattgcaatgcaatgcagcccataagcaacaggccggagagatacatggcaatggccacaatgccccggtattgcagtaccatactcagcgccgccgaaaacggcgttgccatcgcactctgccactccatttggcagttatactgtaaaatgcggtagccatcgtaagtaggcggctcgggcgcaacggtgtcctgataggttgtaatcaggctgccaaaggggtcggtctcatcgttggtactcccatgccacaggctgtcggcgcggtgcatcacgcctgcgtacacagcgtcaggtgttatggcgttggcaagcggatcggcagtcgttccaatggcagcagcgtactgactgcaggtgtccaacacagcagcgtggacggtgtccagataaccggattttttcagacaagcggcaaaatgtccttcccgcaggagcgtaaaggacagcgccagacagaccgccagcagaagcgcacagacactgcctaccagctgaacagccacagccagccgagcggctgcagcctgcttgccggggcggctcaagacagcccctccagccgcggaccgctgacatacttgccgtagataaaataacgcatatccgtcagggacacctgtcccagcgggtagcaggtgtacaggataatattttcctccggcgcatccatgtcataggcggaggtatcgttggcgttggctacgcgcatatccgtgatttcgtagatgtaggtgccgtaggcggtggtgacggtaatcattgcaccgttctgggcatgctcaaaatcgcggaaataggttgccgtgtggccagccaccagaatcgtgccaccctcaccggggatcttgccgccggtatagatgcccgcgcccgtgtccagctggggatcttcgtcaccgtagtaaatcgtgcagtccaccgatgtgccggaaatcgtgatttcacccagagcatcccccgccgcggggtagccgccgaaatcattgatgttgacagtctcgggctgtgcgggcgtttgctccggggccgcggtgggctgggcatcagacaccgcagccaccgatgcgggcagcgcggtctcaacgccggagcgtgccgccgcaccagccagcatacggcccggccccaccagcacgagaagcactacgcagagtgcagccacacaaaaaacaagagaaagaaccaggttctttctcttgccgtgtgcatgcactgctttgtgagaatcagaactcttcataagcagcatgtttccttatttttacttgccgagaccctgcttgcgaacgatgcaggcgaaaccggcaaccagagcggcagccagagccagaacagccagaacgaccatactcatatcagcaccggtcgccttgatgatgttgttggaggcagcagcagaggtggcagtgggcagcgtagcagtgcccttgacattggggtagctgctcagatccttcgcctcgatgtggccgcagtggtcgcacttgtagccgcccacagtgccagtccagttgtggtaaccgcaggccttgcaggtatagaactgagcgtcaacagcggcggcgtcaaccgtggtggtagccggggcagcggtggccggggctgtatctgcagcagcgctgacctttacgatctcataggtagagaagtggggaacccagaaaacgaccacgccgtcagcaaccttggatacagaatcaatcgttgtacggtttccggcatcatccacaaagacgatctggtaagctgcgctggtatccataccatagacggcaatattggcacccgcagacggctgcgtaccggtccaagtagcagacagtaccagcgtattgtcatccttcttcgtcagggaaagattagaaatctgactcttctcgattgtctggacagcaacggcattggtaacgctccccgtgccgggatataccttcttgacggtgtccttatcaaaagagccgtccgcgatagccttgtccgcgtgggcattgataacggtcgcagctgcgttagcgttctgcttggttacaggcacggtggggttggcggtgtagtaattggcaatgctcttcgcaaaggctgcaccttcgtttgtagatgcgttcttggcagtaatacttgtggcagccgtgttagcagcctcaccgggcgtagcttcagcgaaggcgggcacggcgcacagggcagccagcgctactgcgcaaaccatagaaagaaactttttcatttcgggtaggactcctctcataatttaaatggctgcattcacaagccatatagtctaatgagagtatacccccccccggttacttttgtcaatggacattttcaccaattattcacttttattctgccataacagcaaagctttagactgccgccagcagcagtatcggcggggcagccattaccaatcccaaaaggctgcgataccacccacgggcagccagcggctgcggctttacgcagagcgccgccagcacaaacaccagaggcaacacgcccggcatgctgatgctgaaaaatgcctgtactgcatacccaaggattgctgcggcaagccccggcgctgtccgcagtccgcggcggacatgtaatcccagaaaggccagccaggaagtcagcccaactacccctccacagatcaggtgctgcagatactcgttatgtgccgagtcaaaaacatcaccgttgagcagcatcatatatttgacagagtagtcatctatgttcagccgtgcattggcagcatcgccgcctaatccaaagagcatctgtaacggtgtcaaatcatccttccataccgtccaaagccgcttccatgcaaagccccggttggagccccactggtcatcaaagaacaacagccttgtcaacggctgcggcagcaccacggtaaaattggcaagcagcaccaaaacagcggccagcaccacggccgcgacagccagcacgcgcacagcacgccagctgtttaccttaggccgtcggcgcagcagaccgccagcgacaaagcacaccgcagccagtataagcgccaccatcggctgtgtaacaaatttcgacacggtacgccactctgcgcgggcaggcagcaagcgagccagcaaacccattgttcctgagcaaagtgcccagacagccgcagcataggctagccgggaaagccgcccggctgtaatgcgccgcgccatgcaaagcaccgccaccgcacttacagcccccagccaggccgcatcactgcctgcaaccacaaggcctgcccccaggcaaaccgatgccgcgccccatagccgtgccgaatcgctgtctggtgtcacaaaaagctcccacacggcaataggcaggcaaaggtcaagaaacgccccataaaaattgatgttgcccactgtaccgaggaacagctccccgctttcaggcaaaaagctgtaataggcatccaacgggtcaaccataaagaagttcatcccgcacagcagcgtaacagcgcatcctgctcctgccaacagccgtccgaaccatgcagccggaatcccgccgcctgtcagctgtactgcaaagtacagcaccgtacaggccaacagcatgataaggccgttgtagcgcccctgcaatccccacaaagccacggcaggattctccgcaaaaagccatgctactgtgtagcttaagcagagcagcaacagcggcagaccggcaatttgcgcctgctttaccggatgctcattcctgcgcaggcttttttgcaggcagcaaagcagcaaagcacatccaatccctgccagccacagcagtagatgaaatttagcacccaccagcccaacataaccattgggcatataaagcggcggcagcagcagcgctgccagtgtcagtacatttccggcggtagccattgtggggcattgcagcggttgttttggcaaacgcatggcctctacgatcctttccactaatcatgcctgctcgatacgcgccccgtcaataaagactgccttcacctcggtcatgacctcgaaggggcagccgttcgtgatgacgacgtccgcgtccttgcccacctccagcgagccgacgcggtcggccacgccgatgtgctccgccgggttgatggtgatggccttcagcgcgtcgaacgggtccatgccggccttgaccgccatgcctgcgcagagcggcagatactgctgcggaatgaccgagttgtcggtgatgatggacacgtggcagcccgcgttggccagcacgccgggggttttccaggatttgttctgcagctcaaacttgctggcaaacgtcaggctcgggccgacagccatcggcacgtccttttcttttgccagctcgtccgcaatgagatgcccctcggtcacatgctccagcgtcaggcgcagatcgaactcccgcgcaatgcgcagcgccgtaaagatgtcgttggcttggtgggcgtgggcctttaaggggatcttccgcgccagcaccggcagtagggcctcgagcttctggttgtaggcgggcattttggtcacgtcaccgttggccgcctgcttgcgcgcgccgtagtccctggcctgcatcagtgcaccgcgcaggaatgccgccgtggacatgcgggtggagtcgcacttgtcacggtagcagcgcttgggattctcgccaaaggcgcacttcatggcgacggggtcgcggacgatcatgttgtccacgcgctcgccgacggttttcatcgccaggaaggtgccgcccagcacgttggcgctgcccgggccggtgcagacgcaggtcacgcccgccttacgcgcgtcggccaacgaggggtcgcgcgggttgatgccgtcgatggcgcgcagctgcggcgtccagatgtcgttcatctcgttgtagtcgcagccctcatacccgatgccgtagccgtcgagaccgatatgggtgtgcgcgtccacaaagccggggaatacatcaaggccgccggcgtcgaaaaccacggcgtccgccggggcggtcaaatcggttccgatggcggcaattttgccgtcggccagcagaatgtcagccttgcaggcgtcgcggtggacagcgtcatggacgaggccgccgcggatgagggtggtgggcattttcatttcctcctacataaaatgggatggttgtcccatcccattttgctttttattgaaagttctctgccgcgggcatttccgccgcgttgtaaaggaacaataccaaatccggttttgtttcctcaatgtacgaggcaatcgtctgcgggaacgcgcgcttgtcaatcgtgtccaactccgcgcacgcctgcgccagatacggcgtaaacgcacaggcaaagctatcccgcaccagcagcacccgcttgtcattcggcggctggtgattcacgatatggcaaaggccataatcgccgccaatgtagcccgcgtaggggttgtcagtgtacaggtctttcttttcaaacatttcgggcacaagcagcgtgttgacatagtcgccgctgcggtctatgcccttatccgggactgtcagcgtaaaatctgcggcgtagtttggtgtgatgaccgagaagtcatccaacccagcgtacaccgtgccgacgcgcttgccctgactgcccaaaaaacaattcggataggtggtcactgtgtagttgttcagatcggtgatggcgtcgtcaaacacaaagccatactcgctcttaaggatttgcgccacctgtccccagcaccagaacgctccttccggcgtccaatggtggtcggtcttaaagaagaagttatattggtctataccattctcgtggatgacctgccgcaggtctgtacagtgcacctgtccacccaactgagccagaaaggcatccgccatcgggttataattatcctgcacgccggtgggcagctccgggtcatatttactgattttctgcggtgtcagcacaaagtacagctctgcgccgttctccttgcaggtttcctgcagtgacagaagtgaccgagcactctccgtcacatccgctggttcacagacaaaggtgagatagccgtttttcagcttgacgacctcgtcaccctcggcagtgtcctcaattacatttttgcccaatgtcatctgaaaaaacgtgttcagattgatcattccgtgataaaacggcacgctttcctgcgctgtcttctccaccgtgtccgtcgtcagggctgcggcatcggcggcctgcactgcgaggtttttccaggtccgtacacttccgctgcccaacacagccatcatcagcagcatcggcagggtcttccaccatttttgcttcatgtctgcacctcccttaaaaatcaaagtaaatgaacggattgtatccgccctttacaataaaggagagtgcaaccagaaacactgccgcgcaccagaccgggcgcagtctctctatccatgccccacgtctgcctgcttgagcacgcagccagaccgcaatgggcagggcagcggccataccgatgagcagaaacattttatattctgcaaaatagtaaactgccttctcgtccagcaaacccgtagtgtggatattgaacattgccagcagatatttaagcgcacctgtgacattctctgaccggaacaccacattgcccgcgatgaagaagaacaccgtataaatccagccaagccagcttttctgcccggacaaattcaaaatgcgctccacacacagaagcacgaagtacatcatgccccagacaatgtacgtccatttggcgccatgccagatgccggtcagcagccaaacaataaaaatgttgaagtagagccgccgttttgcagccacacggctgccgcccagcggaatgtagacatagtcgcggaaccaactgcccagcgagatatgccaccgccgccacagctccgtgatagaacggctgatgaagggatagttaaagttttccagaaagtgaaaaccgaacatctgccccagaccgatggccatatccgaataccctgaaaaatcaaagtacagctgcaaagagtatccgacagccccgatccatgccatggagaacgacaaatttcccacagaggaaaacgccgcgtccgccacataggccaagttgttggagagaatgacttttttaccaagtcctatagcgaagcgataccctcccctattccagttttgcagactttcctgtcggttatgaatctggtctgcaaaatcagaatagcgaacgatggggccggcaatcaattgcgggaagaaagcaatgtacagcatgacatcccacaggcttttctgtgccgcttccccgcggtacacatcgaccacataggaaattgcctgaaacgtaaagaaggaaatgccgattggcagtgtaatttgcggaacaggaagccgcacaaacggcaggcggttcaagttttccgtaaagaatccgagatatttaaatacgaagagcacagtcagatccacactgaccgctacaagcaggaaacccttccgggcactttttgccgacgcctcgattttacaggcaaagagccagcttgacacgatgaccagcagcatgaccaacacaaagcgtggttcaccccacgcataaaacagcagactggcccctgtcaaaaagaggtttctggccgccgtgcagcgttttggaatcagatagtaaagtaaggccactaccggtaaaaacgcaaacaaaaacgtggcactggaaaagagcattcggtgggtctccttacttacacgttaaaatccaagcacgtccttaccgcggtgtacggtcttaccttgccgtccgccacggcgacgtgggcgggatgggtggagtagcctttgagcgcggcggcgtcggtgaaggtcgtgtccagcatcaggtcagcgttggcagagctgggcagggcgtcggtgtagacgtggacatccagcaggccggggatcttaccggccagaccctccagcccttccttgatgccggccttgacggcggccttttcggcgtcgggcatctcctttaatttccacaaaataacatgacgaaccattacttgttttcctcccagatggggtgcttgagctgccactcgccgtactcgttcttctcgaacaggtcgcggttgtagaacttgtccagaatggcccagaactcggtctcggtgtagccgcagaactcgcagaagtcacgcacgcagagcgggtcgagcttgccgtcgcgctccttgatgatggggatagcctcctcgcgggtcatcatgccgtagcggatgtatcgggccgtgtagtcggtggcggcggcgtggccgaacttgggatacttgagccagctgtgcaccagataggcgcgggagtcgatctggtcaaagttctcggcgtggtgggtgcggtcccactcgtgggtcaggtcgtggaagccgtgggccttggcgatctggtagttcttgtagctgttccagggcacaaagtagctcatgtagaacgggtcgagcttggcgcgctcctcggcgctgggggccagcgtcagagagaggtctttctcggtcacgccgtcgcccagcagttcctccatcggcataccgacggcaacaccgttctcgatctggcccatggcggagtaggtctccttatcggcgttgccgccgtactcaaagctgacgttctcgccgtagcagagcatcggagtgttgaacttggcggccatgtgcagcgggaaggtgtagatcaggcggtccacgtaccaggtcggcttgccgtacttctcaaagaatttgcgcatcagcgtcttttgcaccttgatgttgggcttgcaggagatgatcgtgcagccgaactcctcgctgatgttcttgaggttgtggatgcccgcctgcgtcatggggaagttatcctcgacgctgaacaggatggggttcatgtgcatgacctctttcagcatccagacctggaagtggctgtccttgccgccggagacggcgacggcgcagtcatagccgccggggccgttcatgccgcggtacttgtcgcagtaggcctcgaactccttgaagcgggcatcccagtccacatttttgcgggcttcgtagtggcggcaggcgctgcacacgccctccgcgtcgaaggtgatcccgggtcgggtgtcgggcatcgtacattttttgcagtaacgcataagaacactccttatatttatatattatatttcgttgttgtaccgtaggggtcgatgcttgcatccgcccctacaaatacggcagggcttgtgttgtcgctttttttacttcgccgccgcatgcacggcgtccgcgccggcgaagtcatagatgacgaaccgtccgtcgttgtagacctcggtgcattcgccgttctgcacaaggcccgcgctctccgccgggccgtcggtctcggtgtcgatgagcaggaacggttgctgcgggtcggtggtcaggtggtccttgcgctgcagccagttggggacatagtcctcatccagcgattgcagcgtccagacgtccaattttccgttcgtcagctccgtcatggcgttgccgttccagaacgtggcgtagccttcggtgtagccgttgtccaccagccagtcggcggcggcgtccagccccttgtgggcgagatacgggttttcgatctcctgccggacggtgttgacggcgcagaccgtgaagcagcctgccagcaccacacccagcagctgccgcgcaccgggcaggcggaagtcctcggttttcagctccaccgccatgaccgcaatggccaccggcatgttcatgagccagaagtagaggtaatactcgtggaagtaggcgtaggagatgccgcagaccgccagcatggcgacgagcagcagcacaagcagctggtcgttcgtctccagctttttcagccgcagcagcagccgcacgatgcagaagaacatccactcgcccagcagcagaccgatgcccgccgcaatgccgccgaagtggaagatgccggagccgttctggtagccgaactcatggaagaagtccatcagaatgcggtccagcgtgaaccagttctcgtcgcggtcccagacgatgaagctgtaggacttgaaatcatacagccgcgacatgacgctgttgctgatgaaataccccgccgcgccggccaccgccgtgacaagcgacgccgcaaacagccgcacctgacggcggcagtgctgcagggccgttttccagtcggatgtgccgctgtcgtgcagtgcaagcaccaggaggatcgccgcggcaatgcagagcggcgcgtggaacaccatgagctgcttgacgccgttcatgcccgcgatggccgtaacgatgcaggccgcgagccattgcagtgcgcagtgctttttgtcggcgtcgatgctgcgcagcaccagcgccagcacaagcatataaaagaaggtatagacgaggtagtacccgccgtagatggcgtagaccagatagtgctggccgaacggccacagcagcgtgcccaccatccagaggccgggccgcccgagcctggcgcatttgacaaaaaacagcatacacgccgcgtacagtgccagcgtgacggccatgccgaacgtgcgcgccagatgccagtcatccgagaaaagcagcagccccagccggtagaaccattgcaggttgacgaccttcaattccgtggagtagaaccagttgtggctgatgatgctgccctctttgttgagcaggtcggagaggatcatctccgacgcgaggtcggaatcgacgatccatttgccgggcacaagctggtaccacaggtcaaacagatacgccgccgccatccagagccacggcagcgcctgccaaagcctgtgcaaagccccgccctttgtttgttgtttcattcggtttctcctgattcaggtttctagttatttaaactataccgcatttgggcgcaaagcgcaaggtatgcagggcaaaaaagcgccttgacgctgtgcggcattcatgctatagtgggggtaacggcccgtttttccgcgggactgtgcgggcttttccagcaatcggagggcccgctgcttttatatttgcttatcggagggcggccatgcagcagctacgcagcgccatacacaatgccattgccaaatttttgaaaaatcagcccccggcgcgcatcattgccgtgggctttgcgctgctgattttgctgggcgcggcgctgctgatgctaccgtttgccgtacaccccggcgcacacgtcgccccgctggacgcgctgtttaccgcaacgagcgccgtctgtgtgaccgggctggtcgtggtggacaccggcgacacgttcagcctgttcgggcaggctgtcattgcgattttgatacagatcggcggtctgggcgtcgcgtccatcggcatggggctagcgctggtcgccgggcgacgcatcagcttaaagggccgctccctcgtgcgggaggcactgaacgtcgagagcctggagggcatggtgcgccttgtgcgggccatcctgctggtgaccctgatctgcgaggtcgccggtgcagcgctcagcttcccctcgtttgcccgcgatcacatgccgctgcaggcggtatggctgagcattttccactcgatcgccgccttcaacaacgcgggctttgacgcactgggcggcgggcagagcctgatcccctatcagaacgatctgctgctgaacctcgtcaccgatgcgctcgtcattgtgggcggcatcggcttcatggtcattctggacgtggggcgctgccgcgggcagttccgcagaatgacgttccacaccaaggtcgtgctctccaccacagcagtgctgctggtgggcggcgcggtgcttttgcagctgaccgaccacatgggctggctggcggcgcttttccagagcatgacggcccgcacggcgggcttttccagcgtggatgtcggcagcataagcaacgcgggtctgctggtcatcatgatcttaatgttcatcggcgcatcgccgggctcgacgggcggcggcatcaagaccacaacgttttttgtgctgatgcagcaggtgcggtccatcttctccaagcggcggctcggcgcgttccaccggcgtctgccggacggctcgctgtccaaggccgcgaccatcatgctgatggggctgatggtcgtgggcggcggcacgtttgcgctctgcgtgctggagccgcagctcgattttggccgcctgctgtttgagcagatctcggcctacagcacggcggggctttccaccggcatcacggcggagttatgccctgccagccgggtggttctgatcctgacaatgttcattggccgcgtgggcgcggtgacgctgctctccctctgggtggagcgccccgctccgagtgcgcagtataccgaagaaaatattacgattgggtaaggcggtcttggccgcgctcctacggctcagccgcaaaacacagggacagaagggtacacgtatgtttgacaaaaagaaaaatgccgccgagagctacggcgtaatcgggttaggccggttcggcacggcgctggtcaagacgctggccgccgccggcaaggaggtcattgccgtggacaaggacgaggcaaaggtcaaggccgtgcgcggctacaccgactatgcgtttgtcatcgacgagctgaacgagacctctttgaaggagaccggcatgcagaactgcggcacggtcacgatctgcatcggtgaacagatcgacatcagtatcctgacgacaatgctcgtcacaaagctgggcgtgccgcacgtcatctccaaggccgccagtgaggtgcacggcgaggtgctcaagcgtctcggggccgaggtcgtctacccggaggccgacatggccgtgcgcatcggcaagcggctgatctcgggcaatctgctggactacatcgccctcggcgacggcgtcgaggtgcggcgcatcacggtgggcggcaggatgctgggcaagagtgtgcggacgctggatctgcgcaaggcctacggcatcaacatcatcgccgtcgagcatggccagcagacgaacgtggagttctccgccgattatacctttaaagagggggataccgtcgcggtcatcggcaaggtcgggaagatcgataagtttgagaaagaaatgtaa

SEQ ID NO: 684 - DNA, 10129 bp, unidentified
  source 1..10129: mol_type = unassigned DNA
atgcagggctaccgcgcggcatacggacgaattttcgacggaaacgagcagcttgacgacggagtgctgctaatgtaccgcgctccacacagctacaccggcgaggacaccgccgagatatcctgccacggcggaatttacgtcacccgccgcgtgctctccgcatgcgtgaaggcgggtgcgcagccggcggctcccggggagttcaccaaacgcgcgctgttaaacggaaagctctcgctgacccaggcggaagccgtagcggatatcatcagcgcccagggagaccagctccttaactgcgccaacggtcagcgcgagggagcgctctaccgccgcatggaaaagtgcgccgacagcattatggaggtctccagccagatctccgcatggatagactacccggacgacgacactccggtagtaactcaggaatggctctgcgaaaagctttcggcggtgcgcggaatgttcgccgacctgctctccggctacgacaccggacgaatgctccgggagggtatctcctgcgcgatagtcggcaagcccaacgccgggaaatccacgctgatgaacagccttgcaggtcagcagcgaagcatcgtttccgacatcgagggaaccacacgggatatcgtcgaggaaacgatagccctcggcgatatagtcctgcgcgtagcggactgcgcgggtatccgcgacaccgacgacgcagttgaaaaaatcggcgtggatatcatgctgaaaaagcttgaaaacgcggatataatcctcgcggtgttcgacggctcaagggagctttccggcgaggacaggcggcttctggagcttctcgacccggctaagaccgtggcggtcgtgaacaaatccgaccttccgcagaagcttgagcttaatgaaatttcagctaagcttggagccccggcagtaatctccgcgaaatctggtgaaaactccggtgagcctgcgaaactgcttgaaaaggcagtcagcgaaaagctcgacctcggcaggctcgacccggacgcaggattcctcgcaaacgagcgccagcgcgactgcattatccgcgccgaccgtgcactgaactcggcgctggaagccgcgcagcttggggtgactcccgacgcggtaggcgttatgctcgaggaggctctcgacgcagtgtatgagctttccggaaagcgcgccggcgatgaagttatagacgaagtattcaggcggttctgcgttggaaagtagcgccgccggagggagttaacatgaatatactgataatcggctgcggacgcgtcggcagcgagcttgcggagcttctcgacaagcgcggccacgacgtttccgttatcgaccgccgcccggagaacttcgacaggctcccgggggatttctccgggttcacgacgaccggagttcccatcgaccagaacgtgctcagaaaagctggaatagaaagctgcgacgcggtatgcgccgtcgcccaggacgacgacctgaacatcatggcggctcagatggctaaggagatattcggagtgcagcgtgtgttcgcacgtatctccgacgtggacaagatggacgttttcaagggcttcgggttacacaccgtctgcccgacaaggcttaccgtgcagtccgcatgcgccgccattgaggacgtcagcagcgagaccgaggttttcctcgagcgcaatccggtgaaattcaccacgatgaacacccccgccgagtacgtcgggagcattcccggagacatcgagctggagccggacgaatcgctgttcgcgataatccgccccaacggtactttcctgctgtacaccgggcaggtcatcacgctgagcgcgcaggacaagctcgtattcgcaaaaaaaatctgaaatacacaaatacacaacgaacaaaagaggcacgatatgtataaacttgtaattttcgatcttgacggaaccctgcttaacaccataggcgacctcgccgccgccggaaaccacacgctggaggtcatgggatttccgcagcacccggaggaaagctatcggcatttcgtaggaaacggcattccgaagcttatcgagagaatgctcccggcgggtcacgacaaagagaccgagcagaaggcgtacgacattttcatggagtactactccgcccacaagtgcgaccgcaccaagccctaccccggcattccggagcttataaggaagctccgcgcggctggaataaaatgcgcggctaattccaacaaggcgcatgaattcacgcaggagcttataaaactcagcttcggcgacgagttcgacgacgttatcggattcggcgcaggcttccccgccaagcccgaccccggagccgcgcatgagcttatccgccgtgcgggagttcagccctcagaggcgctgtacgtcggcgacagcaacgttgatatccagaccggtcacaacgccggcatagacgtctgcggagcactgtggggcttccgcggctacgaggagctttcagcgatgaaccctacatatctcgcaaaggacgccgccgagctggaaaagatcatcatgggttgagtgtgggcaatttcaattaaaatccagttggcatagtagtgaaattacacaaaaatataaataccacgggaaaattcttgtgaaaactgtagacaaatccgtccgttcgtgatatacttatatcaacggaaacaccaccgtaaaaaggtgaagctactcagacggaggcgatccatcatggctaagaagataattaccatcacaagacaatacggaagcggcggcagagaaatcggcgagaccctcgcaaagcggctgggcgtaagcttctgggataacaagctgctggacgttgcggcaaaggacagcggcatacacaagactcacttcgaggaaagcgacgagcgccgcacgaacagcttcctgtatctgctctcgaccacctacggtcagggtggagttccgtttgacgacgcgctgttctttgcacagctgaacgctattcagaagattgcttcgaaggaatcctgccttatcatcggcaggtgcgcggactatgccctcagggacttcaacaacgtggtcaacatctacatcacggctcccctggaggaccgcataaatcgcgctataaacgcctatggtatcggcgagaagcacgctgcggagtacgtaaagcgcatggataagcagcgtatctcctactacaactactacaccgacaagcgctggggcgttccagagaactacgagctgtgtctcgacagttccgcgctcggcattgaaggctctgtagacctgcttgaggatttcatcaagaaatattttaaggaataagtaaacgtccggggctgcttgattgcagtcccggattttgtttctaattaagaattaagtgcaggctgttggtctgcacttttttatttcagcaatcaatccgggaactccgcaagctccctgataaacacatcagcaaactgcgaaacgtccccgcggggcgcggtgttcgggtcgtatatcccgatgacccggaagcctgcattatgcgcagtctccgcgcagtaggcggagtcctccaccacggtgcattcagctatggaagcccccagccgctgagctgcctgcaggaaaatatccggcttgtccttgtgcgctcccgcttcggtgcagtcaaggtagaaccggaaaaacctgtccagcccgaatttcttcataaacggctcggacacccagcggtcggtagcgctcgcaatacacatcacggcgccctctgagtaaagccgctccagaagctccagcgctccggggcgcggctgaatgatctccgcatacttctccttcatcgccaggcggacctgctgcattcgctcatggtcgtagcgctcgtcctcccggaagcttccataccagtagcccatgctgtccgcgagggttccgtccaggtcaaatatgtagtatttcatagtacacttccttctattctattattccgtaggtgagtttcagcagcagcacccttgtgaccgcttcgtcgattcgctcctccggtatctcgccggattccaccgccgccgtcagagcctccgctgcggaagcgtagtcggtgcagcacagaatatccgctccggctttcagcgccgtgactgccgccgcgttttccccgcagtactcccctactgcgtccattgagagatcgtcggtcatcgccgcgccggtgaatccctgctcccgcaggaacgcatacattttcccggacagcgacccaagcaggctgtcgtctatgcagttaacgatattgtgcgacaccatcaccaccggagcgcctgcggatatccccgcccggaacggctccaggtcaagctccgtgatctcggaaagcgggcgctcgtctattgaaattcccgtgtgagtgtccaggttgttgccgtagcccgggaagtgcttcagtgcgcatatcagcccgctctgcccgtagctttccacagccgcgcccaccgcccgggaggtctgctgtggatcggtgctgaaagcgcggtcgtagatgaaatccgtctcggagcgcggcaggtcgcacaccggcgcgaggttcatattaagccccagggagctcatcagcccggatatctcctgcgcttcggaactcaccgcgtccagcccctgtgacagaacctcagcctgtgccgggaacggctccgcacggtactgcgggtactttgagatacgcaccaccgtgccgccctcctcgtccgccgcaaacagcattcgcagcttcgacgcgctctgtatctccgcgatttccgcggttatctcctccggagtgctgccgcggaaatccacgccgaacatcacgtaacctccaaggtggtatttctgcgcctcggacagcgcgttttctcccgggtaccttgctagtattacctgacccgctttctcggcggcggtcattcctgagagtatctcagctgcgcgctgttccggggttccggagtcttcggcggtagattccacggtcactgattgttcagttgactggatctgcccgtcagcttcgctattttcggaagttgctccaggttccccggagctgtcagcggctgtagattccgtcaccacggagggcgttggcagacctgaaacaagttcggtggactggcagccgctcagcccgcttattataagtaatgctcccgccaggggaagcagcagtttcttcatggctgtgctcctttcagatttatattagggaaactctaaaaaccggtttgaaaagggaaaatgggtagagtgcgccgaatgcgatgaaagccgacgaagtaaggctgtatgccttacgaggaggtttgaagaagcagtcggtgtgctatacacattttcactcgaacaaggtttttagaggtgaccattaatattgtacagcctggcgcgaaaattgtcaagcagctagttatagattgagtttatagctagctataaaaataaaggattagacaaatacctaccattgtgatatacttagtacagaaagaagaacacggaggtgctgaaatgaaagaaatcatgaaagccataagaaccgaccgaatgtgcagctcagcacgaatgtcacgaatgtgaagacgatcccgataacacggacgcgaaagaaaaaccaaaaactgaacaacctgaacaacacaaacgaacgaaattaattataatttggaggataaacaccatgtcagagaacaagaactacagatttgagaccttacagctccacgttggccaggagcagcccgaccccgcttccgacgcacgcgcagtgccgatatacgcaacaacttcctacgttttcaagaactccgctcacgcagccgcacgtttcggacttgctgacgcgggcaacatctacggcagacttaccaactccacccaggacgtatttgagaagcgcatcgcagctctcgagggcggcgtagctgcactggctaccgcttccggcgctgccgctatcacctacaccattcaggctcttgcaaagcagggcgagaacatcgtagctgctaacacaatctacggcggaacctacaacctgctggaacacacccttccgctgtacggcataaccgcaaaattcgtagatccttatgttgaaggctccttcgaggcggctatcgacgagaacaccaaggcgctgtacgttgagtccctgggcaacccgaactccaacgtagccgacatcgagaccctcgcgaagatcgctcacaagcacggtattccgctggtagttgacagcaccttcgcaactccttatctgctccgcccgatcgagtacggcgctgacatcgtggtacactccgctacaaagttcatcggcggccacggaacagcgatcggcggcgttatcgtagacagcggcaacttcgactggaagaagtccggcagatacgcatggatctccgagccgaatccctcctaccacggcatcagcttctccgacgcagtaggcgcggcagctttcgtgacctacatcagagctatcctcctgcgcgacaccggcgctaccatctctccgttccacgcattcatattcctccagggtctggaaaccctctcgctgcgtgttgagcgccacgtattcaacgcgctgaaggtagttgagtacctcagcaagcacccgcaggtagaggctgtacatcacccctccctcgcttccgagcctactcacgagctttacaagaagtacttcccgaacggtggcggctccattttcaccttcgaggtaaagggcaccgcagaggacgctcagaagttcatcgacaacctgccgatattctccctgcttgccaacgttgccgacgttaagtccctggttatccacccggcttccacaactcactcccagctcaccgaatccgagcttctcgaacagggtatcaagcccaacaccatcagactttccatcggcaccgagcatatcgacgacctcattgaggctctcgacactgcattcgcagccatcaagtaatttcccgcagcattgtcatcggtttttccttactgaatatattttccccgggaacttcccggggagcttttttgtccggaacacctgaaatcaggcgccactttgacggcatacaaagctatgccgcccgtgaggctgtcaataaggtttataaattttcgcgtagcgtattggttttcgcttccttttgcttacaaaaggaagcgggagcgtgaggtgtctcccccagcgggggaggtggcacgaagtgccagaggggctgaccgtaagaccagagccctcaccactctgcgcgctggcgcgcagttaaacgattcaatggcgctaaaggggtgtgggggaaaacaagagttttcccccacagtttttgaaatttactgccgttatgactttttcgacaagccgacgggcaggcgcattgcctgcccgtatcagattatccgccagaaccgcggtcactttgtgagcgaaattctctttatcgtgagatcgctgctgaatgttaccgcattatacatgaacatcgcctgctggtactccgaaaggtcgatgagcctgccgaggtcaacgttgatgtagcgcatatccaccatggttatcttgctgtagtggttcgcaaggaacggcaccagactgtgcgcgtagctgtcctttatcagcaggaggttcttgccgttgtcaacgtcggtctctatggtgactatcggcgaattgcttccggtgaagctggagtatttgtccttaacgtcaaggtagctgcggacgtacagactgtcgtatacagtctccttggccccgtcgaacaccgtcatttttaccttcggaccgccggaggcaaggtggaagtaatcaatgctgtccggagttactccgttgtccagcgttttggaatacagggtaccgcggaagctgctgcttgcggtctcaatattgaactggtcgagggcgtacgcgctgtagcccagagtctttgccgccgcgcagtacgcgtagtacgcgccgaggctcgtccagtgatggtcggtgcggtagaatacgtactccgagctgtgccccgtgaggtagctcaggcagtccaccgtgctgatcccgttcatcttcttgtagcactcgtcaatgaaggtcttttcgctgaggtacccggcgtaggacggtattttcgaagtataaagctcctgcaccgtcggcgccatcatgaagcttacctgaatatccgggtgagtctccgcgaaacggttcatcgcgttcagcgaggactcaacgtcgctcttgtcgtaggtcttgaaagcctgtatcatctggtcgtcaatggtgtaaactccgttgatctccttcttgcctgcgagcttctccatctcgttgcgggcgcgcacccactcctcgcggcctaccaggtggtcggaaaagtaggtctcgaatttatccatccagctgtcttcgtcgcgggtggtgatgtcgtcccagcggatagcgccgagcacatcgccaagattctccgccttgtccattttcgtgtggttaacgatatccgggaacttcgccagcgtgcggttctcgttttcgctgcgctcctgcttcgggagagcgacggtaactatcggcaccgtaagcagtattacggcgaacagcgccgcggtcagcttcgcgggggtcatgtgaaatttcttattcattcggctctcctttctcagaagttaaagtacaggaacggattgtagttcgaagtggaaaggtacgccactgaagcgagcatgatgaccgtatccacaaccgggaatccatactgcacccaggtcggagcctttttgcggatataatccgcgaaggtcttgagcacatcggagctgccgaaaatgcacactgcaaaaataataccatagtttacgatatagttcgttgcggtgtcgtctatgaacacaccgtttccgccgaacatcgccgaaatgaacgtccatatctgctcgaaaacgttgccgaagctgacagtcccgggagccaccgcgtcgaacattacccagccgaacaccaccataatgaacgtgtacagccaactgaaaaatgagggtatcttctcaagcacctttccgagaaacagccgctcaatcactatcaggataccgaagtaggtgccccacagcatgaagttccagcttgcgccgtgccagataccggtgatcgtccacactacgaggaggttgataatggttcgcggcagacccttgcggcttccgcccatcgggaagtagatgtagctcttgaaccagtcgccgagcgtgatgtgccagcgccgccagaattccgcaacgctgtgcgacatatagggatagttgaagttctccgggaagttgaatcccatcatctttccgagacctatcgccatatcggagtatccgctgaagtcaaagtagatctggaacgtgaacgcgaggataccgagccacgccgtcactgcggagagctcgccgtaatccatcgcctttatctcagtccacagcagacctatgttgttggctatgagcaccttcttgccaagcccgacgatgaatcttgagataccgtcgccgatcatcttttcggtgatggtgcggtcgtcgatctcgttctggatatcctcgtaccttacgataggccccgccacaatctgcgggaacagcgtaacgaacgccatgaagctggccgcgttcttctgaacctttatctgccggcggtagaggtcgatggtgtagctcatcgactggaacgtaaagaagctgatgccgataggaagcggcaggttcgggttcgggatagcgatcccgaatccggcgttcagagcctcaatgatgaacccgaggtacttgaacgtagcaagcaggccgatgttcattatcagcgagaccagcaggcacgccgttcgtattttcggccggtcgtcgtatttgtcgattatgcggccggcggtgtagtcgatgaaagtcgacagtatcatcaccaggacgtatatcggctcgccccatgcgtagaacacaagtccgcttatcagtatgacgacgttcttggctttcttcggcacgaggtagtacaatatcagcgttatcggaagaaacgcaaacagaaatgttaagctggaaaataccat

SEQ ID NO: 685 - DNA, 24841 bp, unidentified
  source 1..24841: mol_type = unassigned DNA
cgacacctgcgacgcactttcaagctacggcgataccgcgaagaagctggaaattttaaaggacccccactgcggcgcgttcgcggtcattcggctgtgcagctactttgcggcgtattttgcgctgtgcagctgtgtggcgttcaccccgcgggtcggcgtgctctggacgctggcgttggtgggggagcgggcgctgtccgggctggccgtggcggcgttcccgctggcgaaaaacaccggccttgcccacacctttgccacggcggcggaccgcgtccgcgtgcggcaggtgctggccgtgctctgcgccatgctggccgtggggctgactgcactgggcggctgggcgctggtgctggccgcaggctgcgtttttgcgcggtactacgttgttgccaaaaaccagtttggcggtgtgaccggtgatctggccgggtggttcctgcaaaaatgcgagatctggatgctggcggcgctggccgcctgccaatggctgggggtgctgtaaatggtgtttgtgacagggccgctctgcagcggcaagcgcacctttgcgcaaaagctcggcgggcggcaggtgtacgacgtgcaggatttggccgccgacgccgccgatttgaaccggctggccgacgagctggcagattatgatgttgtgaccgcggcggaggtcggcggcggcgttgtgccgattgaccccgccgcgcgtgccgcgagggaggcggcgggccgtctggcctgtctgctggccgcgcgggcggactgcgttgtgcagatgttttgcggtctgccgacgattttgaaaggagaacttccgaaatgctgatttatttactgcgccacggcctgaccgagtacaacgcccagaagcgctatcagggtcagcgggacatcccgctctcgcccgaggggctggcccagctgcgccgggctgatattgacccgaaggttgtctatatttccacgctgcagcgtacaaggcagacggcggaggtgctgttcccggacgcggagctcgtgcccgtggacgggctgaaggagatgtgcttcggcagctttgaaggccgcaattatattgagatggagcacgaccccgactatcaggcgtgggtcgccgccaactgcgagagcagctgccccgacggtgagcgcaaggatgatttcagtgaccgcgtatgccgcacgtttgcggcgctggtggacaaggcgctggccgacggcgaggaaatgctggtgatcctggcccacggcggcacccagatggccgcgctggagcgctacggcgtgccgcgccgcagctattaccggtggtgcggccccaacgcgggcggctatgtgctggacgcccgcgactgggcggcgcggcatgagctgcgtttggtcaagaccgtgcagtacacgaaggagagcacatgctgattttttgggcggtgctgggcggctttttgctggacgctctgtttggcgacccggcgtggctgccgcatccggtggtgctcatgggccggtgcatctcggcgctggaaaagcacctgcgcaccgcactgcccaaaacgccgcggggcgagctggccggcggggccgcggtggccgcggtgctgccgttgggcacgctggccgttaccgggcttgcctgctgggccgcggcaaggctccatccggcgctggggctggcgctgcaaatgctctggtgcggccaggcgctggcagccaagggtcttgcacaggagagccgcaatgtgtacaaggaactggcaaagggcgacctgcccgcggcccgcagagccgtggcccgcatcgtgggccgtgacacgcaaaacctgaccgctgcgggcgtgaccagagccgccgtggagaccgtggccgagaacgccagcgacggcgtcattgcgccgcttttgtatatgctccttggcggggcaccgctggcgctgacctacaaggccatcaacacgatggacagcatgctcggctacaaaaacgaaaaatatctttatttcgggcgctgtgccgccaaattggacgatgccgccaactggctgcccagccgcctggccgcgctgctctgggtggctgcggcagcgctgacgggcaacagcgcccgcggggcgtggcgcatctggcggcgggaccgccgccgccacgccagccccaacagcgcccagaccgagagcgcctgcgccggggcactgggcgtgcagctggcgggcccggcctattactttggcgaatattacgataagccgacaattggcgacccgctgcgggagatcgagccgtgggacatcctgcgtgccaaccgcatgatgtacgccgagagcctgctggcccttgtgctggggctggccgtgcggctgatgcttgtcttgtgagggaatgcggaatggaactggtacacggcggcgactgggcgggctatcgggccgagtttggccgggacgcgctggatttttcggccaacgtcagcccgctggggctgcccgcgggcgtggcggcggccatcacagcggcactgcccatggcggatcgctacccggacccgctctgccgggcactgcgcactaagctggccgcggcagagggtgtggatactgcgcaaattttgtgcggcaacggtgcggcggacctgatctaccgcctggcactggccctgcgcccgcggcgcgcattgctgcccgcgccgacctttgccgagtacgctgctgcgctggaaacggtggattgtgacgtacagcggtttcttttgcgggaggaaaacgactttgccgtgacggacggctttgtagacgccatcgacgacagcaccgatgcagtgttcctctgccagcccaacaaccccaccggtcaggtcacaccgctcgctatggtgcaaaagctgctgcgccgctgtgccgactgcggcgcggtgctggtcgtggatgagtgcttccttgacttcctcgccgcgcgggatgccctgacagctaagacagttttgcgcgatgcaccgaaccttataatcttaaaggcattcaccaagctctacgctatggccggggtgcggctggggtatgcgctgtgcagtgacgcggcgctgctggacaaaatgcgcgcggcgggtcagccgtgggccgtgtccggcctggcacaggccgcagggctggccgcactggaggagaccgcctatgccgacagcgtgcgcacactcattgccgaccagcgcccaaggctggccgcgggactgcgggcactggggctgcgggtcgtggacggacaggccaactacctgctgttccgcgcaccggcggactttggggcaaagctgcgccgtcacggtgcggtggtgcgcggctgcggcaactacccggggctggacgagacgtggtaccgcaccgctgtgcgcacccaaaaagaaaacgaacagctgttgaaaattatgcgggaggtgctggcatgagccgggcagggtgcatcatggtgcaggggacgatgagcggcgcgggcaaaagcctgctgtgcgcggcgctctgccgcatttttgcgcaggacggctacaaaaccgcgccgttcaaaagccagaacatggcgctgaacagctttgtgacccgggacggcctcgaaatgggccgcgcacaggtcgtgcaggcgcaggccgcgggcgtcgagcccgatgtgcggatgaacccgatcctactcaagccgagcagcgatgtgggcagccaggtcatcgtgaatggcgaggtccgcggcgatatgcccgcaaaggaatacttccgccgcaaaaagtcgctgattcccgatattctgcgtgcctacgacagccttgccgatgaatttgacatcatcgtcatcgagggcgcgggcagtcccgccgagatcaacctgaaggcggacgacattgtcaacatggggctggcaaagctcgtggacgcgccggttctgctggcgggcgacattgaccgcggcggcgtctttgcgcagctgtacggcacggtggccctgctggagccggacgagcgcgcgcgtatatgcgggcttatcatcaataaattccgcggcgacgtagaaattttgcgccccgggctggcgatgctggaggaaaaaacgcagctgccggtgttgggcgtcgtgccgtacctgcgggtggacatcgaggacgaggactcgcttgcgccgcggctgcaaagcaaaagtgcggtcaagccgctggacgcagctgttttgagattgccgcatatttccaattttaccgattttatgccgctggaacagcacccgcttttgggtgtgcggtacgtacagtccgtgcgggagctgggcgcgccggacctggtcattctgcccggcaccaaaaacacggtgaacgacctgctgtggctgcgccagtccgggctggaggccgctgtgctcaagctggcagcaggcggcacgccggtgctgggcgtctgcggcggctatcagctgctgggcgagacgctcgacgacagtcagggcaccgagagcggtcatccgcagacgctgcgcgggttgggcctgctgccgacgcggacggtctttaccgccgaaaagcgccgcgcacaggtcacggcgacggctgccgcgccctttgccggggctgcgctgaccggatatgaaattcacacgggccgcaccgcggtgaacggcgctccgttctgccgctatgccgacggcacaccggagggctgcgtgcaaaatgccgtgttcggcacctacctgcacggcctgtttgacagcggagaattgacggagcagctggccgcgtacctctgccgccgcaagggaattgcgccggagaccgccgcgccgcttgcgatggccgactaccgcacacagcagctggacctgctggccgacggcgtgcgcagtgcgctggacatggacgccgtctacgcggccatgggtctgcacaaccccagaggagggaaaaaatgacaccgcagcatcatctgcccgccgacattgagcgcacgagcatgggcattatcacggcggagctggccgcgcgcgggcttgcggttccgtccgaaaacgccgccgtggtcaagcgcgttattcacacgacagcggattttgactacgccgagaacctgcgcttcacacccggcgcggcggcggcgggcgtcgcggccatgcgtgccggggcagtggtcatcactgacaccaacatggcgctggcgggcatcacaaagcccggtctggccaaattgggcgggcaggcactctgctttatggccgaccccgctgtcgccgctgctgcgaaggcggcgggctcgacccgggccgccgctgccatgcacagggccgcgcgggagtaccccggcgcggtgctggccgttggcaacgcccccacggcgctgctgacgattgcggacgagatcgaaagcggtctgcgccccgcgctggtcatcgccgtgcccgtcgggtttgtgaacgtggtggaaagcaaggaacggctgtttgcggtttgcacgcagtacggcgtgcccgccatcgccgccatgggccgcaagggcggcagcaacgtggctgccgccatctgcaacgcgctggtgtattccgccgccgagatgctcgaccctgcggcaagaggttggcagtaatacactttctaccccaggtgtttccctacaacagaaaattttggcgcggaggaggcgttttgcctcctccgcttttttgtttccctatagctttcagccttatgcgtgaagatggtgtttgagctttctgtaactgctgacgtaatttttcataatgcgctcgcttttgcttgactgcgcgaccatttacgaatgtggattttcgtttaaagacgttaaatggcaataaaattacggaaatatcaggtcagggcccaagcgcccatcagaatggccagaaacactacattggaaatagtaaacatcgcaaaatagtgccctttttcagcaggtacttcatttgcaatctgtcgataagaaatcaggcttgccatggatgcaattaatgtgccaaggccaccaaggtttgtgccaataatcagcgcacggaaattatcggtaaatccagaaagcaggatggaagcaggcacattactggtcacttgagaggccagaacggatacgaaaacctcatggccggccagaatattctgcaaccatccagagaacgcttccatccgacctaagttcccgatgaaaatgaacagtgctacaaaggtaagaatcagagaatagtctacgcggccaagagtggggcggtcggcaaagaaggtgcacaccaagatagcgacaaatgcaacaccgtatgggagaacacgcaatacaaccaataaacaggcgacaaacagaataccgtacaacgcaatgagtttcttgttgggttctgagtttgccgcagaatgagttacaacaatgtcggaaccttcacggcatagccatactgcccatattgcaataagcactaatgatatgatggaataggggagcatcaacagaacaaaggaactcatatccatcccgctcttgccatacaaatacaggttttggggattgcccagtggtgtaagcatactgccaaggttggcagctatcgtctgcatacagacgatagggaggagcagtttgctgcgaacagatgcgttcaaacgattcagaacgacaaacgtaaatggcacgaatgttagcagcgatacatcgtttgttatcagcatactgctgaagaagcataggccaacgagaacaactgttagctgcaaagtggtgcgggtatgagataggagggcatggccgagtctatcaaatacgccttgccctctcagtccggccataactgtcattagcgaaaacaggattgcaagagtacggaaatcgatatatccgaggtattctgcgtccggggggacaaagaaagcggaaatgatcgccaaacaagtggcaatgctcaggacgggttctttctgaaaaatgtgcttactcatcataaataagattctcttcccaatcattcgttatctcttccggacggcaaaaccaaaagctgtaccgcaaataccaccgacaatgtgcataaagttggctacactatcttgtataaagaggatactgtatatctgctggcttaagtacagcacaccaaccaagatgaaggtgatagggatacctccattcttactgccggccaaactggagagcatgatgagcatgaatacgataccggatgcaccaagcaatgcagaagtggggaacagcacacactgcaatatgccggataccagcgcggtcataaggataccgcttagaagtgttcggcttccgtatcgttcttccaaaggtggagcgacaacaaggaagaggagcatattgtttataaagtgatcccaaccgccgtggccaaggacatgaccgaacaaccggacataaaagagaggatccgtcatcgacgagcgatacacactaaacaggtgcgaagttgtccagttgtttgttaagtagcccaataccagagaggcgagggacaaaaagaaaaaggtcagtgtgacgggggcattgtattggagccggatgctgctgcgtttcatagaagttcctccatccttattggatagtattagtatagcacattagagcgaaatatgttgcagaatagaaaataatctgggagagtaaaagaaaaagtaaataaaaccatttaaaagcgattggatatttcacagggaatatatgcagcagcggtcaaatcgcagtcagcaagggctgcccctgcgggaggataatttgtgtgcttccctttttataataccggacgaggagtaaaacggcaattcaattagataaatatttttacctaataatattgacattcgaaacaaacgtggtataatgacctcattgacaattacgtcaatttatttagttaaattatgtgaggtacgtaatatgagctttgaagaagtaaaagaagtatttgttgacaccctgaactgcgatgctgataaggtcaccatggatgccagcctgaccgacgacctgcaggcggacagcctggatgcggtagagctgaacatggcgtttgaggacaagttcggcgttacgattgccgatgaggacctggggacgctcaaaaccgtgggcgacatcttcaactatctggctgcgcgggcagcctaaagggtattgcaggatgagtgccattgaaaagctgttcccgaccagcccgcaggagcgcagctttcagatgaaagcccgccacgatgccggcacggctgcgcccaactgggtgccgccgcaatttgtcgagtgcaaaaaatgcggccgccgtgccacgcggcaggtttgggtcaagagccagtatgtctgccccaactgcggggtgcatttggcaatcggcgcctattatcggctcagcacggttctggaccacggaacttttaaagagctgaacccggacattgcgcccaacgatgtgctgcattttcccgattatcaggaaaagctggccgctgcttcgggcaagaccggcctgaaagaagccgccgttacagcaatcggcaggatcggcggcgtgcaggcggtggtcgctgtgctggacagccgtttttttatgggcagcatgagcaccgctgttggtgaaaaaatcacacgtgcgattgagtacgctgccgacaagcacctgccgctcattattttttcagccagtggcggcgcacggatgcaggagggcattttcagcctgatgcagatggccaaaaccagcgccgcgctggaacggtttaaccgcagcggcgggttgtacatcagcgtgctgacccaccccaccacaggcggagtcacggccagctttgccagtctgggtgatattacgctcgccgaaccgggggcactcatcggctttgccgggccacgcgtcattgaacagaccatcggtgaaaaactgcccgacgggttccagcgcagcgagttccagctggaacacggttttgtggatcaggtcgtaccgcgcaccgagttgaaagaggtcttaacgcggatcttgcagctccacacgcaggggaggaagcgcagatgatcaaagaagttttgcagcagttggaaccgctggacgcgcagatcgacgcgctgtgcagccgtgccgatgacgccgaaatggcgagcacgaccacccatgcggctgaactggctgagctttccgcagaggaaaacacgcttttacagcgatgcacctcgctgacgccggaggaccgcgtttttctggcccgccgccctgaccgcccgcacattaccgaaatgatcgacaacttgtttaccgacttttttgagcagtgcggtgaccgacaatgcaaagaggatgcggccattttatgcgggatcgcacggttccacgggatgcccgttaccgttttggggcaccgcaaagggactacgctggaagaaaacctgcgctgcaactttggtatgccgggaccggagggctaccgcaaggctctgcgcgtgatgaaacaggcagaaaaatttcaccgtcccatcatcacttttattgacactcccggtgcttaccccggcaaggatgcggaagaacgcggccaaggggaagccattgcccgcaacctgatggagatgagcggcctgaccgtaccggtgttggccattgtcacaggcgaggggtccagcggcggcgcgctgggtctgggcgttgccaaccacattctgatgctggaaaatgccgtgtactcagtgctcagccccgaggggtttgccagtattctgtggaaagatgcttcccgcagcggcgaggcctgcaccatgatgaagctgacggcacaggacctgtacgcagatggcattgtggaagaagtgatccccgaaccgctgggcggcgcacagcgtggacggcagctgcttttcagccggttggacactgccattgcagtgcaccttgccgctttatgtaagatgagcggcaaagcgttggcagaccagcgctacaaaaaataccgccgcatcggagaaatgaggggcgcatgaaaggtttacagctgttggctaccggcggggcattgcccagccgtgtagtgacgaacgaggacttgcgccgacaggtggacaccagcgacgaatggatcacgacccgcaccggcatctgccagcgctattactgcaccgaaaacgaggatgccgccacgctggctatcaccgccgcccgtcaggccctgacccgcagcggtctggcggcaaacgacattgcctgctgtgttgtggcaacgctctcggccccgacggctaccccaagcattgcctgccgcgtacaggctgccttgggtctgccggaaaaccggcctgcctttgatgtgaatgcggcctgttctggctttatttatgccgccgccgcggcccacgggctcctgagcacgctgggcgggcggtatgcgctggtcattggctgcgaggcactctcccgcatggtggacccgactgaccgcacgacctgtgtgttgtttggcgacggcgcgggtgcggctgtttttgagctggccgaaaatgtaccgttcgccgtaacgttaggcgcacggggcagtgaagcgatccgcgcgggcggccctgcggcctgcgataccgcaccgatcacgatggacggcaaggcagttttccgctttgccgtggaggctatgccgcgctgtctgcaagccgtgctggaccgcagccaaaagacattgtctgatctggactgggtagtctgccaccaggccaacagccgcataattgaccattgtgtcaaaagtttacacgcagaaccgtcaaagttttacaaaaacataagccgtcacggcaacaccagtgctgccagcatcccgattgccctgcatgaaatggcggaaagtgatctgctgcgacccggccagacgctggcctgcatcggctttggcggcgggctgacatggggcgggatgctgctgacgtatgagggtggaaaatgaagctgctcaatgaaattttaggtacaaaatatcccattatacagggcggcatggccaatatcgccacgggcgagtttgccgctgcctgttccaacgccggggcgctggggctgatcggctccggcggcatggacgcagactccctgcgggaaaacatccgccgctgccgcgcactgaccgacaagccctttggcgtgaacatcatgctgatgcacccgcaggcggatgaatttgccaaaatcgtggtggaggagggtgtaaagctcgtcaccaccggggcgggaaatccgggaaagtacatggccgcgtggaaagcagccggtatcacggtcatccccgtcgtggcggcagccattttggccaaacatctggaaccgctcggcattgacgccgttattgccgaaggtaccgagagcggcggccatgtgggcgagatggccacgatggcacttgtcccgcaggtcgtcgatgccgtccatgtgccggtcatcgctgcgggcggcattgccgatggacgagggctggctgctgcgctggcattgggggcgtgcggtgtgcaggtcggtacctgtctgctggcgagcaccgagtgccccatccatgaaaactataaagccgccctgttaaaagcccgcgacagtgataccatcgtgaccgggcgcatcggcggcacccctgtacgtgtactgaaaaaccgcatgagccgcgagtatgtccgccaggaaaaggccggggctgataaaatggcgctggaacgcttcactttaggcagtctgcgcaaggctgtgtttgacggtgacaccgagaatggcagcctgatggccggacaggccgcagggctgctgcacgaagtccgcccggtggaagaaatttttgccgcgatggtaagcgaagccaaagactgcatcgccggggtgtacaaggagatcaccttatgaaactagcatttttatacgccgggcagggaagccagcacgccggtatgggccgggatctttacgagactttcccggctttccgcgctgcttttgacgaagccgacgcggcggtggattttgatttgaaagaagtctgctttaccgacgcagccggtgtattgaacgagacccaatacacccagccctgcatgacggcgtttgccgctggccttactgccgtactgcgggaggcaggcgtcacaccggattatgcggcagggctgtcgctgggggagtattccgccctggcctgtgcgggggtgttcgatgtgcagaccgcagtcgctttaaccgctttccgcggtaaggcaatggctgcggctgcggcggggcgcacctgcgggatgacagccgttttggggctggacgaagcccccttgcaggcatgctgcaatgcagccgccgacgaaggtgttgtgcagatctgcaactacaactgccccggccagctggtcattggcggcgacaaggccgctgtcgataaagctgccgagttggcgcttgctgccggggcacggcgctgcctgccgctgaatgtcagcggcccgttccatacctcattgatgcacccggcaggggatgcactgcgggaaaaatgtaaggctgtccgctttgcgccgatgcagttccctgtgctgttcaactgcctgggacacgagatggaggaaaccgacaccattgccgcgctgctggaaaaacaggtgcagtccggcgtgcgttgggaggtgaccgtccgccgtctggcagaattgggcgtggacgccgccattgagatcggtcccggcagggcgttgaccgggtttgtcaaaaagactgtgggaagtgccatctcgtgctatccggtggaaactgccgcgcagctgcaacagctgctgcgcaccatgaaaggagcctgaccatgccgcaaaccgaaaacttgcgccgtgccgctctggttacgggcggggccaaaggcattggccgtgccatttgccgggctttggccgaaaacggcatgaacattgccgtcaactatgccggcagcgctgccgctgccgaggaaacagccgcagcctgccgcgcccttggcgtgcaggctgtcacgctgcaggcggacgtgcgcagccccgaagcatgtcagaaactggtagaagataccgttgccgcttttgggcggatcgatgtgctggtcaacaacgcgggcattaccgccgacaaattacttctgcggatgaccgaagctgattttgacaatgtgcttgccaccaacctgaagggggcgttcttctgcaccaaagcggcctgccgctttatgatgcaccagcggtatgggcgcatcatcagcgtcagcagtgttgtcggtctgcacggcaacgcgggtcaggccaactacgcagccagcaaggcggggttgatcggcctgacgaaaagcgctgccaaagagtatgctgcccgcaatatcaccgccaacgttgtggctcccggttttattgcaacagatatgaccgccgtgctgtcagaaccggcccgtgccgcagcggaagcggccatcccggcaggcaaaatcggccatgctgaggatgttgcggcagcggtggcttttctggcaggggagcaggccgggtatattaccgggcaggtcctttgcgttgacggcggaatgggaatgtgaggtgtgcaatggacacaaaaaagaaacgccgggtcgttattaccggccttggcacggtaaatcctaccggtaatacggtggcagaaagctgggcgaacattaaggctggccgctgcgcagtaggaccgatcacggcttttgatacggctgattttaaagtaaagctggccgcagaggtcaaggactttgaccccgccgcgcgcatcgacaagcgcgaagcccgcaaaatggcacgctttacccagtttgccgtggccgccgccgacgaagccatccgcgacagcggccttgcgctggaagaaatcgaccatacgcggtttggcgtgatcctttccagcggcatcggcggcctgcccaccatcgaggaagaacacacccgcggtcagcagcgcggctttgaaaaggtcagcccctattttgtccccatgtccattggcaatatggcggcggggcagatcgccatccgttttggcttgcagggcatgtgcagctgccccaccaccgcctgtgcaggcggcaccaatgcaatcggcgatgcgttccaccgtatccgcgatggatacgaggaccgcatgctctgcggcggcagcgaaagctgcatcagcccgctgggcgtgggcggctttgccagcatgaaagccctttgcacggcggacgacccggcccgggcctcgatcccttttgatgcccgccgcagcggctttgtgatgggcgagggcagcggcgtactgctgctggaagaactcgaggccgccaaagcgcgcggtgccaaaatttatgccgaggtcgtgggctatggcgcgaactgcgacgcctaccactttaccgccccggcaccgggcggcgcaggcggtgcggcctgtatgcggctggcgctggccgacggcggggtagtgccggaacaaatcggctacatcaacgcccacggaacgtccacccacctgaatgacagctgcgagacaactgccatcaaaacggtgttcggcggccatgcgtacaagctggccgtgtcttctaccaagtcgatgaccggccatctgctgggcggtgcaggcggggtagagggcgtatttaccgcgctggccctgcacgatgcctttttgcccgccaccgtcaatttgcaggagccggacccggagttggatctggactatatccccaaccatgggcgcgcggcgcaggtggaatatgccatgagcgatagtctgggctttggcggccataacgcctgcgtggtattcaaacgctgggagggatgaggatgaactatacgccaaatgagccgccccgagccatgagcgcggcagagatcgaagagatcctgccgcaccgttacccgtttgctttggtggataagatcctggactacacccccggccaatgggcgcggggcgtcaaatgcgtgacccgcacggaaccgttttttgagggacactttccgggacaccccgttatgcccggtgtgctgattctggaagcgctggcccagaccggggcggtagccgcgttaagcctgccggaaaaccgcagaaagctcgccctgttcggcggcgtaaaaaacgcccgtttccgccggcaggtcatacccggcgatgtgctgatattggaatgtgagctgatagaacagcatggcccggtaggcatcggcaaggccaccgcatgggtggacggcgtgcgcgcggccaacgccgagctgacgtttgttatcacggatgcctgagggctggttttacatggcggaatgtgctataataaatccactaacctacagggggattctcgctatgctggaccagacattcggacgggtatataccaaattcaaactgcacttctataagcagatcttcagtcgattcgaggatcgcgaagccacgctgacgacggtagaatctttctgcatggaagtcatcatggcattgggcgaacctacgattgcgcagttcagccacatgatgaatctttctacccccaacgccgcgtataagatcaactcgctggtcaaaaaaggctatgtagagcgcatccagtccaccatcgacaagcgggaataccgcctgcgcccgacccaaaagtacattgattactataacatcagttattcctacttgcaccttgtcatggagcgcgctaaacagcgcttcggtcccgatgacctggctaaattggaggaaatgctgcaagtcgtctccgatgagctgatgccggagattcaactgcctgaataatatacaaaatgtgaaccactccccatggagcgattcacattttcagactgtcgaaaaactcttgtaggggcgagcattgctcgcccgcacccgtttgccttgtaagaaaactatcccagaaaatgcgttgctgcggtaagttgacgggcgaccaatggtcgcccctacacacgcaatagagcaaaaatgcagttttttgacggtctgaaaaatagccacctgagatgccgaaggtcacggatttcagatggctattttttatatttgcttacgctacccagcgaaaaaatcttgaaacgattccgaggcaatgctataatacgtactgtatacgttggtatatactgttcaagaaagctgctgacaacccgatgcgatggaggctgccatgaccttcctgaaatcggcggtgcggaaatgaaatcaaaatgcagccgcctggggcggagaaagatgggaaagaatgaaaaactccggaacgcgcaaagccatgcagaccccgacatggagaagcatctgtgcgatgctgtgcctgctgctgttgctgccagctctgtttcccgtgaaggctgccgcagaaaccgtccctgcaaaggtcgtccgtgtcggctcatttgaggacaccttcaactatgtcaacgagaagggcataagaaagggctacggctacgaattgctgcagaccttatccggctatacaggctggcagctcgagtatgtgacctgcgactggtcagactgctttgaaaaactcaaaaacggcgaaatcgacattatgggcgatatttcctatacggaggaccgcaccgaggagatgctgttttcggacgagccgatgggggaggaaaaagattacctctacgccgatctctcgcgcgaggacatcaccgcttccgacttcaagacgctgaacggcaaaaagatcggcgttctgatgggaaccgagccggaggtgatgctgaccgaatgggaagaaaaatacgacctgaaaacgcagcacgtcaacatctccaacaatgaggatgccaagcaaaagctggcaaaccatgagatcgactgctttgtttcgatggaagaatccttctggacggagcttggcatctcgaccataacccgcgtgggaagctccgacatctactatgcaatcaacaaagaccgtgcggatatcaaggaagaactggacaatgcgatgcgcgcgttggaggacgccgatcctttttatacggcggatctctataaaaggtatttctcgatggattataccccgatccttacgggagaggaaaaggcgtggctcaaaaagcacggcgcgatcagaatgggctttctgacgggtgacagcggcgtcagcgtctatgacccttccaccggggaacttaccgggaccatcacggactatattcggtttgccaaggattgtctgggaaatcaggaactggaattccagatggtcggctatgacagcaaggaagcggaactcgatgcgctgaaatcaggcgagatcgacatggttttccatttcgaccagagccccaatctggcggaagagtatcgcgttgcctgtaccaacacaacgtggacctccaacatgatggcggtcacgaacaaagagcactttaacgaaacccaagcgaaccgcgttgccgttccccaaaacaagatttccctgacaaggtaccttgcggtttattatccgcagtgggagatcgtggactgcgctgcacaggaggatgcggcaaggctggtcaaggacggacaggcggactgctttgtcacaggggtcagcagccaggaaaactacagcaagaaatacgacttttacagcgttccgcttccaaaccctgccaaatcctgctttgcggtcaacagcggaaacggcatcttgctgtccatactgaacaaaacgatcaaggcgatgcctgccaatatgcttaccggcgcgctggcgatgtacaaaagcgccgcgcggaaggttaccctgagtgagttcataagggataacttcttcatggtcctgctggtcagcagcatttttgttgcagccattctgctcgcgatcctgaagctgctccggaaggcacgcaaagccgaagctgccgcaagaaaagccgcgaacgatacgcaggagctgaatgcaaaattgcagatcgctgcggaaaacgccgagagcgcaaaccgggccaaatccaccttcctgttcaatatgtcgcatgacatccgcacgcccatgaacgccattatcggctacgcagaccttgccgtccggcattcggacgaccctgcaaagctgaaaaaatatatggagaacatccaggtgtgcggacaaaacctgctgatgctgctgaacaatgttctggatcttgcccgcatcgagaacgacaagacggagatggagtattcggtttcggatgtcgagaaggatttccgtaattgccttgccatgttccggaatcaggcagacagcaaggggcagacgcttacggtgacgacacagctgccgtatccgtatatctatgcggatattccgcacctgacggaggtctgtacaaacctcgtcagcaacgctgtcaaatacacgggggccggcggtacgatccgctgtggcgttacgcagaagcccggcgaaaaagagggctggtgcgatacggtggtcacggttgccgacaacggaatcggcatgtcgcaggagatccagaagcatatctttgagccgtttgaacgggaacgcacgtccaccgtaagcaaggtggaaggcagcggcatcgggatgggcatcgtgaaaaagctggtcgggctgatgggcggcaccgtggaagtggagagcaagatcggtgttggctccacctttaccgtgaccattccctgccgcattgtgtccgaggaggaagcacaggcgaaacgcgcggctgaccctgcggacagggagagcctgcgcggcacaaggatcctgctgaccgaggacaacgacctcaatgcggagatcgccaccgagctgctgcaggaagaaggctgtacggtagaccgcgcgaaagacggtgtggaatgcgtggatatgctggaaaaagcggcaaacggaacgtatcagctgatccttatggacgtccagatgcccgtgatgaacggctacgatgcaacaaaaaagattcggaaaatggacgatcctcaaaaagcaaatatccccatcgtcgccatgacggcaaatgcgttttccgaagataaacaggtggcgctggacgccgggatgaacgaccatatcgcaaagctgatcaatatgagcgttcttgtaccgaccctgcggaaatacctttgatgcggacagaaagtcatcgcatataagaacgactcataaataaataccgccggggagccttcccgtttttgggaaggctccccggcggatttttgtgaagcgcagcttatctacctgaaatagcatgcacaccgcaatgtgaaggttttctttatggcgttctgcggctctgccttagttgggcgcggtactcggcgggggtgatgccgtacagtgcgcggaaactctttaaaaagctgctgtaatttgcaaagccgctggcggtgcaggcgtccagtacgccggtgccgtcggcgagctcgttgcggcagtgctgcatacgcaggttggtcaggtacccgtgtatactttccagcgtgtactctttgaacacgcgggacaggtgctcccggctggtgtaggtgtactttgccagctgggccacggtcagatgcgggtcggtgtagttggcctgaaggtaagcaaccgccttggcgacgagaagactggtggccgagggcggcggggcattgtgccgccgggtcacaacttggctgataagcaaaatcagctccgtgacctcgcagcattgcacggtatcgcgtattttttcatcgagatacacggtctgggccatccgctccagcagaccgcggaagtcccactgcgtgacggcgtcagtgtccagaatgacagggtcccccgaccagacatgccgcggcaggccgctttgtgcccaggcacgctcccagatgccgggagctatctgcacgacgagccgctccgaggtcgtgtccgtgatgttgaacttgccagagtggtacatctcgcccgggaacagtatcagctctcccaggtgcagatcgtagacactgccgtcgacggagtagcgcacgctgctgcccgccaccggcagtatcatctcataatacgggtgggagtggaccaccgactggacattctcccggtttgtatacaggcccacgacaacctgaccgtcctgcagggcggcactggcatcctcctgcgtcagaatggaatccacgtaatgcggcattttttgcaggatcatgagcgacgcctcctgttaaattttgtctttaccacgattatatcacattttgcgacatttgcattacaaatacggcagaaattttgtgaaggatttgttattataaaggcgaagaagggcacaatgcgcagattgtacaaaatatattatgcaattttgtacaatatgcacattgtctgccaaataacaagttccaccattcaagtatacgcaaaatagaaaggagaaaatctatgaaagtgtgctacaccggcggcgctgtcaaggactgcggaagctattattccgtagccaccaacgctgtagagctgcgcatctggttcctgaccgacgatatactgcgcatccgcgcgggctttgacggcgactgggatgaagcctcctacagcctgaccatgaccgcatgggagtcccgcaccgacgagctgatgaaggactgccgcaagcgcgtccagtccgccgccgcagccctgaccgacggcgacaggcaggccgtcatccagggggcgcgtctcaaggtcgtcatcgagaaggcaccgttccgcatcatggtctatgataaggacggcagcctgctgcacgccgacattcccgacctggcctaccgcgaggacagcaaccaccgccgcatccacgccagccagatcgaggcagacgactgcttctacggcttcggcgagaaatccggcgagatcaacaaggccgagaaatacatgaatatggctcccggcgacgccatgggctacaacgccaaggagacggattccctctacaagcacattccgttctatatccgcctgaaccgcggcacgaagcaggctgtcggctacttctaccacaataccgccgagtgcgatttcaacatgggccgcgagaagcgcaactactggcaccgctactcgtcctaccgcaccgacgcgggcgacattgacctgtttttgatcgcaggcccgtccatccgcgagatcatcgagcgctacaccgacctgaccggcaagagcgtcatgctgccgaaggccgcgctgggctacctcggcagctcgatgtactaccccgagctgcccgagaacagcgacgatgccgtgctggacttcatcgacacgacccgcgaggaaggcatccctgccgacggcttccagctgtccagcggctactgcgccgttgagaccgccgagggcatcaagcgctgcaccttcacatggaaccacaagcgcttcaaggacccggcagactggttcgcccagatggaaaagcgcggcattgttgtctcgcccaacatcaagcccggtatgctgctcgtccatccgctgctgaacgagatgaaggagaagggcatgttcctgcccgcctccgacgacaatgcaggtcttgacggtctggctgtcggtacctggtggggcggccccggcctgtttgtggattacacgaaggaatccacccgcctgcactggaagcagtacattaaggatgcgctgctgaaatacggctgccgttccatctggaacgacaactgcgagtatgactccctcgttgacaaggacgcaaaggtttactttgagggcaagggcagcacgattggcacgatgaagccggtcatgagcaacctgatgtgccagctgtccaacgaggccatcgaggagtatgaccccgactgccgcccgttctcggtctgccgttccggtcatgcgggcatccagcgttatgcgcaggtctgggccggtgacaacctgacccactgggataccctgaaatacaacatcgccacgattctgggcatggcgctctgcggcgtgtccaaccacggctgcgacatcggcggcttcttcggccccgcgccggagggcgagctgttcgtgcgctgggtgcagaacggcatcttccagccgcgcttctccatccactccacgaacaccgacaacaccgtcaccgagccgtggatgtacagcgacaaaaagcagtacatcaaggacgctattgacttccgctataagctcagcccgacgctgtattccctgatggagcgcgcgcatgagaacggcctgcccatctggcagccgacgttcagcgttttccagaacgacccgaccacctacgatgagggtgtggacttcatgttcggtgattctctgctggttgcgaacgtcgttgaaaagggccagaccgtccgtccggtctacctgcccgtgaccgagaacgaaaacgagcgcttctacgacttctacacccgcgaggaatacgcccccggccagacgattgaggtgccggttgatattgccagcatcccgctgtttgtgcgcagcggtgccattctcccgatgagcggcaacaagctgcacaacctgatgaccgaaaagaccaccgcgctggacatcctgatggcccccgatgtggattccgagttcacgctgtacgaggatgacggccacacgaacgattaccgcaagggcgcgtatctcaagacgaagatcgccgtcaaggcaggcgtcaagaccgtcgtgaccttcacgaatgagggcagctacgagaccgccgtcgagagcatgtacctcgatatgatccaccgcgagaagtccccgttctatgtgcaggtggacggcaaagagctgccgcacttcctgcaccgccgcaagtttgaggaggccgagagcggctggtactacagccagcgcctcaagagcgtccagatcaagtaccccaaccccaagaaggatcacgaggtacttgtctcgttcgaacagtttgatttgatcgggatgtaactcggcttcttgcctcccctggcaggggaggtgccccgtaggggcggaggggttgaaccttgccgcagcccgaaatatttcgggtaatggtacggttctctcccccagccgctgcggcggcagccccctctcagagggggccaaggggaaaacggcatacatacaagaaggagaaataccatgttcaaaaaattcgcagcattggctgctgcggctgcgctcagtctgggtgttatgaccggctgcggcgcgtccggcaccaccgccgactccaccggctacagcgccgaaaacccgctggtgctgacgctggcccacggcctgtccgagacccacacggtccacatcgccatgacccagttcgcggacgaggtcgcggaaaagaccgatggccgcatccaggtcaagatcttccccaacggccagctcggcagcgaaaacgagaaccttgagcagctgcaggccggcgttattgccatgaccaaggtctctgcacccggtctggctacctacaacgatgccttcaacaccttcggcctgccctatatcttcaacgataccgatgacttctaccatgtcatggactcgcaggagatgcaggacttcttcctctccaccggtgacgacggctttgtcacgctgacctattacacctccggcgcacgctccttctacacgaaggaccgcgccatccgcacgcccgccgacctgaagggcctgaagatccgcgtgcaggatatgaagagccagaccgacatgatgagctatctgggcggcattcccgtcgccatgtcctacggcgacgtttacacctcgctgcagaccggcatcattgacggcaccgagaacaacgagaccgccctgaccaccggcaagcacggcgaggtctgcaaggtctactcggtggaccagcacgccatgatccccgacgtcctcatcatgagtgagaaggtctgggagaccatcagccccgaggatcaggaaatcattctggaggccgcccacgattccaccgatgcccacaaggtcatgtgggacagcgctgtggaggaggccgtcaaggaagcacaggagacgatgggcgttgagttcgtctatgacgtcgacaaggaagccttccgcgaggcaacccagcccatgatcgaagcctacgaggagcagtatcccggcgtcaagacgctgctggataccatcgacgccgcaagaggggaggagtaagccatgaaaaacacctttgctgccatcaaattctggatggacaaaattttgagcattgcctgtgccgtactgcttacctttatgacggtgctggttctgattcaggttttctcccgctatatcctcaacagccccgtggctttcaccgaggagcttgtccgctacagcctgatctggaccggcttcatcggcgcggcctacgccttctccacccgggagcacatgtccctgaccctcatccgcgacaaattcaccggcaaggcgcacaccgccctgctggtggtcatcgatggtctgattctgctgatggccatcttcgtattcactatcggcggctttaagctggctgtctctgccagccgcgagttctcggccctgctgggtattccccgcagcctggtttactccatcgccccgatttccggcgtgttcatcgtcctggcgcagatcatcaacatctatgaggacgtcaccggcgaaaaagttgaatccaaggagggtgcagacaaatgagtatcaccatgaccaccgttatcctgttcgccgtgttcggcgtgctgctgttcctcggcgtgcctatctccatcagcattgtggcgtcgtctatcgtgaccgccatgtccaccctgtcctgggaccagatcacctttatcacgatgcagaagatgaactccggtgtggagagcttctctc

SEQ ID NO: 686 - DNA, 15892 bp, unidentified
  source 1..15892: mol_type = unassigned DNA
aatgagcatagtggcggtttccgcaacaggaaatgcaagccagattccgttcagttggaataatttgtccagacaccataaggcaggaacaaggaaaagcagttgtctgcataattgaatcgctatgctggaacctactttttctgtcgcctgaaaataggtggaaatcatggtagagagaccgcaaaacagatagcttgccgccataattcgcatagcggatattccaaaggagcgcatggcttccgacgctgtaaataatttcaaaagctgcgccggaaagaagttgacggtcaatgttcccagtatcatcataccggagaccaaagcggttccgtattggaaagcggagtgcagcctatctctgtttcccgcactgtagttaaatcgcataatgggcaaacagccctgaatcaagccgtttactgtcataacgatcagctgctgtaccttaaaatacgcaccgaagaatgcaatcgccgtatcggaatacgccaccagaaacagattgacgaatgtcaccataaacgaactgagggcattcataatgaaagatggtaagccaagggcgaatatacgggcaatcatccacttttgtatatgaaattctttgatctttatccgcactttttgctttttgcccaacagcaaggcaaatgccaaaatcatggataacaaatagcccgcaacagtagccaccgcagcgccacggattcccatagctggaaaaacaccaataccaaaaattaggagtgggtcaaatacaaaattaacgaccactcctgcaatctggaaccacataggagcaaccatgttcccggtagcctgtatcatcttctggattgcgatatgcaccatgttgggaatttgcatgaacgaacatacgctcatataggcaagactcaactgataaatttcttcgttattggtgaatgccctaaagtagggtttcataatcagtaatgacagaagattgagcaaagcaccaattccaaaggccagtaacaatccatgtgtgacggtagtatttgcctcattctgctttctctgtccaagatacccagcaatcagtacattcacgccaacaccgatccagatagatgtcgcattcatcaaagttgtaatgggaaacgacagggaaaccgccgtcaaagcattttcactcagccgcgctacaaacgcgctgtctatcagattataggaatattgcagaaacatggaaatcagcggcggtatcgacatttgccagaggagttttccaacgggcgcaaccgccattttgttattggtctgcatgctttccaccttctccacaaattgtccgaacaatatagttttgtttgcgtgctgcgtgctgaccggcttcttggaccggatagcccaatgcaatctcccgcctatatttggagcctgtaattgcaatgatggttggagattgatgtcctccgtcggtaggagcgtaagtccctgcttccagtacagcgtccacagccttggaagggacaggttccgatttataagcccgtacactatgtcgcgtcttgataagagacaaaaaaattttttccatacagatatagtcctccattctgctaatacttccgagatacaggcaacaaaaaagccacacaactatcacaagatagctgtgtggcaaaaagatgatcgaatccggaaaagtccactaaaattttgcgtttgctattatagcgaacttgaaggagactgtcaagcatcaatcattacggaattgtggctaaaaagggaaaatagaaaaaagcttgacaattgcgaaatagtgtgctaatgtagtaaaggttttgcgaaaagtaaaactcactgccgtagacagtaggtgcggatttccgcgtaagtctgattatagccgcctaccgaggaagatgaagtatctgatatgataattttactcctctctctacgtagagaggtttttttattagaacttttgcgtgcagtgcagggatcttgccagagccggttatcggcagatctgtgatgatcctacaaaataatggggcacacccatagaaaggagatacactcatggcaaaagtagagttgaaacagcctatcgttgaggagattaaggctaagattgatggtgctgcaactgttgttctcgttgattatcgtggacttacagtagagcaggacacaaagcttcgtaaaggacttagagaggcaggatgcgagtacaaagtttacaagaacacactgatgaagcgtgctttcgagggaacagatttcgcacagttggacaaccttttggatggaccttctgcaatcgctatttctaaggaagatgcaacagctccgatccgcgtattaaataacgtagcaaaagaggctgaggcattagagttcaagggtgctgttgtagagggtacactttatgacattgatggcatcaagtctttggcaagcattccttccagagaagaacttatttccaagttgcttggttccttacagtcccctatcaccaatcttgctcgtgttcttaatcagatcgctgagaagggtgacggtgctgcagaggcataattcatgcaatgcagatgacgcattgtgcgtcgcaattttatgaaacaacgaaccaattggttcacaaaattacgattattacaaattttatggaggtaaacgaaatgactacacaggaatttattgatgctatcaaaggcatgactgttttagagttaaatgatttagtaaaggcttgcgaggaggagtttggtgtatccgcagcagcaggcgttgttgttgcagcagcaggtgctggcgctgatgcaggtgctgagaaggacgagttcgacgttgagttgacagaggttggtcctaacaaggttaaggttatcaaggttgtccgcgaagtaactggtcttggcttgaaagaagctaaggaagttgttgatggcgctcctaaggttgttaaagaaggtgcttctaaggatgaggctgaggacatcaagactaagcttgaggctgagggtgctaaggttactcttaaataatttaatgttgattcacatcccgaattatcgggaaaaggataaacgaatgatggaaaacggatcatgcaaatggtccgttttttctctatacaggaacattgacgtctctgtataatgtgtctgaatcaaaacagtatttgcatagaatgtctgcaatgaagggctatttgccttttcggcgtctgcaggcgcaatgtttgctggcggtcatcaagagaaagctaacttcatcccatgattttttcattgcaacgatgcggcggttaaaaccctgacagcagcaaaagcgtcgggaaatccattgttttagacacattgtagatacatctccttccttatttgcaatatgtggctgcgaagaatttgaggtatgggaagtttgagtggtttactataatatatgcttttggatggaggatgtgttaatacaggcgaataatattatccgtgtgatatgtgtgaacaggaaaggaaggacgtgccatgaagaaaacagtattgatcacaggtgctaccggagggatcggtttagcgtttacaaagttattagcgaagaaagaatatcgtttgttgctggtatcttccagtgagaagcgtttgcagcacttgaaagagttattgctgcgtgtaaagcccaatttagcagtggagatatacgcagaggatcttgcggtgcagggagcggcaggacgattgtatgatcggatcggtaaagacggctggcaggttgatgtgctgatcaataacgcaggctttggtatggtaggtgccgcgcatacgctggatatggaaaaagaggaacagatgcttcaattgctcgtggtaacgccgacgcagttgtgtaaatgctgtctgcgtgacatgtacaaacgtggttcgggaaaaatattgaacgtagcatccgtaggtgcatttcaaccgggaccgtatacggcgtcttattatgcttcgaagagttatctttaccaatatagtcaggcgatccgcttggaagcaaaaaaacagggcgttcaggtgtgtacgctgtgtccgggttctacacgaacacatttctttgaaaaaacaggagctaagacgccaatttgggcaatgtcgccggagcgcgttgcaaaagaggcgtgggaaggattaaatgcggataaggcagttgtggttccggggatgataaatcggctgctgcgtcttgtgccggcacagatcaaagcttacggtgtggcgctgctaaagaaacatacctaaaaggacactattaaaatcgaaagaaaatggtagccatagtgctataaaagaaatctgcctaaaaagagcaacaaaaaaagcccctacccaacagtccgtgctgtcaaattgggactttcatgcgcgatcaggggttcgaaccctggacaccctgattaagagtcaggtgctctgccaactgagctaatcgcgcaaaacgtattgttttacaacgaaatatattatagcaaagcaacctgcgaaatgcaagcgttttttgaaaaaaattacaaaaaactaaaaagcataaaaatacgtaatgaaaagtctttataaacaatcaccgattcaaaattgtttgtcatagtttttgcccacataataagtcaatacagcatctttcgcgcgataccattctttaaggatggttttgcttccgcagaacagatcaaaggattgcagctctttggtgtcatatacctttttgggtctgatcgttgtcagatttttctctttggaaaggcgcagaccggtatcgaacagtgttccgtaatccagacagtagtaagtgccgtttttggcaccatgtgagcgcagagtgtttagtgtgcttggtcctgccggatcgccgtaaactaagagataacattcattcttgcgcagcaagggtgtaatgttgctgcttttatagacggcagaaacggaattcgcatccaaacagggactgtcgaaagtataagcattgatcgtattgccgacttgcaaaggatgcgtcgacttgatgttctttaacagttttaacttatacgttgcaaagagagaattgtatttcacatcttcggtcacctgaaaaatgccgacgtttttgtattcgtcatataaatgcttgatgttctttttgcgctgtgccgcccgaatacttttgagccaattgatggatgtctcgtctttatcgagcagcatatcacgcttgagaaactgcacttttgagatggaccgtgcgctgtatcgtgctgtgtaggaagcaacaggagctttgggagtggagagcttttcactcaaaagcttttgcgagtacagcaatgctgcccccacacaaaataatgcaagtgcgatgagggttatggaaaaccaatagtttttcttgtttttcttaaggttttctttgctcatagccgattctgatttatgatttcctgtatttctgcgaactgtttttaatctgctttctatactcaattgtattcctcctctatggccaatggaaatgtaacgatcactttgaacagatcgccgtcaacgtgcaatgcgagagtaccattcattaactcggccagatttttagcaatggacaagccaagcccattaccttgtgtgctgcgagaactgtcaccgcgtacgaaacgctccagtaatgcatcggtgctctgttccagagggtattgcgatgtgttgcggaaagtgatctgtgcacattggtcgactgtggcgagatcgatataaacacgggtgccgggttgtgaatatttacatatattacccattaaattatcgaatatgcgccagagatgtcgactgtctgcggtaatgacaaggtccggcagatctgcgttatcgacgttcggatcgatcataggggtactttgctgcttgcgaaggatcaattctaaacctgcctgagttagtttgtcggtaaattcaccggcagtttgtgccagcagtatatttaagttgcaaggttccgggcaaacggttagattgccggttgatgctttggaggcctcgatcaggttctcaatcagcttttttagcttgccggattgacgatcaaggacatctaagtattgcgccttttcttcctccgacagattatctgcttttaacaagtctacataatttataatagaagttaaaggtgtttttatgtcatgtgacacatttgtgatcaattctgttcgaaaacgttcgcttttcatcttgtcctgcactgctatttggatgccgtcctgcagtcgattcagtgtttcggcgtggcggcggaaaggtccaaacaattttgaggtgtccaatttggtggacagagcgtcttcggcgagactgcggctcgcatctgtcagtttggtaaattgttccacacagaatagaagaaacaatgcttctgcaactttgtaaatagcaaaggtgataatttcaagatccgtattcatgtcggttatgccgatcacaaacagttcgatcagcgtaagtacgatccatacgacgccaatcctcactgctaaatgtatatgtgtgccgataaactctaacgcccatttcaagttgtgggtcaaattggatttaatacgacgtaacagctgcataacgccgtggcatactgtgtatttgcggaacgttttggtaccaagccgttcacccagattaacgaaaacagagcttaacaggaagaagaaaagcactattccgccaacggcgagaagcagatttccactcattaataatttcttggactgtagtgtgcgcagcaataagaaacttataaagtagacaacccaagccgatataaaggtcatactactgagatagaccaataagggaatgcgtgtcatgaaggaaggtttcccggatgactttagcagtattgtctggtggcagcactggtataatgcaccaagtaaagcaatcaataataatgccgttaccaaaggaatggcatagcagatcggatataatgtgttaacaagcttggtcgtgtaagcaaacaggtcatgctttgaagtgtctacaggagtagaaactttggaactgatggaatagaagtgtgtttcgtccgtggtctgtatgctatagtatacggttgcgtgaaccatttgtaatggaatccgtctgccgttttgtgtgacggtctttggatggttgtaggcacccagataataaatggcggcatctgattttgataaaaactcagatgcaggaaactgactgtcctcggaaccccaatagaccacaggatcggtaagctgccaagaggctgccatacgatcgcttttgatatcatgcatttcaatatctttggtataataaggaatatcatctaatatgatgcgaacgggattcacgtcatggatataattacgtatattcaagttctcatagcttttgtctacacagacgtaacagctccggcgcttggaatatttaaaggtcaatgaacttctggcacttgctactcctttagccttaaccacagcgaaggcggttggaatttcgacggtcctgaccggaaaatagtattgtgatttggttcgatagtacaacagtccattggtagtgcattgaatctggtctatcgttgtagagtgttttcggtatagatcgacatctgttccgtcataatctgtggtaatgttgttttgcaggatcgtagcaagatttggctccggcacagatcgtgttgcctttgtgtcggtaaatgtagtgtgatacagatgtgcagacgctggctgagcatcaatttccatattccatacaccgaacacgctgtatttgaagttggtgatcttttttttgttgacaacggcatcttcatctttctttttgttgatctcgctcatgatggtagcttcgtaatatttcgtcaacagatcgtacttgttgttcaagatttctttcttggactggtctttatacattccaagttgatagcataatagcgacaataaaataccaaggatcagaccggtaccggtgatcatcgcaatggcaatagcaccgatctgccgttttttgatttggtgatttgctttcatatactcctccaatctgaagtggatcacttcattcctgcatcgcattgtatcgcaatgttatgacgcagatcttccaaaatattaattgttatctagtttataaccgcgtccccacactgcttttaaataacgtggttctgccgggttatattcgattttttctcgtaagtgtcggatgtgtacggcgacagtgctttcttcaccataagcattgtcgtgccatacgttttggtagatttcacgtggtgtaaaggattgtccgacgtgctgcatcaaaaataacagtatattgtattcgatgcgtgtcagtgcaatgggatcagagtctaacgtgacttccttggtaattggatttaatacgataccgccaacagaataaacatcgctttgcgttttgccgccgccaagctgcatatagcggcgaagctgtgatttaacacgtgcctgaagctcgatgggattgaatggttttgttatgtaatcatcagcgccgactgttaaaccgagcactttgtcaatatcttcgcttttggcggttaacaaaatcacaggaacattgctaaattcgcgtagcttcgtgagtgcagcgatgccgtccatatgaggcatcataatgtccagaagaaccaaatggatttcctcttctgttagaattttgagtgcatctgcgccattgtaggctttgaaaattttatagtcgtcgttgcgtaagtagatttctaatgcggtaacgatatctttttcatcgtcacacagtaatatttggtacatgtttccctccgtaatatttattgcctccttacaagatttatcttgcatagttctattgtagagaaatgaatcttaaaattcaacatgctatttgtttaagattttattaagaaactcaacctgcgcacatttgaagctgctcttgataaggttattgggatgtttgttcaaaaagggtgaattgaaaaagtcggaaaagtgggaaaagtaaaaaaaacacttgctttccatgcgaaagtgtgatatattaaacgagttgctgacattgatatgtcagatatgcgcgattagctcagttggcagagcacctgactcttaatcagggtgtccagggttcgaacccctgatcgcgcatttttatattttaaagagtaggtgtcaaaatttttttggcacctttgtttattaattaacagcaatttcctatcaactgaaaactaattgcggcaaggcaattgctatagtttcttcatggcagaacccacaatatggtggctgcaaaatataatgaaactatcgacataataagcaataagtgaccagatggcagcttcggatgtgcgaagttggaatgaaaaatatatttatatggaattactgcgttctatgacgggaaaggtttgacatgaatatatccgtaggcatataataaaaagtacgagtaagatgcggcgagacatagaaatacttgcgtaggcggtattttgatatacgttttatgtgtaaaccgggtgaccggtattgtgtatatattttctcgttgtaataaaatcaaagtatagagaggtacataatatgatagcaaaaaaaatggtgaaatttgttgagggaagctcggttacaagagcaatgtttgaggaagggaagaagatggcggttgagtttggcgcagagaacgtctatgatttcagtcttggaaacccaagcgtagagcctccaaaacaggttaaagaagccattattgagacattgaatgaggatgcaccgaatttcgtgcatggttatatgaacaactccggatacgaggaagtgcgcgagagaattgcacagtccttaaatcgccgctttgacacaaagttttctcagaataatatcattatgacagtaggtgctgcaggtggtcttaatgttgcacttaaaacattgttagatccgggcgatgaagtaatcgcatttgcaccatattttggagaatataataattatgtagctaactttgacggtgtaatggtagttgtaccggcagatgtaccttctttccagctcgatcttgagacgtttgcaaagaagatcacggcaaagacgaaagcagtgattgtcaataatccgaacaatcctaccggtgtagtatattcagaagaaacgattcagaaattggcagcagtattggaggagaagcaaaaagagtttggaacgcagatttaccttattgcagatgaaccataccgtgagcttgcttatgatggcgtagaagtgccatatctgacgaagtattatcgtaatacaattgtaggatattcttatagtaaatctctgtctcttccgggtgagcgtattggttaccttgtgattccggatgaggtagatgattttgaaaatgttatttgtgcagcaaatgttgcgaatcgtattttaggatttgtaaatgcaccatctttgatgcagcttgcggtatcaaaatgtctggatgcgacaacggacgttgcagcctatgatgccaaccgaaagctgctttacaatgctctgacagagtatggctttgagtgtgctaaaccggaaggggctttttatctttgggttaaggctaaggaagatgataaggcatttgttgccaaaggaaaagagttccatattttaatggttccgggaagtgcatttatgtgtcctggttatgtgcggattgcttattgtgtggatcatgcgatgatcgagcgctcgctcccggcatttaagaagctggctgagtgttatcagtaaataagtgtaacaattccaagtggacgacagaaatagacggaaaagaggtatgacatgagtagattggaagataattttcgcaaagtagagccgtatgttccgggcgaacagcctaatttgccggacatggttaagttgaatactaacgaaaatccatatccgccatcaccaaaggtggcagaagcactgcagaagtttgaactcgacagcctgagattatatccggatccggcatcgacagacttagtcaatgcgctggcagaaagatatcatgtgcaggcagatcaggtgtatacaggagtaggatccgatgatgtacttgctattgcgtttttgacattttttaattcgggtaaaccgattttgttcccggatattacatattcgttctatgatgtatgggcagaattatttcaaattccgtatgagcgtccggctttggacgatgcctttgcacttcgactggaagattatcagtgcgaaaatggcggtatcgtgatagccaatccaaatgcaccgacgggtattcgtcaaagtgaggagtttttgcgcgcagtcatcgaagctaatccgaatgttgttgtcataattgatgaggcatatgcagattttagtggttatacagcacttccgctggtggacgagtatgaaaatgttgtggtagtacaaacgttttcaaaatctcgctctatggcaggaatgcgtattggtcatgcaatcggtaatgcgaaattgatcaaggcaatgaacgacgttcgatattcatttaacagctatccgatgactcgtttatccgtagcacttggcgttgctgcgttatcagatcaggattattttgaggagactacagcgaagattgttgcaacacgagagcgcaccaaacaggcacttacggagcttggttttacgtttggagattcgatgacaaattttatttttgcgacacataaaactgttccagctacacatttgtttgaagaattgcgcaagcagcacatttttgtcaggtatttttccaatccgcgcattgacaattatctgcgaatatccattggaacggatgcggaaatggatcgttttttggctgcggtacaggaaattattgctcagtgggataaataaagagcatgaggttttttgctcggtatactgttgggaagcataagttagcattgacagcataatgctgggaaatataagttagtgctaggaagcataagttggcgttgacagaagcagaggatagtgatattctcatatatataaaaagatagaggtcgcactcttcatgagtaggatttcggatgcgtcaggcgcagtagatgagatcagaaagggaacagtgccgaaagaaagcttgtcctgcagcaagatttcttgggcatggcgtgaataacgacatgactgtcatcaagaggatggagagctatcggtttgaagagatacttcaaagaggtgatacatcccgtgtatcacctctttttgttagctgggtaactcgaatttcccgtaaaatggcatttgcaaaaggtaactgtgagtgcatgggtgggaaaatgctcaaacgacaaccaatatctaaaaatcagaaccccgatttgggaatagcgaaagcagaatggaggaaattatgtcaatttttacaggagcaggcgtggctttggtcacaccaatgaaagagaacttggaggtaaactacgacaaattagatgagattttggagtggcagattacagagggaacggatgcgattattatttgtggaacgaccggagagtctgcaactttatctgaagaagagcatgcaaatgtgattcgttttgcgattgagcgtgtaaatcaccgtattccggtcattgccggcaccggttctaattgcacggcaacagcagtacagcttagcaaagaagcttctgaggcaggagcagagggtgtgcttgttgtaactccgtattacaacaaggcaacacagaatggtttgattgcacattataaaaagattgcgtcagagatcacggcaccgatcattttatacaatgtaccaagccgtaccggttgcggaatgacaccacagaccatcgctacacttattaaagatgtagacaatattgcaggtgtgaaagaagcttccggtaacatcagcgctgtagcgcaaattctgcacctgtgcgatggtaatgtggatctgtattccggaaatgacgaccagacaattccgatgctttctttgggagcaaaaggcgtgatttctgtgttgtcaaatgttgcgccgaagtatacacatgagatggttatgaattatttgaatggaaatgtgaagcagagtgccaagatgcagcttgatgcacttccgttatgtgatgcattgttctgtgaagtaaatccgatcccggtaaaagctgctatgaatatgatgggtaaaaacgttggttcattacgtgcacctctgacagagatggaagatgctaacaaggagatcttaaagagagaaatggcagcgatgcacttgatttaaggtgtctcgctcgaattactttagaatgatctggggtttaaaaaggagtcggcctgtggcagagggagctaccacaggcccaatgaaaaaaatgaaaaagaatctatctcaaacataagtcagtcggctagtttggtagaaatcaaatgcttcttttgatttcactgcttttcttgaaatctgttctctttgatttctatgtatacataatagcatgcaaatgtggacagaatttgtccatattctaaaaaaaatcttaattttcaaaacgatttgtaaaaaaaacgctcaaaccttgcggtctaagcgttttaaggaaacttgttgttgcttttctcgattttatgctttaattagcgctgtccatatttttccaaaatggcattaatacgttctgcagggtttaataaaccgctaatggattgatcgtggtttaaggtgtcgatcaataaggcgatatacttgctcatgtctacgctgacataatagtctctagacaaaacttcttccggctgatatacaaggtttgttgtgagaaccttatcgatcaagcctttttcgtgtgcttcatcaaatttggacatgccgtttgtaaacagaccaaacgttgcagcaacaaaaatacgatttgctttgcgctgctttaactgtgttgcaacatcgatcatgctttcacccgaggaaatcatatcatcgacgatgataacatctttgccctgcaggtcagagccgaggaactcgtgggcaatgatcggattgcgtccgtcaacaatgcggctgtaatcgcgacgtttatagaacatacccatatcgatgccaagaacgtttgcgtaatatacagcacgtcccatagcaccttcatccgggctgattaccatcaaatgatctgcatcaaccttaaggtccggcacgttcttcagaagtgctttgatgaattgatacgtaggctgaacggtttcgaaactattcaaaggaattgcgttttgaacgcgaggatcatgtgcatcaaaggtgataatactttcaacacccatttgtgttaattcgtgcaatgccattgcgcagtccaaggattcgcgtgcactgcgtcgatgctgtctgctttcatataagaaaggcatgatcacagtgatgcggcgtgccttgccaccaactgcagcaatgatacgcttaagatcctgataatgatcatccggcgacatgtgattcgtgtgtccgcaaacggtataagttaagctgtaattgcagacatcaactaataaatacaaatcatctccacgcacagattcgttgatgatgcctttcgcctcgccggaaccaaaacgcgggcaggcggaatcaatcaagaaagaatcacggttgtatcctgcaaaggtagatgcggtagcattttgtgcagcgcgatcctttcgccagtcaacgatataatcgtttactcgtttgcccatgtcgtggctgctctccagcgccaagataccaagggtaccaacaggaagtgtgtctgctaacttgtcatgtcgtttcatagtaaaatgtcctccgtatgaatttatataattgttatcatgttatttggcagttaatctagccttctgacgtatatcatctccaattattaagaagaaatgataaaaaccgataaaacgtgagaaaatacgctcgctgtatcggtcacgtaattcctgaaacgataaattggtcgagatgatggttgacttatggttgatatggcgctcctcaataaaataatacagctgagaagacgtaaagccattgaccaattctgccccaagatcatctataatgagcaaatcactttgcaacatatatgcaatttgttcgtttgaagtggaaatatcctcatgacggaacttattcctctctaaaatatcaaaaagctgcaatgaagtcaagtaaagcaccgtgtgagatgtatccaaaagtttcttggcgatacagtgcgtcagaaaggttttgccgacgcctgtagaaccatagaatatcaggttgtcataggaatcatcaaagtgcttgatatagtctagacagaccgtttttaccttgcgaatattttggcgggctgttagagaaagattttcattgacgatggtgtcatcgtagtaactatcatcaaaggtgtcaaaattctcatgattcagaatgtccataagatttgaactttcataaagagccttgatctcagcgtttttaaggcagtgacaaggttcgttgttctgatagccggtgtctttgcagtccggacaggtataaatgctttgcagataatcttccggatagccgtgatgtaacagcagtgcctttttgcgggacagcaatgcttcgcgttttgcactgtattcagcttcgctctttgggtccggttcggtctgaaacaattctttgcgcgcctgcgtcagtgataagtccataatatcgtgttggatctgttctaattccggaatttcagcaaaaagtgtttcgtaccgcttatccagtatgcgctgattgttcattcgcgtctgatcatattgaaacatgatatcgcgatattgtgtgttggatattcccat

SEQ ID NO: 687 - DNA, 11315 bp, unidentified
  source 1..11315: mol_type = unassigned DNA
ttataattttttaggttttgtacatgagttgcgaacttttattggacaaggcagatagacacgcataggagaataataatcggtgcttttagatttcatcatattcaaaataaatctaatgccgtaaatacccattgcatatacaggtgcgtttaccgtagtgagcggagggtttgtatatcccgaaagctccgtgttatcaaatcccataacagaaatatcctcaggaattttgtaaccgttttcttgcagagctctcattgcaccgattgcaataggatcgcttgccgcaaaaatagctgtggggagatttcctttgctgatcatttctgacatcattttataacctgatgatgttgaaaatttgtcctgcataataaacccatcatatttaatgtttagtgcatcgcaaatgtctgtgaaagtgttgagtcgtttatcaggaaatatcgttccgtcctcaagctgttcaatgcctccgataaagccaactgttctatggcctaaatcatatagatatttaattgcatcggacactgcctgacgaaagtcgagcgatacggatgtgatttcaatattctcaacggtcatatcaagaaaaacaattttattattcaatgaatgcagtaattttatttcttgtttactaaacttcccgaggcagattatgccatcaacatcgcagagtacattctgatagtcattgtctgttttaaatgttcgtacaatacttatattattttttgaacagtagtcctcgataccctgtctcatcaaaaagtaataattatcttcaatttcctgtttggaagagaaccattgtagaattccaatgcgacatgaaggtgctgatgtaaccctttttttctttacataattaagttctttagctactgcaaatattttttgcttcgtttcaagcgaggtgcttagggtagtgtcgttattaagcactcttgaaacagtagctactgatacatttgcctttttggcaacatctctgattgtagccaattgaatcacctcactaccattatagtgaaatattactaaaaaatcaagtcttgtttagtaaaaaacggagaaagcaaaaatgtttaccaaaaactattgacagtttacgaaacaaaccgtataatttagttaacataaaagcaaaagaaacattattattaaataatgacgaaatcttttgtgcaggttgtcacggcgtttcatttaaaattaaaaggaggaaaaattatgaaacagacatcatcacaaccaagacttgatggcaaaatcccaggtagaatcaaatacacctttgctttaggtgccctcggcaaagatatgatttatggtatgattgccacattttcaatgatttatttcacagacatcatcaaggtcaacccggtatttatcggcataatgttctttgttgcaaagttatgggatgcctttaatgatttgtttatgggtatgattgttgataacacacgcagcagatggggtaaatttattccatggcttgtaataggtacgctggttaattcaattgtatttgttgttttattcacagacttccacctcgatggcgttggactttgcgtatttgcaacagcagcttacatactctggggtatgacttacacaattatggatattccttattggtcaattattcctaaccttacttcaaatcctgaggagagagaaaaagtttcggtacttccgagaatctttgcaagtatcggtcagtcacttgttattgcaggctttggtgttcaaattattgaggctctcagcggcggcacaacaaatcaggcaggttatcacagatttgcaatcataattgcaattgtatttattcttacaatcggtattacagtaatcaatcttccgaaaaagagagatgattctgttccggaaaagaaagttaagtttaaagatattttctcaatcatcggcaagaatgatcaacttcgttgggcggtaactcttatcttcctttacaacatcggcattcagtgcattatgggtgttgctacatattatttcaaatatgtttgcggcaacgcaggaatgatgtcatcatttatgatcagcgcatcaatcgcagaggttgtaggtcttatcgtattccctaaggttgcaaaatttctttcaagaaaaacttcgttccttcttgcgtgtattttacctgcatttggtcttataatgcttttgctcgtaggtatttttgctccgcacaatgttgtgctcacatcaatttcaggtgttattgtaaaacttggtacaggtcttgaacttggttgtgcaacagtattccttgcagatgttgttgattacggtgaatttaagcttggaacaagaaatgaaggcgttgtattctcactccagacgcttatcgtaaaattcacagcagctcttacagcactcggtattggcgcagcacttggaagcacacagtatattcctggacaggaacagtcatttgcaacagtagcatcaatcagtacacttatgtgcattgttcctgcggtttgtatgcttattgcttatgttgtttacagaaagaaatataaactcaatgacggtatgatgaagaaggttataaacacaatcagtgcaagaagagaaggcaagattgatatgacacaacagcttgatgaaagcggtaacacagagccttctatgttccttcctacagttgcggaaaaggcaggtaaataaaatgattgatactaaaacagcaattgaaaaaattacaaacggcgaatttgataatcttttcactgatatatatatagattcatcaatgattgattatcagaaaaaaagatatgttcatgcaattgagcagtatgaaacaattttttgccctgataaagtagcaatattcagtgctcccggcagaagtgaggtttgcggtaatcatacagatcaccagcatggaatggtgcttgcaacatccattaatcttgatactattgctgtgtcggccaagaataacaatgatgttgtaagatttgtttctgacggttatgatatgattactctcaatataaatgacctcgaagttaataatgatgaggtaggcacaacggtcagcctcatcagaggtgttcttcgtggacttaaggatcatggatacaaaattggtggattcaatgcttatgcaacaagtgatgtacttgttggtgcaggactttcatcgtcagcagcttttgaggtagttgtcggaactattatttctggcttatataatgatatgaaaataaattcagttgagattgctcagatttctcagtatgctgaaaatgtatttttcaaaaagccgtgcggacttatggatcaaatggcttgttcagtcggaggaatggttaacattgattttaaagatccgacaaagccaattgttaagaaagtacctaccgaatttgaaaaatatgattacagtctttgtattgttgacacaaagggcgatcatgttgatcttacagatgattatgctatgattccctcggaaatgaaaaaggttgcaaattttctcggagaagattatctgagagattgtgattcaaacgaattttatattcgccttgacgaaattcgtgaggctgttggcgacagaccggtacttcgtgcaattcatttctttaatgaggagcataacgttaaaaatgccgtttcgtcacttgaaaacggtaagtttgatgaattccttgacgcaatcagaaaatccggtaattcatcgtttaagtatcttcagaatgtatatacaacaagagatattcaacatcagaacatctcggtagcccttgcactcagcgaaagccttcttcgcaattacggcgtgtgccgtgttcacggcggtggatttgcaggtacaattcaggcgtttgtcaaaaatgattttgtaagtaattacaaagaatttataaataaaattttcggagaaaactcatgccatgttctcaaagtgagaaaatacggcggaataaaagtaatgtaattatgtagtttttgtttttattaaggaggacaaaatgaaaattcttgttttaggcggtgccggatatatcggttcgcatacagtttacagacttattgaaagcggtaatgaggttgttgtattcgataaccttgaaacaggtcatatcgaggcggttcatcccaaagcaaaattttataaaggtgatctcagaaacagaagtgaaattgacagcgtttttgataaagaaaaaggtattgatgctgtaattcattttgcagccaattcacttgtcggtgaaagtatgaccaaccccctcaaatattatgataataacctcaacggcacaaaggttttgcttcagtcaatggttgctcacggaattgataagattgtattttcatcaacagcggcaacatacggtgagcctgagagaactcctattcttgaaaccgatccgacaaatccgacaaactgctacggagaaacaaaaaaatccatggagagaatgttctattgggttgaaaaagcacatggtttaagatatgtttctctcagatatttcaatgcatgcggagcacatatcagcggaaaaatcggtgaggcacataatcctgaaacccaccttattccgattattcttcaagcggcacagggtacccgtgaccacataagtatttttggtactgattatcccacttctgacggaacttgtattcgtgattatatccatgtcactgaccttgcacaggctcatattcttgcagttgaatatcttatgaagggcggtaaaagtgatatattcaatcttggcaacggtgtaggtttttctgtccgtgaggtaattgaaaaagcaaaggaggttacacagaaagatattaaggttgttgaagaaagcagaagaagcggcgatcctgctgtattgattgcatcaagcgataaggcgaaaactgtacttggctggaaacctgagtatgatgatctgaaaacaattattaaaacagcgtggaaatggcattcaacacatcccaacggctatagtaagtgaggcggtatttatgaagaacagcgtttacggcttaatattaagacttgtttcatacggaatcaatacagggcttattgaaaaagaggatataatctacacgcaaaataggcttttgtcgttgttccatatggatgaacccgatgacagttgtacttgccttacagcagataacgaggatactcttgaagaaattttgtcgggacttcttgattatgcatacgaaaaaggaatcattcccgaaaatacagtaacatatcgcgacttatttgatgtgaaacttatggcttcacttgttaagcgaccgtcagaagtaataagagaattttggcagaattatagcttttctcctaaacttgcaaccgatagctactataaattcagctgcgataccgattatataagaagatatcgtattaaaaaagacttaaagtggaaaacatcaaccgaatacggtgatattgatatcacggtaaatctttcaaagcctgaaaaggatccgaaagctattgcagcggcaaaacttcaaaaacaatcgggctatccgaaatgtttactttgtaaggaaaatgaaggatatgccggaagagtaaatcatcctgcaagagataatcacagaattattccgctcaccattgacggagataactggtttatgcaatattctccgtatgtttattacaatgaacattgtattgtgtttaacggtaagcatacaccaatggtaatcaatgattctacattcagaaaactgtttgattttatttcacagtttccgcattatataataggttcgaatgctgatttgccgattgtaggcggttcaatacttacacatgaacattttcagggtggcagatacagctttgcacttaatagggcagaggttgaaagaaagtttattgttaacggctttgatgatgtggagtgcggaattgtaaagtggcctatgtcagttgtaagattgacaggtaaaaacaaggacagcattatttcattatcttcttatattctaaagagttggagagcgtacacggacgcagatgttggcatttttgccgaaacagatggtgaaattcacaacactatcactccgattgcttttacaaaggatggaaaatttgttattgacctcgttctcagaaataatattacaagtgaagagcatcctctgggagtatttcatcctcatgcaaatttgcatcatattaaaaaagaaaatatcggccttattgaagttatgggacttgcagtattgccctcaaggcttaaagatgaaatggctattttaaagaatgctattcttaatcacaaggatgtaagtgaaattccgaaaatcagcaaacattccgagtgggtaaatgaatttgtttcgcagtatgatgaaatcaatgaaaataatattgattcaataattcaaaatgagataggaaaggtgtttcttaatgttcttttggatgcaggtgtattcaaaagaactcctgaaggacaaaaagcttttgataaatttataaatacgctgtagtaaaggaagtgctaaaatgtcaaagttaagggtagtgaattttgaacctacatccaaaggtgaaaacactcatctttatataatagaaaataacagcggagcaagcgtgacattatgtgatttaggcgcaagtgtcgtttcgataaaagttcccgacaaaaacggtagtattagagatgtagttctcggctatgagcacattgacggttatgaatttgacggaacatacttcggtgctactgtcggaagatgttgcggaagaattgcttacggcaaatttactcttaacggagaagattatcagctctctgtaaacaatgggagtaaccatctacacggcggatttaacaactttagccgcaaagtgtggcttgcggtagttgatgataaagttccaaatacagttctatttatgcttgatagtcccgacggtgatgagggctatcccggaaatatgaaggtctttgtacgctacacctttgatgatgaaaatgtacttacgataaaatggtcggcagtttctgacaaagacacaatatgcaatctgaccaatcattcatattttaatcttaacggacataaaagcggtaaagttacagaaaatcacaagctgaaaataaatgcaaatttcttcataccgataaattcaaacctcaatcccacaggagagataactcccgttaagaatacatcgtttgattttaccgaacccaagttaattggaaatggtattgacagaaaaaacgagcagattggttttgcaaacggtattgatcatatgtttgagctgaatcattctgatgaagaatttgtgcttgcagccgaagctgagggcattgatagcggaatcacattaaaatgctatacttctcaaaaaggtgttcatgtatatacagcaaattatgtcgatgttttgtccaatatgggaaaggattcagcgacatacggagaaaattcagcgttttgtcttgaaacccagggctttcccgatgctgtaaatcacaagacttttcctacaacaatattaaaagcaaacgaaaactatacacaaactacaaaatatatttttggtataaacaaataaaatgagctgatttctaactcctttaaaaataaaatctctctaaaatcaaggaccacctatttttcttgggtggtccttgatttttaatctatgaggatgtttcatgttttacagtattacaccgtcttaaaaatattctgttttagcggttatgtgccgagctgtggaataaaagcagtgcggataagctgtgaaagtgtgtcagaaatattatcataaagaatactgagtgcgtcataatttccgcattttacaagacttcgtgcaccgccaaatcactcatgtggttttgcggtaaattttgtaactgtacaattctgactgaaaatcgacctgttctgtttgcaccgtaaagccgggatattccccttgtacggctgtttttacaaactacatttttcattgccgtatatttcttagcgctgtttttgcttttatattaaaatacgcttaggatagatttctttaccttccgcatcaaattcataattttcattaccccactttttaaaaaataatcacttttccctaatataatattttataatctttcaaggattagtgtgtctttgtatctgtcatcagtaaacacctgtgggaatggctgcccctttgtggtatctttatatgcgtttacccacgcatacttaacgacctcattaacgctttgattgattgcttcaaagtgttttgtagcacactttattttaatacgttcatcatcattaagcccctcagcttccttatcccattttgtttctgcgataaaatacatagcaaagttctcgtttaataagattttcagggagaagaatagcagctccaagtgtgttcgcctgccattcttcccagtctgaaatcggtttgtcccgctcggagtttgccttgtaataatgtactccggcggatttctgtgttattccgtaatcatttgggaacaacatcttaaaaatctgatgactgccctcgtgcataagggtaaagttctttctgcccttcagcttgctgtcatagttcaattccttctcaacaagaacggttttaccgtccaaaaagaaaaaagcttcgctgtcgttatcttcaaatacttgaacacccagttccgtaaaagaggtcattccaagaatacttccgtcataggacaggtgctggtattcaacatttaaaccgagaaccttctccaagagaagttccgggtcaattctgtaaatttgtgtgttacggacatcggggagagccatatatgcctgaacatattttccggcgatggctttgatgtcatatctcgataaatgcttcaagttacaaaacctcctaccattaggattttgcttctacaaaccattttccattttcttcgtcgaacagaaatgtgggcttgccgcaaatctgcaccgtgtaacggataccggttcctccaactttggtggaagcagcacggcatttctgcataacacggtctatctcatatttctcgtcattttcaaacttgatgaagttcgggcgagccgttccatcaggtctgtgcgttacattaacttctacatatacttttattctttcggattccatttctatacctcgtaatttcgtaaagtcaaaaccaatcttccaaaatgctcataaccgtcaatgtccttgtccgacactttgtacttgggtcggtcatcgccggtagtattggtgtaacaggaaagtctgcctttcttgaagttctttttcctatcaaagataaggaacattccctcatatatcccgtagtcggtaaaatggtttccgccgtccgcacggaagataactatatcttcgctgcacccctgcataaagcagtcgggtattgtaacgtaagccgtaacctctttttcgttaatcacattaagccctccttagccgaccattcctgtcggcatcgtgatttcagctttttacggtggtagccgcaggttctgacacagaaccccattccttatgctgtcctttccgaaacgccgtctgatttcttcaacacacttttccattcgctccagcttgtcctgttttgcggcatccataaacaaatccaactgacggggcgtgtcttgcggaacaagatttatggcttgtagcgttacagaacgaatagggttataccatccatacctttgttcaaacaattgaaaaacggtcttggcaatcatcatcgaagactgtgtaggaagtgcaatcttcgtctgccattgtcttgtattgagtgtattgtctctgatatgtattgcgacaccctctgcactaagtccgtgaacacggagcttgtgtccgatgtcttgggtcaattcgagaaacacgggccacacctgctccgggttctctaagtcctcaactgttgttattccgtgtcctacgcttttaattggagaaacaaagtctttctttgcaacaacagaaatgtcgttgccattggcatagttccataagactactccgttctttcctaatgttctgcgtaagaactcagggtcagtatttgctaaatccccgatagtacggatacaatagctgtcgagcgtgcgctgtgttgcccgtcctacaccgagcaggtcagtggcaggaagcccccaaatcttctccttgaatgtatcctttggtattacggttactgcgtccggtttcttcatatccgaaccgagcttcgcaaatatcttattaaaggaaacacctacggaaattgtcaagccgagttcaaacttcatcgtttcacgaatttcatttgccaccttttccggcgaaccgaaaaggctttctgtcccgctaatatccagccaacactcgtccataccatacggttcaacttggtcggtatatcgctcataaacgcttctcgcaagctttgagtatttgatatactcctcataatggggcggcactacaaccaagtccttgcacttctgtttagcctgccatactgcgtccccggttttcacatcaaaagcctttgctttgtagttctttgcaagcacgataccgtgtcgttcctccacagagccgcagacagcaatcggatatttcttcaatgcggggtcgatcatacattcgacgctggcatagaaattgttcatatcgcaatgaagtatgcttctcaacatttttttgaacccccttgacttttatagaagtttaatgtaaactatatgtagttcaacttcctgtttcttattatacgcagtttaagtacagatgtcaatagcaagcaagaagtttaactacaataattcggtaaggagtgaaatctaagatgacattcggtgagaaagtcaaagcagagagaaccaaacttggtattactcaggaagaactggctgcaaaaatcggagtaacagttcgagtaatttgttcttatgaaaatgataaatcaagaccgagaggaacggaaagatacaaaaagttagcagaagcactagatgtaaatgttaattatctgctgtccgaggacgacgcattcatcgcagaggtagaagatgaatacggttgcagaggtgcaaggcaggctcaggaattgcttgcggaagtaaccgggctttttgccggcggcgagatggctgacgaggatatgcgtgaaatggttgacgctattcaggaagcttatcttatcgcaaagaaaaacaataaaaaatacactccgaagaaatatcgaaaagacgaataa

SEQ ID NO: 688 - DNA, 7466 bp, unidentified
  source 1..7466: mol_type = unassigned DNA
ttactttactacgtgtttagtatgcagtaattcatgtgccttttctgataatggttcttcaaagtaatctttatagcactggataacctctggattctcatgagaaaatcttaagttattcaccttatcaagtccataaagtaccttcgttcttgccgcaaccttatcataatcatcttttataggctgtccgcctccattaatacaaccgccaggacacgccatcacttcaacaaaatcatactttacctttcctgctgctattgtatccataagctttcttgcattagaaagactgcttgcaactgctaccttaagtatattgccatttatagtgaactttgcctctttccagccttcaagtcctcttacacactggaaagcatctggttcaggattagtcttattgacaagataataagcacttcttaatgcagcctccataactccaccggtagcaccaaatataacgcctgcaccacttcccatgccaagtggattatcaaactcttcttcctgaagctcctctgtcttaataaagaatgacttaagcattctttctacttctctggtagtaagtaccgcatctacatcgcctctgccatcccacgtaatctcatccttctttgcaagacatggcataattgatacacagaatatcttttcaggctccacgccaagcttttcagcataatatgacttcgtaactgcgccaaacatctgctgtggtgacttcgctgttgaaagtctttcaagatactgcggatattccttcttcacaaaattaacccatcccggacaacatgatgtaaacataggaagtcctgattctttaatctccggaagtctgtgaagcagctcacttccttcctccatgatagtaagatctgctgaaaatgttgtatcaaatatataatcaaagccgacctttcttaaggctgatacaagtcttttagctgttgcgaattccttgcttaatccaaagccttcaccccatgctgttctgacagccggcgcaatctgtacaactgttatgatatcttcattctctactgcatcaagaacatatccaacatcatctctttcccttaatgcacctaccggacaattaacaacacattgtccacacagcgtacatttagtttcctgtattgtcttattcttagctatattaacagtagttcttgaacctgtattaacaacatcccatacatgcattccctgtatgttatcacatatctgaacgcatctcatacacttaatacatttgtcattggcccttagaagtggaaaattcttatcccacttattcttttcaagtattgaatcataaggcatctctgatatgttaagttcattagcaagtgactgtaatgtacaatttccacttcttacacatgaagcacattcgtagtcatgctgcgaaagtataagcttaacattggtctttcttgtagtacgcacctttcttgtattggtttttataaccatgccctcctgtactacattattacatgctgtaacacatctgtcctggccttcaacttcaactacgcatactcgacacgcacctatctcattcacttccttcagatagcacagagtaggcacatcaactccaactttacgtgcagccgcaaggatagttgttccgtcttcgacggttatatctattccgttaattgttgcatttaccattgttcttctctgcctcctctaaaagcaccgaatccgaaatgatcacatcttaaacagcgtccagcctcctggcacgcttcttcacaagaaaaaccatattcaatcggttcaaaatcattctttctttcagctgcctccctgagtgcaacttcaactcttccgcaggctactttatcttcattacttgcatatggtatctcaacatcgcatgtaatctcatggttaaagccaagatactcatctatgttagctgccgcaaccttacctgctgcaatagcctttataactgtagccggacctgttacacagtcacctcctgcaaacactccctccgacatttcaccatcctgtggcgtaatattacctgtattaagtgctgagataacacctctctgaaccttgattccatgttcctcaaagctcttagtttctataccctggcctatggcaactactatcagatcactttctaagagcatttcatccttagatgctgccttaggtgctggtctgccatgtgaaacctttgatatcatctgtggctttactacaagtcctatggcattgccctcttcatcctgctttatacgtactggtgacataagctcaagaacatcgcagccttcagcctctgcgcctacaacttcctcttcaagtgctgtcatatcagccttacgtcttctgtatacaatacttaccttgcttgcgccaagtcttatagacgaacgtgcaacgtccattgcaacattaccaccgccgataacgataactctctttcctgtataatcaggcatatctccatcgcctattgcacgaagcatctcaactgcagatatgataccacttctggcatcttcaccttcaatccccatcttcttatctgcatgggcaccgatagatatatatgtagcatcgtactcatcagttatatcatcaaatgatatatcctttcctacacttatattcttcttaacctctattccagttgaaaggatagaatctatctcttcatcaagcttctttcttggaaatctgtagttaggaataccatatcttaacattccaccaagctgttttctttgttcaaatatagttaccttatgtcccataagggcaagataataggcagcactaagaccacctggtccaccaccgattatggcaaccttctttcctgtatctggttcacactctggtactggaactatgcctgcattatctaccgccatcttcttgagtcctcgtatattaacaggtgcatctattatagttctcttacatctgttctcacatggatgctcacatatgtaagcacacgttgtaggcattggattatctcttcttataagccttactgcatcagcatatcgcttctgctgcacaagtgctatataccccggaatgtcaacaccagcagggcatgacttaacacacgataccggctggttactgttacatgaacaaaaaccgttatgtatatgcgactcaaagtcatctatacagccatctactgacttaagtgcaagctttgctgcctcataacctatggcacaatctgctgaataatatataccttctgctgtaagctttatattctcaactgtttcctctgttgcctcaccatcaagcacattatcaaaaagtcttgcaagctgtcttaaaccaacacgacatggaacacacttgccacaagactgtgcaaggcacatttttataaatgatcttgtaagatcaaccggacataatcctggtggagatgccactattcgtctttcaagatcctgatacattgactccattgtaacctgagccttatccttagttaatatagttaatctactcactaaaaaaagacctctctttcctgaatttaatatgttattttaatatgttattgtctgtaataccaaatttatatcaaaaacattaaagccgtccgctcctgatgccatataacatatccagcacaataaccctaaaagttaagcaaaatattaatataaccaaaccattatagtgtaacattaccgataataattgacaataaaggttatttctttaacaaacaagcacaaatatcagaattcacacacaaatcactaatatgccgtattactatacaaactccagattataagcttaccaattactgctattaatatatattatatcttaatcctccatccctttcaacatttcacactaattatgaccgtttaactataaataagtaaatagtaaaaacatacgaaaacaagaacaaaaagcaggtgcggatataattccacacctgccaaaatataattatataacatttattattcttaattatccagaataaattgtcactactataatcctgtgattacttaacaactcttaccttaataacgccatctatagctgaaagcttagctgctacatcctctgtgatagctgctcctgtatcaagaacagaatatgcataatctcctcttgacttgttatccatagaatcaatattaatacctgcatcgcccataacacttgtaagcttgcttatgattgctggtacattcttatgacatactgtaactcttcctgctgatgtacacactccacaatcacagttaggataattaacagaattaacaatattaccgttctctatgtagtttcttaattccttaactgccataacagcacagttatcctcagcttcttcagttgaagcaccaagatgtggaagtacgataacgccttcctgacctgctgttgttgtgttagggaaatctgtaacatacttagcaaccttgccagacttgatagcatcaagaatagctggctcatcaacaagtacatcccttgcacagttaataactactgttcccttcttcatcatatcaaatgctgccttattaatcatgcccttagtactgtcaagtgcaggtacatggattgtgatataatcgcattccttatatatatcctccacattaacaatatgcttaacttcacttgaaagattccaggctgcattaactgaaagatatgggtcatatccatatacttccattccaaggcttatagctgcattagcaactaactgtccgatagcaccaagtccgataacaccaagcttcttgcccttgatttctttaccagcaaatgctttcttagccttttctgccgacttagcaatatccgcatcatctttattatcttctacccacttgataccaccaagtaaatctcttgaagctaaaagtaaagctgcaagaacgtgttccttaactgcattggcattagcacctggtgtattaaatacaacaatacccttatctgcacatttatcaagtggaatattattaacaccagcaccagctcttgctatagcaagaagattatctggcaattccatatcatgcatcttagcacttcttacaagtactgcatctgcttcttcaaatgctgcattagcattataatcgcttgagaaaaggtcaagacctacagaagctatattattaagacaatttacgttaatcattaggcattctccttttcgaacttcttcataaattcaactaacttctcaacaccttcgattggcattgcattgtagatagaagctctcataccgccaactgttctgtgtcccttaagatttacaaatccggctgcttctgcttctttaacaaacttagcatcaagttccttatcacctgttacgaatggaacattcataagtgaacggtcttccttaacaactgttcccttgaacatcttagattcatcaaggaaatcataaagaattttagctttcttttcattgtgttctttcatagctgaaagtccacccattttcttaatccacttaaataccttgccgcagatatagatattgtagcaaggaggtgtattataaagagaatctgcatctgcctgtgtcttccactttaacatagttggtgttccaggaagtacatcatctgttataaggtcttctctgataattgcgataacaactccagcaggtccgatattcttctgaactccaccatatacaactccgtactttgttacatctataggctctgataaaaagcatgatgaaacatctgatacaagaatatgtccctttgtattagggagtgtcttatacttagtaccataaattgtgttattctcacagatatatacataatctgcgtcctctggaatatcaagatctgaacaatctggaatatatgaatatgtcttatcctctgaggaagcaacagcaacagcctcaccatatattttagcttcgttaaatgctttcttagcccactgaccagtaataatataagctgcttttttgttcttcataaggttcataggaacttctgcaaagaactgcgatgctccaccctgaaggaataataccttataattatctggtatattcataagctctcttaagtctttttcagcttccttgatgatattgtcataaaccttggaacgatggctcatctccataaccgactgaccacaaccctggtaatctaacatttcatctgctgcttcccttaatacctcttcaggcaaaactgctggacctgcactaaagttataaactcttgccactttttcttcctcctaatccattcgaattctattaaatatatgataaatctttaatcctaagtacaaataattaacttttttaagcaagctgtatatatttgtcgcaaaatgtcttaagtattaaaaatttattaaactatattttatgcttgtatatttactatgtcaagttaatattttaacatattaaagttatatatgtattttttttaatactctgaacgtccgctaatgtataagcgttgctttattaatgtgcaaaccacgtggaaatatacttataatatacttatattatacttataccacgcctataatatacctatggcatacttataatgcgcttataatatatttataatatgattatatataaatttccaacctataaaaatcatataaaacaattacgatttttcttttcatataggataaacgcaagtcacaaaaaacctgacttgcgtttatcctacatccaatcactttcaacttcttccaacttcttcacaagtgtatccttaagaacactaaaagcaggaataaaactatcccttattaacataatcatttcgtcaacttcatcttcattatatatatgaacagaagtatttctcttttttaacataagcagccatacttcggaatcattgatgaatccaattttataacccaactgtaaaatttcacgtggggaccctgtagaagctccatccacaccatgcattctcattatttcctgtaatgctttccatgcaagctcaaaagtaagattaaattgtcctataattcctgttcgatatatatcattcgtttcggcaagctgaaattctgcgtctgctaatatagccagacaattggtaaagttatcaagttttttcataaattgtaacaccgtccttttctatttcttgtttcaattcatccgaaattgctacatctgcctgtacaatatcaaacatcaatagagaatgggtcttctctttaacatcccaataaaaatgctcaaaatctccaccatatacggcgatgtctatgtcgcttctttctgtatgggtgcctcgtgcacgagaaccaaataatatgatctttgtaatagcatatttttttgcgaaagtagaaagctcccttagtattcgatccggtaaattatacttcat

SEQ ID NO: 689 - DNA, 8144 bp, unidentified
  source 1..8144: mol_type = unassigned DNA
ctattgtacaattttctccagaggctttaacatgtaggcaccctcttgcttcaagaaagagaatcctcctgtagcagatattctttttaatgctgcttctatgccacactccaagtctattttacctgctatctttatagttgaaatatcatctgtacaatcaatatcaactccataatatcgacccagtttggctaaaattacattcaacggatcattattcagagacaatattccttcagtccaaagtacatattcttctgcatttactgaagactcttcaatcagaccatcagacaatattgtagctttattatcaggtgaaagaaccagttccttacccgatttgctcttcacatttactttaccacgtactaagacaacttctgcattttcaaatgtgccgctataagcctttatatcaaaagcagtccctaatacttgtacttcaaattgtgccgttttcacaataaaaggagctgattcatctcgtttcacatcaataaaaatttctccatctacaaagatttcacgtctgtttttctcaaaacgtttaggataaatcactttcgtacccgcatttatatgcaaactagaaccatcagcaagaatcaaacgggtatatttacctttaggaacaataatctggtcgtataaatcttttgtagtattcttagataccttttcttcatctacactcacaattccctcttgtgaataagctactgtagctcctttctttacatgatgaacttctttctcagagacaattaaacgaatatcctctccttctatagattcattagacatttgtgctgctattacggatatatccgatttattattaaaagaatgccattcaattcccaaccatatacaccctatgaaagcagctgcagaagtaattgccacaagtatatatcgctctttccttctttgttttttcttttcaaccccttcttttattttactccatacttcaactatttccttttgagaaggaacttcgttttgcatcttgaaataatctataagattgcgtacagtattcctgatatctattttactatatttcatttttatcctcttttataattagaatggaattaaaagaaaaacctactcacttttacagcattttttttgcagaaaaaaacagtagagtcagaaaaaggatatatctatataataatcaacaaattacaaagaaaatatttttcccctttcaaagagataatattattttaagaaaaaacaattgccatacacccaaaaagtattcatcttgagttactagagtgcgcagtttagttaaagcccggctagacaaattcatagacgattgtatgttcatatccataacatccgctatttccttatatgagagttcctgcacataacgtaaataaagaactgttttttgattcggagataactgtgagattgcctccaaaagacgacgagccagttgcagatcatgatcattcttaggaaataactgttcaaatagatcttcattgagcggaatatgaaaaactgagtcatctaatgaatccgcttctttattagttgctaatttataggtgagattatttcttaaagcttttaatagataagaacggactgttatgtttgtcacattaatgtgagtattctgatataagtttataaaaagatcctggatacaatctttgaccaattctttatctgtactgcatctcaaaccataattcaacagaagagaatagtatctttgataaagtatttccaatgctttttgatcgccttttatcaaaaggccccacaaaacaatatcatccatttcactagaggcagccatgcttttcattttctatagacataacacaaatatactttaaatattcaaagattaaaaaaaaatcctatttttttatgagaaaaattactcgttaaaatactcaaaaaccttccaataagtgggatagaagtgcatcgtgtccgataacagtgaaaatcagtgaaagaatttaaaagagaaacaaatgcaacagaattatttggaagaaatacaatgaaggcttacatttgtcatgtgatttttttcatagtattagatttaaggttaacaaaggttggagcaaagcgttgctcctttttttatgtttatgataaactaagctaataattgatacattcctcccaccaatacacgaattacacctttcatttcaagttcgaaaagaattgcattcattttctgtacaggaatatctgcttcaacaactaatgtattaatctgtaaatctccttgtttctccagaatatcaaccaccttttgctcgtcctcggataagtcaaggaaaagactgcgttgcacattttccactttcgccggatgagcagcaatatcccaacccattgccgatacaaaatcttctgccgaaagaagtaaagaagccttattatcccgaatcagttggttacagcctttggaatattcatcattcaggcgtcccgggaaagcaaagcagtcccggtgatagccttcggcaagttcggcagtgattaacgaaccacccttctcggcagactcaataacaattgtagcgtcacacataccggcaacgatacggttgcggctgacaaagttatggcggtcgggattcgttccggtcaggaattcagttaacagcccaccattatcaagcatatcaatagctgtctttcgatgcacatagggatagatgcgatccaagccatgggcaagaactcctaccgtagaaagctgattggctaatgctgcacgatgagcgtttatatcgattccataagccaagccactgactaccaagacatcagggcacagtactttcagatcgtgcaaaaaagaagcacagatacgggttccataatcagtggcatgacgagtacctaccatattaacgacacggagggcattcaaatctgtatttcctttgaagaaaagaacaacgggagcatcctcacactctctcaatcgggaaggatactcctcgtcggttatggtcaggcaacgaatattattcttctgaacaaaatcaaattcctgcttcgcacggtcaatggcttgcgggcaatccaacgcattcactacacgccgacttattcccgaaacacattcaagaagtgcctcgcgattatggaatatgaacccagcacttcccgcctcgtccatcaaatgtttcgctccaatatgcccgataccaggcaccattgtcaaagcaatactataaatttgttcttcttcggagctattcatttcaggtaaggtgcaaagacgttatcaaacaattcgctgtcactcaaacgtccatttactacacataccgtttcaacagtggatttcactactactttattatcacttttccggaaaatatcctgatagaacacatacttaatgccttctttcttcatatatagcttggatacaaattcatctccactcttcaacggagttttgaaagccatattgatacgtgctactacgggatcgactccctgctcatgaagcgctgcaaagctaacgccgaccgaggtcagaaattcatgccgagtatgttccagataatgctgatagttggcattattgacaataccttgaaggtcgcattcataatcacgcaccttcatttccaattcatagatatagttcatttatcgtgaattaaagattagagaataatgaccggagctagcctcttttctgttcgatatccagccctttaaactttttcagttcttcggtagataccagtttatacagtttgtcgctcggacgtatcttatccgacttcatagagaaatgctgccctttctttacggtctgcaccggttccagatcaacacgcgcttcatccaatgtcataaaaacagcgccggtagtcggtcctgtaatcaacagtttgtcgcctacgctaacctcggcagcttcaaccaaaaactcggagactccgatgttagaaaagtatttgatcccttttcccacgtaaatcttacgttccgttgccgccgatccataattgcgggtccattctcccaaacgctgtccgagatagtagccgtcccagaaaccacggttgaaaacggtcttcaggcgttcatcccatgctgcaatcttttcatcagtaaaggtatcttccagataggctttgatagcttctttgtagcattccaccactgtgcgcacatactcaggtccacgggcacgaccttcaatcttgaacacacgcacacctgcatccaacatcttattcataaaatgaatagttttcaggtctttcggcgacatgatatattcgttatcaatatccaattccacatccgtttccttatcacgaacggtataagaacgacgacacacctgcatacaagcaccccggttggcagaatggttcatctcatgcaaagaaagatagcatttacccgaaacagccatacagagcgcaccatgacagaacatttcaatacgaagctgttcgccactcggaccgcagatatgttcttcctgtatctgccggtaaatctccgctacctgttccagattcaattcacgggccagtaccactacatcagcaaaccgggcatagaatttcaacgcttctgcattggagatattcagctgggtggaaagatgcacctcctgccctatccggcgggcatagtccatcactgcaacatcagccgcaatcacagccgaaattcccgcttccttagccgcatcgacaatcgtatgcattaaaggaatatctttatcatagataatggtgttcaccgtcaggtagcttttcatcccgtgctcatcgcacgtgcgggctatttcccgcaagtcatcaatcgtgaacgtattagccgaacgggcacgcatattcaagttttctataccgaaatagatagaatcggcacctgcctgaatggccgcagctagagattcgcgcgaacctacaggagccataatttcaaaatctttcaaactaagactcatagaatatatacttatttgtatcagttaagcaaatgaatgcgtacaaaggtaggcttttttccgtatttttgcagcgaaaagaagaagttacttcaatcataaacagcaaataacaaaatcgtatatgaagattaaccatatagacttgggaaaacatcctatcctgcttgctcccatggaagacgtgaccgacccggctttccgcctgatgtgcaaaaagttcggagcggacatggtatatactgaatttgtatcgagtgacgcactgatacgtgctgtcagcaagacagcgcagaagttaaacatcagtgatgaagaacgtcccgtcgccattcagatatacggcaaagatacggaaaccatggtggaagccgcaaagattgtggaacaggcacagcctgatattttggatattaacttcggatgcccggtgaaaagagtggccggaaagggtgccggagcaggaatgttgcagaatatccctcaaatgctggaaattacccgtgctgtagtggatgcggtaaaaatccccgtaacggtgaaaacccgtctggggtgggacgccaacaacaaaattatcgtagagctggcagaacagttacaggattgcggtattgccgcattaaccatacacggtcgtacccgtgcacaaatgtacaccggagaagcggactggacgctgataggagaagtaaaaaataatccgcggatgcatatcccgatcatcggcaacggggatgtgacaacgcctcaacgctgcaaggagtgtttcgaccgttatggagtggacgctgttatgataggccgtgccagcttcggccgtccatggatatttaaagagatgaagcattatctggagacaggcgaggaactgccgccactaagttttgaatggtgcatggaagtcctccgccaggaagtgattgacagtgtaaacttactcgacgaacgcaaaggtatcttgcacgtgcgccgtcacttggctgcaagcccgttattcaaaggaatccctaatttccgtgacacccgcatcgctatgttacgtgccgagaccaaagaggagctgtttcagatatttaatgaaatactcaccaacagagaaagtagcccgaaaaattaaatacgatatttatagcattgcatccttgaagatagtattatggagcaatgctattttatttgaacatcggttgcgcaaaccactttttaaacatccaagttaccaccacgtacaacaggaatgcggagaaaaagcctacaatagcatcaatgacataatgagcctgaatatatacagtagctccacaaagcagcatatagaaaggtatcaggcaagcaaacagcttcttactgccccgccatgccataatcatcagaatggtagaaatgccgacatgcgaacttggaaatgcggccgtaggccgttcgcccacttgttgggagccttccactaaactataaaagaacccatgctgatagcccggaccgggaagcaattcctgatgatgattgaaataatcaccgatagccggaaaaattcctttagaaacgttatcaaatccaatggcaggaaaatagaattgaggtcctgcaacaggtacgaatatatatatcagataatagataaagaaggaagtgacaagcacaaaagacatcttttcaaaccactcgaacctataaatgaaatagaataacgccacaatcaacatcatcggataatagaagaaatatcccatattgaacgcctcactgaccagaagatgcgggaacgtatgacagaaccagatagcaggttgcccattaaaaataaactgttcggtgatagcgaagacatgatccagattcggaaagaaccggttgaactcgaaagtatccggataccagtaagaaagcaggctcatctgaatgacgatgcgtacaaacgccgaaaacttacagggagcaagccggtagagatacatcaacagaaaagtcattgcagcaatcatagccctatccagcaacatgtgccatggatgatccattcgctgaaacaggaatagaatcaaaatggaggtcaacagattataaatcaatgtaatcttctccacagcaaacaaccctttccgggtttctactcgcttaaataagtctaaagccatccttcgtttttataccaggcaatggtttcatggactcccttttccaaatcatattcgggcgcatatcccagttcattaattgtcgggatgatgtcacattgccaattgcgttgtttcattatcttatatttatccgaatttagtgtactgctctttccggaacgtgtagcaataaattcagcgagcaaagatataacttttagcacaattaacggacatttcagatgaagaacaaacggattacccaattctttttgtatcaggtccgaaaacgcacgactcttatacacattcccgtctgtcaggaaatacgttctacgggtaacatttttctctattcccaggaaaatagcttgcacaatgtctttcacataaacaaaagtaaggtcttgacgccggaaacccaccgagaaatcaacatgcttctgaatagatttcgccataaggaaataatctgtttcacgaggtccgtaaactcccgtaggacgataaatgacataaggaaaaccgggaatactctgaatatacagttccgctttcagtttactgaacccataagccgtattggggaccggagtatcatccgcctcaatcggagtataatccttctcacgtacaggaccgaatacactcaacgtgctgatatatataaactgcttcggaaccatattcaacgctttcagcgtgtctataaaatatttagtctggagataattgacataatcaaaagtctttttgtcagagcatttggtgacaccggcacaatgaatgatataatcaaacttgttataagtacctttatgcccggagagttgggcgcgaagttcattaggatgcgcaaagtccagttccagaaaatgaatcttccggtttttcaaatatttcttactgctcgtagaacgaatccctgcccacacaccaaaccttcgtttcaacgcttcctctacgatgaaacttcctataaaaccgcttgcgcccgtaattaaaacactctccat

SEQ ID NO: 690 - DNA, 24403 bp, unidentified
  source 1..24403: mol_type = unassigned DNA
cacgatataaatttccgaaatgttgtttttatgcagaccatcgattaccgtatcaatcatccgtttgccatttaccttgaccagcggcttcggtgttgtcagcgtaaccggatgcatccggtttcccaatccggctgccataataatggctctctccactttaggcattttccctcgccccgctttcctctaatttcttcaactcgtcctgaacgatcctgtagtagtccttcgcgtagcgatattgccgcagagaatactcgccaaattccacgcccagatttcgcttatactcgcaccagttgctccacagcaaaccacaggctgcaatgtaacagtagattttgatccgtgtcgcatcatcgcagccgtccgtaaaatatgccgcaatcaaacgatccacctgacgcttattgtaaagcgagtaaatgcagaacattgcgatatccacatgaggatcctgcatacccgcatactcccagtcaatcagacgaatttcctctttcccatctctctggacaaacaggaagttatccggtacagcatcaatatgcgtcaaaatcttttcgctcacgtgttcatcaatataaggcttcaaagaccagacattcgccttggttttctcataatccttgtaaacagaaggagcgccatcccacagcgtttcatagaactccatctgtccgaaaatatcaaactcatgcgccactttcagcttcaacgcatggaactcacgcagacggctcatgcacttcttgacatcttcatagtcggtggggtcgcatacccgggcaccctccagaaattctgtgatcttatagccgttctccgggttaatataggcgatatcgtcacagatgtttttatcagcgatggcatgatacactgccgcttcctgacggcgattgataagctggtctgtaccctctcccggaatgcgcataatgtactttttgtccttacaggtaaacagaaacgaacggttggtcattccctttttcaggactgtaatatccgtgacttcctccggttttgcgcacaatgccttgcagattaaacgaatcgcatccgttttcagttggttagaatcgctgtcgatctcacgaagctgctcataggtgttgatctccacaacatctgccgaatgcactacccgggctgtgacgatcatgcgatccttattatagagtgcttcttcccaaaacaaaccatcatactgtggttttttgcagagttcctcgatgtgtgcagaaaccgtatcggagtcctcttttgtaaggtagctgataccgatcatcgcattaccaccgacattttccggcacagttaccagctccatcttgcggttcacacggacattactttcgttttccacaagatcgctgaccatataccatgagtacagctcatgacggtgaaacggattgcggtcacaccagatatcacaagggacaatgtacgcattctccagatgctcttttaccagtttgagagaatgcagattattctttgccgcatagtccgggttgaccaccagttccacgccgtactcatctatcaggtattcatatttttccttcatgaaacctacaataacgtagatttcatgaatccccacttcgtgaagctgcttgatgattcgctcaatcaaaggctccccgttgacttccagaaggcccttgggcatttctgtattgatgggaaccatccgcataccaaagccggctgccagaataattgcacgttttggagtcttattcttgtattccgcaacagcctttgctgtggggcaaatcgcttcgttcagataccctgccttaatgagttcctttagggaacggtttactactcccaatgaatgacccgaaacctccgctaaaacacgctgattgatgaacggctcaagtagcagagcgttcagaatatcgctttcttgtttattcatgtacactcctccatcgctttttggtgaacagttttgtaaagcaaaaactttcattctcaaaagcttctgcttgcactatctgtgctcatcagtctctaaagatatccttgatttttagaattctgattcagttttatctaccattcgtaagcgcttgttttttgtcatttcaattgcctagttaatggttcttctccccaaaaaatctgtcttccagcatcaggcacaggcaatgatagataggcagatgtaattcctgaatcatataggtctcggtctgcggagccttgatgcacacatcgctcatatccttcagtttgctatcctttgcccccgtcagtccaatgaccttcattcccttagcgtgtgcggttgtcgccgcaaacagcacatttttgctattaccactggtggaaatgccaaggaatacgtctccagccttaccatagccgttgacctgctgtgcgaagcagagtagtggttcacagtcgttcatgtaagctgtggacaaagcaggatgaccatccaacgcaatagccggaagcgccccctgcaggttttctgccagaacagaaccgagttcctgattttccgcaaccagtttttctgcgaagtcagtttcaggcttacggggcagcttgaaccccttcatcagttcaccaacgatatgctccgcgtctgctgcagaaccaccgttgccagccacaagaagctttccaccattctcataggactcctccagcaaaaggtatgcggcaacaatatcattcttcgccgattctaaagaagggtatcgttctaccagcaggtcaatgtgtttgagcagtcgatcattcactttattcatttcattccctcgacattatttcaattccaccacacgtcctgtatatggtgtggtttttgttgttcaatcggtggcagagtcatataatcaccatatgtatttcttagaatgttatcatagccagacggaatatagaattcgccatcttcaaatctgtgcaacattcgctcagaaaaatccttgcgatcatatagaatgcaatcaccttgaatgcatatgagtttttctccgtgtacggatctatacttttttgccaatgccagttgtcggcgaagtattgattctgttcgatgccaattaagcagcccaactattagtttcgaccttaaattcatattttgttttgcatattcccatgacgtatctgcatacagattcattgctcgcaagaaattcccttgcttaatccattgcgacatttctttttcatcttggggtgcatcatctaatacccatacatcaacaaaaacgccaattggatctgttcgtttgaaggccttctcaattaacgaagttcttgaatcacatatctttagcaaatcgcgaggaaagaaatgctcttttgaatttggtcctgctaaaaacaagccatgcgattctccccattgagggaattctctttcaaacttttcaaacccatcccgcataacaaaaatgtctatatcgtcatcccatggaataaagccctcatgtcgaacagcaccgatcagcgtaccgtatgttaaaacataccagattcctttttcttcacaaaactgatgaacttttttcatgattgaaagttctatggttttcaattcatccaaacttgttatctcgcgcattttctttcctctctcatttatgaagcaatttcttagccaatgcaatcatctttgaacgttcacttctgtcaaatacacataccatataagttacagttccaaatagtccaatcaggcagacgttaattataaaacccgtccacgattttactataattccgccaaaaacaatccttactacactaacaagaatcagatctgacaccacaattcttgtgattgctccatagaatgacatcagcggtaagccaatacaccaagccgaatatagcggggtaaagatcaggaatgtaacaaaccccaataccgtagttgttccaacgaccgcatataaatcaagttctgtatatgtcaataagacaaacatactaatcacgtttaatgcgccactaatcaccgtcacaatacaagcagctgtatttttcaaagatagcgtataggtataaaacattggatttgctacactttcaaaaacaaaaccaatcaacgtaacgatagcaattctatttaagagactgctatcattgttgggggtccacagctcaaagtacgactctcccaatacagagaaccctgctaaaatgacccctgatagaatccccaaaagcttcatttgaaaaattattgtatctcgcactccaactttattcttatcggcataaagcttcaacaacgtcggctgaaaaggctgtgtaattagtggaggaagcgcagaacacattgatgccactgtcttaacaatcgaaagctgtcccatttttagcgcatccaacatcaagttcgtaacccaaagatccaaacctgtattcagaagatttccgatttgattaaatgcactccacagccccctacctagaagttcctttacagcagaaaaagaaaacgaattgctccggcaaacaagatccggagttaatttctgcttcacgccgaaattgattgttccatagacaatgctcgaaagcaacaatgcagctccaacaaaccataccttaggtttaaacaaggaaaagagtactataagaatcagcgcctcagcggtgtatgtaacaattttcgaaacactaatatactgaagtctgttttttatgtatccagataccgtataaatattagcgagcgcaagaaccatgcagtttactatatccaaataaaacaagattctaacgtcatgcagtagttcatctggaaccgagaaaaacgatctaatattttttgccaaaaatagtgccgcacctaggctaaccgcaattaataaaacatcagcaattacaacactgctatagaatgaattcgctcgtttcttatttccttcgtgataggctactaccacaaatcgtgacgcatatgcattcaagcaactagttattatcacaccataattagccactgtctttgccaacgaaacaaaaccatatgcttccgttcccaatgtattcgtgatatatggcgttaggaaaaaagaaatcatgtagttaataatcattgcaaatactgaacacagcatcgctacaacaatttgaattttatcgccgcctcttgaattcttaattcccatttaaccactccacttgttttattatttcacaatccgttcagttgcaataatggaacacttaatttctcaaatagctttccacaaagtccttcaaagacgataccgtcacagtttgtccgcaggactcagagccaatcaaagcagtctgacatccggcattctgacccgccttgatatcattttccccatcgccaatcatccaagactgcgacagatcaatgttaaaatcccgtgctgcattcagcagcattccaggtttcggtttgcggcaatcacagtcaaacttcagttctgggcgctccccttcatatcccttatgcggatggtgtgggcagaagtagatggcatccagatatgcgccttctttgcctagaagtgtctccattttgttgtgaatctcttcgagttcttcaaaggacacttcaccacgggcgatcacaggctgattcgtaacaacgattgccaaataaccagaagcattgatttttttgattgcatctgcaacgccgtccatcaactcaaactcggctatgttccgtaggaaccccacatatttattgattgtaccgtcccgatcaaggaacaccgctttctgcttgttcttcagattcttaccggaaacgcgaccagtcttgtagtcctcgcatacagagtaatagcgttcaggcgtacccatgtccttcacatactcaggactatcgtagcagaacatctttccggtacctgccaacggcttaaggagctgccgatccaggtcaaccttgatgggtttcccgttctctccaacggtgccaaccttgtccgcatcaattcctgaccgctccaagataattggattgattacatgaagtcctgcattcacacggttgcggtagtattccgggcgttcatcttccttcgccagccattgctcgacagctccatttttatcagcaataatgagtccgctatcgtagggatggctatttggatgtgtgaaaagagtaaccaaaccgccatgctgtttatgaaatgcaacgaaccggttgaaatccacatcgaacaccgcatctgcattcagcaacagaaaatccgaatccaacttatccttgattttgaaaagcgcaccagcattacccagcggctccttctcaaaatagtattcaatatgaacaccaaagggttttcctgttgccggagatacgcctgaaccatctccgaaatagtccatgatgatgtttccgagatgagaaacggtcaaaataatgtctgtgaatccttggtcgcgcagacactccagctcacgttccagaacaggctttccttcgatttttatcatcggcttggggatatcactggcaacagaggaaatccgagtgcccctgccgcctgccattattactgttttcattgttttatatctatcaatacctcatgctattacatttctactcttgataactgcagggacaccaactgcaatcgcgttttccggcacatcctctaaaaccacagcatttgccccaataatagaattatctcctacactaatatctcccaaaataactgctcccgcaccaatcatcacgttattcccaattcgaggcggcaacccaggttgtttgttttctgcccatttgcatccaagtgtaacattaccgaatatgcggcaattctcgccaatcgtacatagctcatgcacaacgcatcccactccgtgatgatagaatactgttcctttacctatccgcgcttgcgctgatattccatttccgcatagcacgttatacaggatttctatgagccttgcaatgtggtgtgcccccccccacatacaattggtgacttattctccacaatttgctattcataactttcctcaattctttggttcatacatttccggtgtataatgaataactctcgttccaccgtcttcaaattcaaacggaatatacatcaaatcccgcattgcccaacgaacagcatcctggtgatccggctgcacatagaacacaaggaatcctccgccaccagcaccgagcagttttccacccagcgcgccggcagccatgccttttgcgtacaaatcatcaatgctattagtcgaaacagccgaaccggtttgacgtttcagtttccaagtgtgatcaagcattctgccaaaatcatcgaggtcagtgttcttgtcggtcaaaacacgctccgcatcatcaacgagcgcaagcatttccttaagttgagcagtcttatcctgcttacctacagcgtttgctttctgcacatcagaagagaaacgagtaaagcccgtaaagaacatcatcagatttttattaagctgctttttacgatccggtgagataataaccggcagcacttcgtagccgtccgcattgaaattgattcggttaaatccgccaaaagacgctgcaatctgatcttgccagccaccggcctcctggcacaggttgcgctcaaggtaaattgcttcgtccgccaactttttcttgtccgcatacttgcctttgagtgcgtaaaatgcgttcagcattccaacagcgaaggaactagatgttcccaggccagaacgtgcagggagatcggcttcatatgtaaggcggatttcgtgcatgtcaagcatcttcatcgcatttcgaatcgccggatgctgaatatcatcgatgtttgttacacgctccgtctttgagtaggaaagctctgtagaataatcaaagaaccgcggcaaatgacgaacgttcacatagcaatatttgtcgaaggtagtggaaaggacagcaccaccattctccctaaaaaagctttccatatcggtgccaccaccgaagaaggacatccgaaatggtgttttggtgataatcatttaaatctctccatattcagtatgtttgtagtttttcttaatgtaaaagttaaatcccacagtctttaaggaaatcttcaaaagacaaatagaccgggtcagacgccagaaaatttttacagacatcttcataatcatcacctgttaaggtgaagaaatttttatgtaactctatgctctcttgtgttcgaggagcatacaaccaataaaaaccgtccttcatttcttcaactgttggccgccgtccggtattatgataaatttccaatgcacatttttttgcatcgtccacccatctattttttcttttctggtaatactcatccagtgtgcaaataactcttgccggatttccagcgattacaacattatcagggtacccccccccgacaacggatccagcacccacaatacaattgtttccaatcgtcgttcctggaaggataattgaattcattcccaaaaaacaattatcgccaatttttgttggcgccgtgcctccaataaattcaccaaacacacgacgtgccactgaaatcgaataatcgtgtgccaaaataataactccagtcgttatcttacaataggatccaatagaaatcagatgcggtttttgaatatctaccgatgtatgtctcggcgaataaaaaatagtgtgatctccaacgtaaatattatttcgtttaagataattgatatatgcttcatttgaacaatgattaggatcaatcacttttttaattagattaatcaatttcataatttcccctcattcttgtaaaatcttcacacaaaacagccacatagtagatgaacattgccaaagcctgtccaaaatagttttccatcatgctcatgatgacaaatagaagttgaatataaagcgagaagtcctgtgcaatattatccatatccgaagcatgtttctttttgctgtacgttttgatgaaggtccaaatgattggtataaaccaaataacactaccgattagacctcgttcaaccaataccgccagatatgcattatctattaatgcaccgccaccagctaaactggaattgccaactccatatccgaataatgggtaattccagaaatttgataatgcatttccccatatagtttgtctgccattcatcatattgcccgaaagacgatcaaatttatccagcagaccttgcatccctggaatccaatctacgccaaccgaaagcaaaaaagcgataccaagaagtagtaacactatctttgaaaatttgcctccgcttgtgtcaaagtaaatatatgccagcacaagacaaagtgccaacaatgaacctcttcgtgttgtaaacaacacacctgttaaaaacaaggcaacaagaacgatatataaaatcttcgtaatacttctttttgaatgcttagcaaaaatagctgcgcatattgcaccaattgtcatatacattgctgccatgctagtttgaaccgtaaaaccataaaaggaggcattatatgtcatctgatacagaatatccgcatgagaatatgacggaagtaacggaaggatgatacttttataggcgtttggtacaaatacctgaatgtatatgcagatcaaatgaacgacacaaaagccaagagttgtcttcataactttggttgttgtaatgttcctacctatcatagctgcaacgccaagatagacaaaaaaatacacgtcatttattattgatgtccatgcgtccgcagaaagaaagcacactagaaaaccaacatacaagaatttaaacagcgttaattctgttccttgaagcacttctcttttcatcagcagaatcacaaatgctatggcaaatatagttggccaaaaaatctttggatcaagtcgaaggacaaacgatgacgaaaagaaatagtgccacaacacaataaacaacaagagggcacatccttttttgggtcttctctggtttatcagcattattatttttccccttcaattttttctaacatgccccttacatttgcgttccagtccatattcttagaatagtactcgagaatctctttctcaaaggctcttgcggtttcagaggtcatttcaatcagggcatttttccactcattttgtgtgctacatataatgcccgtctttccattcacaacgaactgtgtcagccccgcaacatttgatacaacaaccggcttgccaaacaaatatgccagcggaataataccactttgagttgcttcaatatacggtaatacggctgccgtcatatgatgaagtagccatttcatttctccatcatcgatataccgattgataactgtgaggttattgcactgattaatcaggcttttttcttcctctgtaaaatttccaccgcctgctataaccagcgggagagctttatccgaaatatcctgatatacttttaatagatttccaatgcctttatatttatcaatccgtccaaagaacagcagataatcgctttctgcattcatttccgcaggcttaatttcatttgcatctggcagatgcgctccaagcgttatcattacagctttttctttataatgcggatacagattaccaaacgtcacaacactctccggagacatcaacacaaacttatctactcgtttatagaaccttctatttatgaattccgtgtatttctccaataagaccatccgcaggcttctgttatttgtaggatggtgcgttcctgcgtcgtggagcgttaaaagctgcttgatttcgcctttcaaaaacattccaacatttgaacatatcacgctatcgtccatataccaaatgaactcaggctgaatattattgattctgcccgctatttttttataaggagactgatcaattactttcttttctttatggtattggaggagatcagtctttgcaatcaagctgatgtctgtatcatgaatttcatagggcattacaaccttcacgtcgtacccttcttcgacaagtgtcttgtacaactgtacggttagctgtaaaattccaccttgcacgtttgctgtaaaaagagctattcttgctttcacgctgatatttcctccctgcctattgtttctttactttgtctgccgataaaccttatccaatgcttccttatatgttttaatatccagaatttgcgctgccttttccaatgtagcgtgatgcaggttctggtacagttctttattttccagaacatccgtgcaacgctcgatcaggacatcgtcatcatcgctcaaataccctgtcttaccatcatcgacgatttccttcagtccatcagtcggtgtgcttacaatcggcacaccaagtgccattgcttccagagcgcacatcggaagcccttcccatctcgaagtcataatcagaattttagcctgcttcattgccccatatgggttgctgctatatcccagcatatcgatgctatgctccgcatggtgctcggcaatcgcctgctttgtttctgcctccaaatcgcctgtgccgataatagcggctttcatcttcggatacttttctgctattccagcaagtactttgaccagcctctgggggttttttgggggggtcaatctacccacatatacaatatcgtatgcatattctttttcatcttgtgcggcctttttatagacttcttctgcgtcgattacgttataaaggatgctgctttttccctcgaactgttcatgaaatgcatatccttcatatgcagatttcgacacccaaaaaatatgctttgctttttgggcagcatacctgtaaagcaacgctttcgcagagattcctcgagaatcaaaattattattatgcacatgggaaatcagcggaatcctcccgcaaagcaatgctgcaaaaaaagatgctttcatgtcgtgagcatgaataatatctggtttttcttcacggataatgcgcttaacttctgacaaggaccattctttcatcggcgcaaaccgcacattacgttcttttagtgcctcacgaattttcccatctggactgcagtaaaacatttcatactctgcatcgttcttaaagcacgccataatttggcatgcaacgttttccgcccctgaaaaactcgttcctgttaaaagatgcatgattttcttactcatcttacctatcctctacactcttatacagtttcttaagactttgaatggcgtgatctagatcgaagttcacaacattattgctatttcttgtaacctcgcgcagtctttcgcctttatctactatgctcctcatcttatctgccagctcatctgcgttcttcgggtcaaacagataatcactgtcacccaacaaatcagtacacccacggatctttgaagcaatacagggcaaacctgacgccattgcctccatcagcgctccgggcaggccctccctaaaagacgtaaacacaaagcaatcacatgcaaggagcacttctggaatgttgctctgaaatccaagcagttttacttgttttccaacgccaagctgttcggccagttctaccaggtactttcggttttcgccttcaccacaaattagataataaaaattgagatcattggcctttgcgagggcacgaatcgccacttcctgatttttgttgtcattaagttctcccacagatacaaaaacaaatgcactcgggtctatgttccaggtctttctcagagacaaacgaatctcctcacccttttctgttttgcgttgttccttatcaaattttgacagatcaactccaacaccaggaactttttctactcgaccatttttccttaaccggaatttttttgcctgaacataatctgcatcatttattgtgataagcatatccgtaaagtgcgccatatatctttctatcggatagtagcaaatccaattttttatgggggcacctgtccaaaaatgaaatccatgcgcctcataaatcacatacggaattttagccttatttgcacagattcttcctaacacaccaccaatcggagtattgcaatgaaccacatcgtatttttctcgcttcatcagatcgagcaactgttttttagcaagcgtgtagttcttctttgctaacggatttctgtcgcagtctatgtgttctgctttaattccgtatgttctgcagtcttcttcatataactgtttgtctgcgtgatccatattgctgacaatcgtaaaatcaatattcaattgtcttgctgcaataatcgccgaacgcataaacccgtttattctccgtcctgactgactcgttacatataacagcttcattttccgtctccattattcagaacagttccataaaacgattcatagcgtcgcctgttgcatattttttactaccatactggtaagcatagctactcatcgtatcatattcttctgcactcagtttcatagcttcctttagcttatccgcaaactttttattatcgcccgcctcaacaagataaccgctcttcccatcatccacctgctccggaatagcacccacagcaaacgcaatgacaggtcggctatacttgtaagcgtcgataataatgccggactgagaagcagaattatatggaacgattacccagtcacagttaatgaaagcctcccgcatttcttcatcagtgacataatcattgttgagctttacatttttctcttttgcaagttgctcaacaactttctgcatctgcggatcaacccgaccaataacatcaaattgaatatccgggcacaggcgaacaatctctaacaggttatctgcacctttgtaaggattgattctcccaaagaatagagcacgaccactatgtaccggggacgtatatgctggatatctacgccacaattccagatactttacacggtctgcgctgattccgtagcggtcgatcatatcctgaatataggttttgttgcgcaggacaatcgtatctgcgaacttaaccacagccttgttcatcaaatcaaccatcttgacctgactgtctccttcgtgtggaatgacctcgtggattacctgataggtcttggcttttccagacataatcataatcggaagattccacgtatgcagactttcaaaataaattgcgtcaaaatgttccttgcggatacgatgaataatcgaaaccaacagtgggagattgaatgttttctttgttacaccaggcctttccgggcagtcaaccagccatgtatgatctgatttctggagttccaccttcggagtcttgatgcaaagcaagtaagcatcccagtcacttcgatttctcatttcttcgtacattccaaacaacgtatcctgatgatccgcattgtctgagaatgtcactagaagtacttttttcatctcgaattcctctcccactaaaacagcccagactcatctcaaagagtctgagccacattttctcagctacacgctgagttattttttgctcgaatcaaatttgtcaaaaattcaaagctagagaacatcgcctttcgcaacgagtcaattgcaactcctgtcacaaaaataatagcggtaactgcaacaacccataaaacggcgtatggtttttcaatcactttctgaagtgaaaacaacttttcaaagagatacgtcatattagccggatacatatggaacaggtacactccaaaagttgcttccgccaaatagtcaagtaccttgttggtccttaccttccatgaagttccccacataaagagtccaatcgataccatcatagaaacaggacgataatttccacgcatgaaatagcaactatactctgcggcaaatgatatcttttcccctactaaatcaagtacaataatgcttataacggcaacactgtatggaatcagtatcaatgccttgaatcctgatttataattttcatacgttattcccattcttttaatcattatcacaattgagtacagcattaaaaacgcaagtaaattattagcgccccaattaacaaacggaacaattgttgaaacactccaaatcacaagcatgactgacgtaaactgctttaggacatccacagagaaccccataagtgctttgtgatagaaaggccagatcaaaagaaaaatcatgtacgttgtcgggtaccaccacattcctgtcagtgttggaaatacagattggagcagtaatattttgctctgccccccccccgaaaataaatgcgccaatacacattgagagtccgtaaaataaaaccgttttttcaattttccagcacgaccttgccgaatagttgagatctaccttttcgtctggttttttgctcagaaaccacgccgaaaccaaaaagaacaggttattgccaataaaagcgttgttccctagtatctgcaatgcaagtttattacctgttattcctataacctgcgtgtcaatgttaaatgcattctttgccacaaggtgatgtgaaacaatcatgagcatcgcagctatttttagaatctgaaagtttgcttctttgtttttcacaatatcacctcatatttgtactttagccgtttattccttataaagctctactaatcgtcctcggcagtgtaatccacacactgccgccatgtcttataccgccgcaataaacgttgctacggcaaattcacgcaacggtaaccgctgtctttagtcctgatagcaccaacactcgttacagtagctcctgcctttattccaggttccactcatccacgctacggtagctcccttgcttatgccggattacaccgcacgaatgagcatctccgtgagcatgagatactcacagccgccttgttatctccaagaccgggatgaaatcgcagatgatgttatcatcgcaatctcaccgggcaccccgaaaccgctatgtggaagtcaccgcagtgtcggtaataccatcacggtgcaatcaggcataagttcacgagctaccgtcgcatccataaaagtgctttttcggggcgtaaaaacctcgaaatgacctcgttttgccctctctcacgcccatgctctcggcattttgcactgttagaagtcgcatttcagctttacaccgagcattttgccgactttccggcttaacgctactgtaagaggtgtatttatgcccgattccactctggaatttcttccaatttttagcagtttaaaatgtgcaaaattatcgatatttagtggttttctccactcatagcagtggtttgaccctcagaaacgccctcggtactttccggcataaacaggatcttcacggtcgccagcataattttcagatcctcgatcaggctgggatgcgcaatatacatcagatccatctgcagcttatcgtagggggtggtgttgtacttgccgtacacctgcgcataaccggtcagaccggcctttgcctgcaggcgcagcgcaaactccggcatctcttcgcagtactgtgcggcgatctccgggcgctccgggcgaggacctacaacagacaggtcacccttcaggatgttcagcaactgcggcagctcgtccagacggcaggcacggataatgtgaccgacctttgtaatgcggtcatccttgtcgccggtggaaagacgtgccacgccgtccttttctgcatccacgcgcatggagcggaacttcaagatctcgaactgcttaccatctttagtcaggcgcacctgtttatagaaagcggggccaccatcggatttgaccgcaatggctgtgatcaggaacaacgggctcaagatgatcagtgccagcagtgagatcacaatgtccatcgcgcgcttgatgaacaagaactccgggcttgccatgtagcgaccgacgcgcagcatcggcagatggaacatatgcatcggccatgcgccgctcatgataacgtcaccaacacggggaatgacgaacatattgatgcccttccctacgcagtgtttcagaataatgtttcgctcatggctgtgaacaccactgacaaaaacagtctccataccgtccagaatgctcaggtctgccaagcactccgacacgctcagggtaacctgcacatcgtatttctggctcagaccgtactcgttgatgagcttttccataccatgacgtacatcgtagacaactgctgtcttctgcggcgggaaggtcttgtagtaccatttatgtgcacaagatgcccagatcgcggccatcaccagctgccccacaattgccgcaatacccggcaacaggttgcagagctttgcggacatcaggcagatcacgatgtacaaaataccatcggttgccatagcgccaaggatctggccgtacaccagttctgagacccgctgcatcgacatccagaacgcatcgtagattttaccgagtacaatgtacaggataaaaaacaggcctaaaatcgcaaaatgacccttccattccagatttgcataggtctggtgcgagtagtacaggaaccagcaggccgcaaacggcagctcgatcatcagaacattcaagatctttacaatccgcaacattacatcatgctgaaactttgacataatcctctccaataactcctttagattttctttttacgactcacgtaacttctccgacccaaattgcagcaagtgctttggatcgcgctatcaactacacaaaccgatatcttcccccgttttgtggttagctgaaacattcagtttttcgctttccctatgaggtccttgtgccaactccaaccggcgcggtctcgaatccgctttctcccaccgcatcccgatctcatcaagctttgcaatacgctcctctgtcagcacagcgcagcttttttcaggattctggcgggtataccgctgccgcttgacccaatttccaaggttgtaaccgcccggtgacacataatcagccgggacgttcaggtcgccgtgggcatcaaagtagcgttttgcctcctgatacccttcgttccactggcggtcattgcggttgccccagtacatcccgatacggttgagacgctcgacttgttcgtccgtcaattttcctttcgggtacgcccattgctggcttgcgacccattgtcccagccgttcaccagccgctgtcacataggaacgtgggatattcaggttgccgttttcctcatagtaggcggcagccagcgcataagccttttcccacttggcatcgaaaatgttccacaccatgccgatctcatcaagctgtgcgatgcgttcttccttcaaacggccattgagcttctgttgccgggtcttgatgatccactgtcccaaagggtagccgtccgggtcggtgtatttgccgggcaccatcaggtttccgtaggtgtcgtggtatttcttggcgacctcaaatccatgctgccacgcgatttctttccggttgccccagaccatcccgatgctgtccagccgcgcgatctgctgctcggtcagattgccttggatctgtccctcgcgcacccggcgctgggtgaccagccacaccccaaggctcagaccgccgggcgtggtatacagtttcggaacgttcagattgccgtgctccgcatagtagatgcttgcctcggagaagtagtgctcccaaccggaagaaaggcttgcttgcagctgctcgaacaatacccggcagtcgtgcacctgttcgataacctcaaaccgctcggtgacgatcttgtcgccctcgccgttggcatacagacgatggactgcttcctgcatctcgctttgcagaccggaaatgctggtcaagccctcaaagttgttgaccacatccaagatcagcggggctgcggtgtccccagcggtcagggcgcgaccgatctgctgcttgtagatgatgggtgagatggtaggtcggaacaggatgacaccggaaatcccctccacatggacgccctcgttgagcatatcgatgcagaacagcagcttcagccggtcactggtgtccgttttgaagtctgcaaaagccttgtcagtgttcggatcatccgagtaggcttcgtacaccacaacgtccgggttgaccccggcgaaccactccggcacatgggacaccatctcgtccatgtgctccttgttggcgcagaacacaatgtacttgccagccttattcgtgatatgatgggcaaagaccctgtccagaccgtccgcctgctccagtgcccggcgcagcgcgtccagatatttctgattcacatcctgaatgcccggtgtccgcaggttgtccacccgcgcctgatactttgcgagggctttctggtactgataaaccgtggtcacatacttcggggcaggcaaaatgcccctgacgactgcttcaccaagggtcatgttgctcgcaacacggctatcgaaaagttcttcggccatatcgcggttattatccagatatcggatgtttgttgccgtcagccccagaagctttgcatccgggcataactttaataaagccactgtgctttcgccccaacattcagcaccggcacggtggaattcatcgagtataatataggcaggcttctgcgctgctatttcgtccagctgtgcctgtgtacagcacattagtttggcataggtataaaagtgaacgtttgccaacggaaaatccgggtcgttccttttcaggctctccagctgggtcttaaagatatattcactgggagacagccaaagcaccgttgtctccgggttgtcctcgatcagcttgaacgcaatatagctctttccggtgccggtgggatgaacaatggcagctttgccatactggttcatcatccggactgccgcatgatatgccttctcgttgtgctcaaacagacgcaatgccaccttgttcacccctttccgcaataaaggggtatcctccacagtgataatggaggataccgatttttcgacatcgttgtttgaattcttctcttattttatcatggttatatctgggaatcaatagaaatccttacaaatgcatcccacctgaccttagaaaaaacctcgcagaatctgaaagttttttgcacattgcccagttctgcatgaaaaatccagcaaaaaacgaaggtggacagaataagtggtcagaagggtgtccaagacgcaggaggaaacagaaatggcacgacggggagaaaacattcacaaacgcaaggatggccggtgggaaggccgctacatcaaagcgcgtacaccggaggggaaaatccagtggggctacgtctatggcacggtctacgcagaggtcaaacgtgtgctggtccaaaagaaagctgaggcggggttctacaatctgaaaagaaccgacctgacctttgacgcattggctgaggtatggctgcgttcccagcggaatgccgtaaaagaatccacctatgcgcattactcgtacacgctgcacaaatatcttcttccggttttgagtaaagtgccagtcgcatcccttgaggaaagctttctggaacaggctatgcagcagatcattgcgccgatagatgccgcacacaagccgctagggaactcctctgcgcgggaatgcctctccatgctgcggcgtatctgcaaatatgccgcgcacttgcgcctgatccgtccgatggagctagaagtagcgctgccaaaagccatcgacaaaatttctgtacccctctccccggcggagcagcagcggctttatcagtatgtacaggagaacccaacgccccgcaaaattggcttattattaggggtggaattggggctgcgtattggcgagatctgcggcttacagtggggcgatttcgacctgaaactcggaacgctgaaaatcaaccggacggtctgccgaatttcctgtgaaaatgggcatacaaaggtggtcatccaaacgcctaaaacccgcacctcccgccgggaaattccaatcccaaagcagctgcttattatgctgaaaaagctgcgcggatgtgtcagcaatgctgcatggtttctgtccggcaacgagtccaagcccaccgaaccccgttgctaccgaaaaagcatcaaatcatatctgaaacaggcaactgtccggcaagtacgtccgcacgcgctgcgccatacctttgcaacgacctgtctgcaggcggggtgcgatgtaaagaccctcagcgaattgttaggacacgctaacgccaacatcaccttgcagcgctatgtgcactctgacctgacccgaaagcgccgggagatgaaccgaattttctcccatcaggtgtccatgaggggcagggatgttctaaatatgacgtaatagtgcacgatttctgcgtcgttcctccattatcactatggaggatacttttttattaaatatattctttgccattatgcggctgcacattctctgtatcataaaatacttttgcatcatacgcagatgcgtatgcacagctgcacggatttctgtaacatcatagtgaggtgaacttcatcacgactgtaaacaatgccgttgccaaacgctttgaacagctctacgaccagcagggatattccccaactagttagcgacccacgccggtgcatattccaaaatcgatttattgtttatatatttttattctacaaactgcacctcttgcgaacacaaaaaacgcgtgttatactgaaaccatcaaaaaacattggaggtgtcccctatgccccgtcccaaaggaagcaagaacaaaaccaagaccgtaaaagcaaccgttgactttgctgcgcagattgccgaaaaacagtctgcaaaggaagccgctgccgccgaaatcgcatccatcaccgctaacatcgatgcgctgaaagccgacctgaaaactaagaaggcagagctgaaatctatcgacaaggaaatcgccagaatcgaggctaaaaaggttaaagctgaaaccaaagcagcggaatccgcaaagaaagccgaagcagaggacgtgctgaaaaagctgctggcaagcggcgtgagcgcagacgatatcctcgcaaagctgaagtgatttaaaaattctgacgcagtcgttgatggaaacatctacgtcgcaagcagtgcaacctggtaccaacttgcgatttttgaatcggatttttcaaaatccaaattcaaaatgcttgttgggctgtgcccaaaccccttgtgttctgcatccggtggatgcaggctgcgcattttttgcaaaacgcttttttgatctgagtgccgatgcctgtggtatcggcactttttgcacagatagattcccggaagcaaaaaatagtgctatgcagcacatccggaattgtgctatacttgattacataaacctgttcgtcctaaaaagttggaggtgctcatggctacacgaaccatttgtttttccatatccggctacccctattgcaaagaacagccggtgacattcacatggataaaaggtagcaagcggcagaatatccgtgccgtccatgatgccgtccatacaacagacccggatgtttcagttctggaagtcagctctgcatccgttcagccggagggtgaggctgtttcttctctgcggcttctgctgcgtctggattctgttgcgcaggatgtgcccatcagcacggtttttgaagccgccaaggtatttgaacatggtgggccattcgctgaccttctgacctgtgtgccatccaaagtccataaggacactcgactgcgaaccaatggaaagttgctgcgctactctctggaaggaaatgagtatccggcagagccgtaccccgattcattttttgagtggctctactgccgtgcgttgaagcagttcccggaaaaggctgcgcagttgagcagatataatgccttttctgatattgctgccgcggcggattctaaaaagtattatggcgattcctcgcgggcggctgcaatctatgtaggacttgcagcggcaggaaaacttccgtgcatcgattcctatgaatcattcattgcggaagtttacacggagccaaagcccttgcccaagtctggaaaatccgagattgcttcaaaaaaggcacccgaggtttctgcaccagcaaaggagattccggcagacgaatcgtcgcagtccgataatgcaaatattccggacgctgcgcagatgaaacagatccttgagctgcccaaagcgacctgtctgctcctctctttggcaaaaaatgctggtctttctgcaaataattccagtgagctggcgtataagggaaaggaattttttcttgacgcttatcagaaagcactaaaaaacaaaacgctccaaatcaatattcataagaacaagttcacatttccgatggaagatcatgacagcggatttcatgcggtcggagtactgacccgttcgcccgcttgggaatacggatggaagttcaactatctggccgagaatacacccggagcagaaaagcccgaagtcaaagcaaaaatccagaagcctttgaccgcattggagcatctggaacgctgtgggtataaaatcgttcagcaggtcgtgccggaaaaactcccaccgattgctgttcagcggatggcatggaaaacaggcgaggctctttgcgacccggtggtggtggatttcttgcagtttatccgaacacatatgcagagcgacggttctttttcgttccgtatcccaaagggtgcgtccaaaaaatcgtttgccacactttcagagattgctcagacgtgggacaaaatggggctttttgcggccattgtgatttacccgcagaatatcgtctatgaacttgcgcaaaatgaaaccgtccggcattttttgagcggaaagtggctggagctttttgtagagcatcaggttcagcagatcctgaaccactatcgggaggagcagggcgcagaagtttcggtttgctccaatgtggttctttcagaaacggcatccgtagggagcacgcacgagttggatgtcgtattctccatcaatggaaaatttttctgggtagaagccaaatcatccagccgaagcattgattatggaaaatatgcttctctgtgcgaaaagctgaacgtgacaccagaaagcttgcttttggtcaacagcgatttgtccgtggaagaatgcgaaggtgtttcttatttctggaattaccgtgttgcaaattgtgcaacgatcacgcaggaactggaaagcatgattgctaagcaaatcgaaagcaccggaaatgctgttctgagtacagactgaacaataagcaaaaaaggccctgagaaccctgccggagaagcggcaaagttctcagggtcgtattgtttacctggaaggttcggtttgctctggcttcttttcctcatcgaagaaaagctcaatatttttctgcgctcgaagaagctcctgcat

SEQ ID NO: 691 - DNA, 17623 bp, unidentified
  source 1..17623: mol_type = unassigned DNA
  misc_difference 13322: note = a, c, g, or t
  misc_difference 13323: note = a, c, g, or t
  misc_difference 13324: note = a, c, g, or t
  misc_difference 13325: note = a, c, g, or t
  misc_difference 13326: note = a, c, g, or t
  misc_difference 13327: note = a, c, g, or t
  misc_difference 13328: note = a, c, g, or t
  misc_difference 13329: note = a, c, g, or t
  misc_difference 13330: note = a, c, g, or t
  misc_difference 13331: note = a, c, g, or t
taggtcattcaatcggatatggaaagaaagagacagtgcacagccgagacttttagaagcgatactgtataaagataacatcaatcttcttcgaaatgaaagctgctccttctggtgctaacttcgtattctgtgcagtcaaaaggcataaggggacagattgtaccgatccatgattcgcaattatcaaccatattttattttcaactaaaagatgggcagaaaatcatcctatattatttacagagttatggagcgtttgtaagtaatgatgaggattattatgtaccattatcagacgaggatatgaggaagatagagagaattataagaaataacagttgacaaatagaaccatctgtcatatactttgcctatcaaatagtttgataatcaaattatttgataggcaaataatttttaaagggtaaataaaaggagaatattatgttagagaacttaaaaacaatcattgcagagcagttaaacgtaaatgcagacgagatcaaggaagaaagcaatttcaaagatgaccttggagcagattctttggatttatttgagcttgtgatgagcttagaagaagaatacggaatcgagattccatctgatgacttagaaaagatcgcaactgtaaatgatgttatcgaatatttaaaagcaaaaggtgtggaagcatagaaatgaaaaccgagattacagaattactggggatcgaatatccgatcattcagggaggcatggcatgggttgcagaatatcatcttgcttctgcagtatcagaagcaggtggtcttggtatcatcggggcagcgagtgcaccaccggaagtcgtgcgggaacagatccgtaaagtcaaagaacggacagagaaaccatttggtgtcaatgtcatgctgatgaatccgaatgcaccggaagttgcacaggtgatcgtggaagaaggcgtaaaagtcgttaccacaggtgcaggaaatccggcaaaatttatgccgatgtggaaagaggcaggcatcaaagtgattccggtcgttgcaagtgtcgcaatggcgaggatgatggaaaaagccgatgcagacgcagtcgtagcagaaggaacagaatccggcggacatatcggttctgcgacaacgatgacattagtaccgcaggttgtcgatgcagtaaagattccggtcattgcagccggcggcatcggagacggcagagggcttgcagcagccatgatgcttggtgcaaaagccgttcagatgggtacacgtttcgtcgtggcaaaagaatccatcgtacatgaaaattataaagaacggatcatcaaggctaaagatattgattcggaagtgaccggacgaagtaccggacatccgatccgcgtactccgcaaccatatgacaagagaatatctgaaaatggaagcagaaggcgtcagcttagaagaattagaagtgctgacattaggttctcttagaaaagctgtcatggatggtgatgtagttaatggaagtctgatggcaggacagatcgcaggaatgataaaaaaagaacagacctgtaaagaaatgatcgaggagatcatgcaggaagcagaagggcttttatataataaggagaaatagaaaaatgggtaaactggtattcatgtttccgggacagggttcccagtacataggaatgggaaaagagttttacgataccatgcaggtgtgcaggaatgtatttgaccttgcaagtgaagcttctggtcttgatgtggcaaaactttgttttgaagaaaatgatcagatcaatattacagaatatacacagatcgccatgctgactacagaagcggcgatttatgcagccataaaagaaaagggcatcacacccgatgttacggcaggactgagtttaggcgaatacggtgcactgatcgcatcaggagttatgagcatgaaagatgcatttacagtgatcaggaaacgtggaatttacatgcagaatgccgttcccaccggtggtgcaatgagtgccgtcttaggccttggggcagacatcattgaaaagatctgtgaagataccgaagggatcgtatcgatcgctaattacaattgtccgggacagatcgttatcacaggagaaaaaaaagcagtcgataaagcaggagagaccttaaaggaggcaggggcaaaacgtattgtaccgcttaaagtaagcggaccgtttcattcgaagatgctcattcatgccggggaacagttaggagcagttctaaaagacgttgcgatcgctgataaatttatcccatatgtggcaaatgtaaccgcagattatgtgacagatgcaaaagaagtaaagctgctattagaacggcaggtagcatcaagcgtccgctggcagcagacgatcgagcggctgatttccgatggtgcagatacgtttgtagagatcggaccgggcaggacattgtcaggatttatgagaaagatcaatcggaatgtaacggtatataacatcgataagatggaggattttttgaaatatgttgacaggtaagattgctttagtgactggagcaggcagagggatcggagcagagatcgcaagaacttttgccagagaaggagctgcagtcatcatcaattataatggatcaaaagagagagccgaaaaagtggcagcagagatcatcgcagcaggtggaaaagcagaaacttatcagtgcaatgtcgcagatgatgcagcctgtaaggaaatgatcgatacctgcattaaatcatatggcaggatcgatattcttgtgaataatgcagggatcacacgggatgacctgttgatgagaatgtcagaagaagattttgatatagtcatggatacgaatttaaaaggaacatttcatacaatacgccatatgtcccgttatttcctgaaacagaaaagcggaaagatcatcaatatgtcatcggtatccggtattttaggcaatgcaggtcaggcaaattattctgcaagcaaagcaggtgtgatcggactgacaaagagtgtggcgagagaattagcatcgagaaggatcaatgtcaatgccattgcaccgggatttattgcaaccgatatgacagatgcaatgacagaagaagccaaagagaaaatagcagaatctattccgttcaaacggatcggacagccggaggaaattgcggaaatggcactgtttttagcatctgataagtcagattatattacaggacaggtatttgcagtagatggtggtatgaccatctaaaggaaagagagcgaggatattatgagcagacgagttgttgtaaccggtttaggtgccatcacaccgatcggacttagtgtagaggaattttggcagtccgtcaaagaaggaaagatcggatttgcaccgatcacaaaatttgatacatcagaatataaatgtcacattgcagcagaagtaaaaggttttgaaggaaaaaattatatggattttaaagccgcaaaacgaatggaactgttttcacagtatgcagtagcagcggcaaaagaggcgattagtgatgcaaaacttgatatggaaaaagaagatccataccgcataggctgtgccataggttccgggatcggaagtctgcaggcaatggaacgtgaacatataaaactgttagaaaaaggtccgggacgggtgaatccgctgttagtaccgcttatgatcactaatatggcggcaggaaatgtttctatccagtttggcttaaaaggtaagagtttaaatgtcgtaacagcctgcgcaacaggtacaaacagtatcggagaggctttccgttcaatccaatacggagaagcagatgttatggcagcaggtggaacagagggaagtgtgacaccgatcggaattgccggatttagtgcactgaccgcattgtcaaccgtggatgatccgacaaaatgctctcttccattcgacaaaaaccgcagtggatttgttatgggagaaggtgcagcagtagtcatcttagaagaattagaacatgcaaaaaaacgtggtgcaaagatctatgcagaagtgacaggttatggctgtacttcagatgcttaccatatcacatctccggcagagaatggagaaggtgcagcaaaagccatgttatcagcagtagcagatgccggcttaaaaccggaagacattacctatatcaatgcacatggaaccggtacacatcataatgacctttttgaaacgcgtgcgatcaaacttgcctttggggaacatgccaaagatatcaagatcaactctacaaaatccatggtcggacatctgctcggagcagcaggagcgattgaatttgtgacctgtgtcaaagaattagaagaaggttatatccaccagaccgtcggatatacgaccccggatgaggagattgaccttgattactgtaaagaagcagtcacggaaacgttctcttatgcactcagcaactcattgggatttggcggacacaatgccagtattttattagcaaaatatgagggatagaacatgtcattattaaatacaaaacagatcatggagatcataccgcacagacagccgtttctgctgttagatacgattgaagaattggaaccgggtgtaagagccgttgggaaaaaatgcgtcagctataatgaaccttattttgccggacattttccaaaagaaccggtcatgccgggagtcctgatcattgaagcaatggcacaggcaggggcagtagccattctttcagagccggaaaataaaggaaaaacagcatattttgcaggcatcagccaggcaagatttaagcagaaagtaataccgggtgatgtgttgaccttagaacttgagatcatcaagcagaaaggaccggtcggagtcggacgggggactgcaaaagttgatggaaaacttgcagcatccgcagaacttacatttgcaataggagatggaaaatagcaatgatacctttatttaagaaaaagacaacagaagaaaaagcagatgtcattatctgtccgtcctgtaagaaagaactggtaaaatcagaagttgtggcaaataaatatgtctgctatgaatgtggtaattatttcagggtccgtacttcaaaccgtctgaaaatggtagcagatcctaaaagttttacaccgtggtttgaagagatggaatttcagaatcccttagattttccggaatatgaggaaaagatcctagcggcacaggaaaagacaaaactgcatgaggcggttacgatcggagaagcaaagatctatggagaatctgtcgtactcggtatctgtgatgcaagatttatgatgagcagcatgggacatatcgtaggagagaagatcgcagcatccgtagagcgtgcaacggagaaaaaacttccggtcatcttattctgctgttccggtggagcaagaatgcaggaagggatcatttctttgatgcagatggaaaagacatctgccgccctgaaacgccactccaatgcaggtttattatatattccgattttgacagatccaacaaccggaggagtcactgccagttttgccatgttaggagatatcatacttgcagaaccaaaagcactgatcggttttgccggtccaagagtgatcgagcagacgatcggagagaagctgccggaaggattccagcgggcagaatttcagttagagcatggatttgtagatgcgatcgtggaaagaaaagatttaaaaaagacattgtatcagatcttaaaactgcatcatgtcaaagacggctatgcgaattttacagaaaaatgcgaagataaatttataccgagtgaactgatgcgggagcgtgccgcaaagagcaagagcatgagtgcatgggaaaaagtaaaggcagccagaggtgtggaacgccttgcttcggtagattatatgggagaaatatttgaagattttatggaacttcatggcgaccggtatttcagggatgatccggcagttgtcggtgggatcgcaacaatcaatggtcagccggtgactgtgatcggtattcataaaggaaaagatatcaaagactgtatgcggcataattatggaatgccatcaccggaaggttaccggaaagcactccgtctgatgaagcaggcagaaaaattccacagaccggtgatcacctttgtcaatacttccggtgctttctgcggtatggaggcagaagaaggaggacagggcgaagcgatcgcaagaaacctgtatgaaatgtcagacttaaaagttccgatcctttctctgatgatcggagaaggcggcagcggtggagcacttggacttgccgttggaaatgaggtctggatgatggaaaatgctacctattcgatcctttcaccggaaggctttgcttctattttgtggaaagatggaaaacgggcaaaagaagccgctgaggtaatgaagatcacagcagaagatctatatcagttacaggtagtagaaaagatcataccggaatttggcggggcagatcaggacgcactgcatgatatttcaatgtttatgaaatatcatatctgcggtttcttgaaaaaatgcagtaacatgacaggggaagaattagccgaagaacgttacagacgattccgcagattttaaatgatttgaaggagtaggaagatgagaagtcgaatatgtggtacaggaagtgcactgccggaaaaaatagtaacgaatgatgatctaagccagatcatggatacttctgacgaatggatcagaagccgtaccggaattgaacgcagacatcttgctgtagaagaaacacttacttcgctggcagtacaggcggcagaaaatgctttaaaagaagcagggatgcaggcagatgctttagatatgatcatagcggcaacactttccgcagataagatctgtccgtccttatcctgtgaactgcaaagagaattaggggcagtcaatgcagttgcttttgatatcaatgcagcctgctcaggttttatgtttgccttgcagacagcagatgcatatatccgctgtggacagtataaaaatatactgatcgtaggtggcgagatcttgtcaaagctgatggactggaatgaccgttccacctgcgtcctgtttggtgacggtgcaggagcagcagtcgtgacagcagatgaaacctatggtatactagggagtgtgcagggctctgatggggcaaaaggtgaagcactctgctgtgaaaaccgtaaaaataacaatccgtatgtaagtaataaaagtgtgccttcgtatgtatccatgaacggacaggaagtttacaaatttgcagtacggacagttccaaaagcaatcgaagaagccattaaaaaagcagggcttacggtagaagatatcgatctgtttgtgatccatcaggcaaatatccgtatcattgaatcagtatcaaaacgtttaaaagttccgatggagaaattccctacaaacttagaaaattgtggaaatatttctgcaggaagtgtgccggttctgttggatcaggtgaaccggagtggtaagatcaggcagggagataagatcgtacttgccggatttggtgcaggactgacgtggggtgcatcggtattgacatggtagaataagaacgttacggataaatcagatatgcatatatacggaggataagatggaaacagagaaaagaccaggcacttacgatgcgatcaatgaattgttagtgaagcttttcaaaaatattatggaaattgaagaacgatgtctgatcacacctgaatttaaagatatcagtgtgaatgatatgcatatcatagaagcagtcggaaaagaagaaccaaagagcatgtctacagttgcaaagctgttgtccattacgacaggaaccttgacaaaactgatggatgcattatccgaaaaaggttatgtagacagggagcgtggaaaaaaagataaacgcatcgtatttgtgtcactgaccgaaaaaggacgcagagcttatgcaagacatgagaattttcacaggacaatgatcgaacatatgaaagatggattgagtgaaaatgaaacaactgtgcttgtgtatgcgttggcgaagttaaatgattattttaaccggatctacaaagcataattttttatcacataaaaaaggggctgtcgcactaacgcgtgaaaaaaagccttctgcctgaatgtttctgaaccttgcaaatgttgtatggtcaagagcaggcttaccttccaaaagaaacataaagttaatgtttttggtcatacattaattttacactaactgccggattctttcgaggactggcagttattttttgtatgaaaaaggagctgcacactaattgcttagtgcgacagccccgcatatgctcatttagttcaatggatagaatgaccggctacggtttaaatcgttcagtggacgattgctctgaaccgaccgagcgaagtggtgtgtggaagtataccgcactgaaggttcaaatccttccgcaaatgttaatgatgtgcaggctgttgatcaagcctgcacatttataatatccggcagcagaatctagtcatctatgtagtagccacaggtgaccttgcggctgttattgccatagaactctatgatttccggaaggttgtcattgacagcatcaaattcaatatccaaacctttgcatctccataaaaataagtcaaataaataatcctatgggatgataacgtatctctttcttttttgaaataaaattgtaaatattgtttgctgcgattgtaattatgttgaggtttaggataataaaatacatcatattgcgacattaaacataaaaatacaagatgtgctacaaataaacttgacaaagttgtaactgataaatataattaaaagaggctaataagaaaggatggttgatgatatgtcagttttcagtgaaaggcttactgcgttgatgaaacaaaatgaaattaaccaaaaagagttggcacaaatggcgggagtgactgaatcagcaatgtcttactatgtaaaaggagaaaggacaccacgcagtgatgtattgactagaatagctaaagctttagaaactactacagattacttgcttggaacatcggatactgtttttgatagttcgcagggaagtttgcaatatctccaaaggaatcttggtaagttggattcagatcaactgaaaaaagctgagaatatattaaaagcagcatttgatgatatttttgatgatgatgaagacgaggagtgatgagcgtgtcgaattataaaaaacccaatttttcaagagcatattcaaaggcaaatgaaatattagttaaatcatcggcaattcaaacttttccgttttcgccgaaagatttggtaaaggagcagacgcctattatatgtcgttcttataagaaagcaaaaaaatatggagtagatataacagctttcggaagtgaatcggcaattataatgacttatcatggaaagaaaattatattctatgatgaaaccaagtcggaaacacataatcgcttttcgatacttcatgagttgggacacgagataaacggtcatgatttttctaagaaggatgaagaaacatatcatatgtatgaagtcgaaacaaattactttgcagcacagttgctcatgccggaacagatacttagagaatgccagaacagaggagcaaggataaatagatttttcttgcaaaacaattttggcgtttcagctcaggcggcagataaaaggatagaaacattggcaaaaacaagtggagagtggcgctcgagagccgaaaaggaatttgacgacatagtcctaataaaatatgccaattttctaaatagaatttgtcctattcgtaacacatacaattttgaagatgaatacattcgtcaacaagaacgtaatagctggttttgattaggaacaagaataacaagaaaggtgggtgatatattgattgtgttttatccaaaaagtaaaatgcactctgtaaattgcggcaacaatatacaaagtacacttatgttggatgcgagcatcctcttattgagttataagatattatgccacatccagaccaaaaattcaagtttttttactttttgttcaagaaaacttgaaaaaattacaagaatttatgatgggagggcgtagtatgtctgaaatgaacagcacccgaaatgggtgcagagatgtttttcacgcatttttagtaaaaaatgcgacatatgatagtaacttagaaattccttgtttagcgagagaagtccaaaaaccattgaaactgattgcattttcaaaagcaataggatgcaaagagtttgatgcttggatacatttttatgaagatgatgttgcttttgagagaatctggaatactccgaataagtatttaccgattataaagaaatttaagggtgtgattacaccagatttcagtgtatatcgggatatgccgcttgtgatgcaacaatggaatatttatcgtagtcgtgcaatcggtcattggttacaggaaaacggagtatcggttattcccaatattagattcggggatgaacgaacatacgagttgtcatgtgcgggtattcaaaaatacggaacaatcgcagttggctcacatggttgtataaaactgttatctgaccgtaattattttgttagcggattagaatatgtggttgacagattagaaccgaatatacttgtcgtttatggggcggcaccggtcaagatatttgcaccatataaagaaaagggcatcgaggtactgcaatttgacagtgattttatgaaaagccgaaaggcggtgggcgcctaatgggagcaggatatcatggtggatttggaaataccaagggttcaaagaagcaggataaaagagaaagtaattcacaatctttgccaaaaaatgatgctcagattaaacatattttttctgggaaagaaggacatttggaggatacgccatctaatagaaagttacttactgatctggcaaataataaagaaaaatttattggtactgataaatacggaaattcatggaatgctgaaataaatagtgatggaaagcaaaattgggttaggtatcagaacggtacaataaatgaaggtggtcagaatcacgtccctcgtcaatgggacaatgaaacagggtataacaataatccttttaaacggaggaaaaagaaatgaataaatttgaattatattgtatgatttactatgtgcttgatgctgaatgggatgagaataaagatgaagaacttggtaagtttttgagtagtgcaaatccatttcaatttaaggatataggttctgctgatcctttaatatacgaggaattctgtggaaaagtacctgacataattacactagacgacagttatgagtgtgcaagaaattatgtcaatgctttagggaatgaagaagttcaaactgcctttcttacagtaaacaaagaagaatgggacgagtgtttgaaagaatatctttcacaagagcataaaggagataaatctaacgattaaaagatttgtaatcattaggtagaaacagaggggctgtcgcactaagtaattagtgcgtagctcctttttcatgcgttagtgcgacacccctccctttgatcttacaagagtgactgaatcgtgatctccggtgtacgggaaagatcaagacagcttccgtcaccaagctggacgatcggtctggataaagactgtttatttagcataatgatatttgcacctctgccatctgagagcagtacacggttctgctggtaggtagatgcgatatgctctaagaaagtcaggataaattttggattgtattttgcaagaccatctttttcaaaagcagcaataacctgaaacgggcagagcggtgcacggtaagatctcgctgcggtcattgcatcatagacatctgcgatcgcaatgatctgtgcaaagtcgtcaatctcggttcccttcaaattctgtggataaccgcttccatcgcagcgttcatggtgcataagtgcggcattcttaacacggttgtctaactggggatactgaagtaaaatctcatatcctaaggtaggatgtttccgtacaagtgcaaattcttcatcggtatattttcccggtttatttaaaatctcaggtgggatcttagcttttccgatatcatgtagtaatgctgcaaggatcagtagatcaaaatcttcttttgacattttaagccacttgcctaacatacctgtgatcaaagctacatttaacgaatgtgcatagatactgtcatcaacagaacgcatattgtgcaacatatcgaacatttcaatagagttgcgggtttcttttagtagggacattgctgtttcaaacaatgggtttatagcatctaagccgtttccggaaataatagaggaaagagatgttttaatatctccggtggaacgggaataatcgaattgaaaagtctggaaaagtgaagaactctttacccgttgggaataagtaggttcctggacatttcccttagggatcgttttttgtgcttccggtgccggtgcttcaactgcatctccttcgatcgaaacactggggattccgtaaaagctgatacgtgcgatcagctgatctgttaatgaaacaccgtcattgataattaactgaccatgttttgtttttaccggtaaggcagttaccataccctcttctaattgtgttgtttttataatctgcatgtgaaaagctcccccttaatcagccaaatttctaaataataccttacaatgatatgagagtcaacaagtcagaactcttatcctgcaagcaggaacgatttctgaccttttgccaccttgtatcatagaaaattataaaacgaatctgtaaatttcgcaatggttattgttgatttattgctaaattataatggaaaatacttgacaacatataaaaaagagcgtacccttaatacgcagtatagaaattaaacgatacaattcaatcatatagctttctcttattcagagtgatggagatacataggatctgtgaagtcacggcaacccctgtgaggaaggtgccagcctgagcgagtaattcgaacaataagaggatttgatcttacgatcgcaaagaatcttgtccgcttatgtgtttcacatgaagcggatttttattgtgtaaaaaaatgatacatgataaaaatgctccgcaaggatgcgtaatatacattttctcttaagagagcagtgtttggataaaatcggatcaacaatgtgagaggagaacaacannnnnnnnnnatgcgatcttagatgcatgtatggaacaggacccgatgagccgtgtagcatgtgaaacagcagcctgtacaggttttgtcctgatcacaggagagatcacaacaaaagcggtacttgatattccggcaatcgcaagaaagacgatctgcgagatcggttatgacagttccgaaaaaggatttgacggaaatacctgtgcagtcatggtggcattagataagcagtcaccggatattgcaatgggtgtagacaaagcattagaggcaaaagaaaataagatgacagatgcacagatcgaagcgatcggtgcaggcgatcagggtatgatgtttggctatgccacaaatgaaacagaagaatatatgccatatccgatctctttagcgcataagttggcaaaacagcttacagcagtcagaaaagacggaacactgccatatttaagagcagatggaaaatcacaggtatctgtagaatatgatgaaaatggcaaaccaagccgcctagaggcagttgtcatttctacacagcatgatgaaaaggtaacccaggaacagatccatgaagatattaagaaatatgttttagatccgatccttccggcagatatgattgatgaacataccaaaatgtttatcaatccgaccggccgtttcgtgatcggtggaccacagggagatgcaggactgacaggacgtaagatcatcgtagatacttatggtggatatgcacgtcatggcggtggagctttctccggtaaagactgcacaaaagtagaccgttcagccgcttatgcagcacgttatgtagcaaaaaatatcgttgcagcaggactggcagagcgttgtgagattcagcttgcatatgcaatcggagtagcacagccgacatctgttatggtagatacctttggaacaggcagaatcccgaaagaaaaattagatgagattgtacgtaaacactttgatcttcgtccggcaggaatcattaagatgttagatctgagaagaccgatctacagagggacggcggcatatggacattttggcaggacagatttagatctgccatgggaagcattagataaagcatcggaactgaaaaaatatttagcttaaagttttgcgtatttttatgaaatgtttagaatctatatgattttttcatgtggatttgatgattttcatgttataatgagtcataggagcttttgatgagtttctatgacttttatttttgaaaggaatttgacgatgaaattacggacaaggcttacgatttctttctgcatcattatctttgtaccgatcttatcagcatgtctggtaatgtttggtttccagaagagccatatgaagacgatcgagcagacatatgggatcgagagcaagaattataattatctgatgaattctgtgcagttgctaaatcgttatacgaaaaagaattatgaatatctgttaagtgaaacgtctaagaatccggatcattttttggatcggacttatttagagtcagtaaataaagaattagatgagaaatattcttacctgatcgtaagaaaagaagataaactcatctatgtaggaaaaaaaacagaaggactgacagccgatgatctgccggaatatgaggaaacagcaccaaatgcgatcgcaggaacatatgtggatggcgatgaacaggtgctgatcaaacagattgattttacatttacggatggggaacggggaagtgcatttatcattacatcttcccatgaacttctgccggagatccagagcctgatcgtagacggatttgtttctattatactgatcctgctctttacggcagcaatgctcattatctggatctatcaggggatcatccgtcctatcaaaaaattagaagtggcaaccttaaatatccagcagggtaatctcgattttactttagaaacagatggaaaagacgagatcagtgaattgtgtgccagttttgaggaaatgcggaaacgactgaaggaatccgcagaaaagcagatggcaagtgaacgggagaacaaagaactgatcagtaatatcgcacatgatctaaaaacaccgatcacagccgtcaaaggttattctgagggattgttagacggagtcgcagatacaccggagaaaagggagaagtatctgcggacgatcaacagcaaggcaaatgagatggatgcactgttaaatgaactgacattgtattctaagatcgatacgaaccgtattccgtataattttaataaattaaatgtagcagcatattttaatgactgtattgaggagatcggtatggatttagagaataagaatatcggtcttgcgtattttaattatgtagacaatgacgtcatgatcatagcagatccggaacagttaaagcgtgttgtcaataatattgttggaaattccattaaatatttagataaaaagcagggacttatcaatatccgtatcaaagatgtcggagatttcatacaggttgagatcgaagataacggacgggggatcgcagcgaaagacctgccatacatatttgaacgtttttaccgggcagatgcctcgagaaattcagcaaccggtggaagtggtatcggactttccatagtaaagaagatcatagaagaccatgggggcaagatctgggcaaccagtaaagagtctgtgggcactgtgatgtattttgtaattagaaagtatcaggaggttatacaggatgagtaaagtactgattatcgaagatgaagtggcgatcgccgatttagagaaagattatttagaactcagtggatttgaagtggaagtggaaaattcaggtgatgtcggtttagagcgggcattggcagaagaatttgatatgtatatcttagatctgatgctgccggggattgacggatttgagatctgcaagcgtattcgggaagtgaaaaacacaccgatccttatggtgtcagcgaaaaaagatgatattgataagatcaggggcttaggtcttggagcagatgattacattacaaagccgttttcccctagtgaacttgttgcaagagtaaaggcacaccttgcccgatatgaaagactgatcggcagcagccagcaggaaaatgatatcatagagatccgcggtatacgcatagataagactgcacgccgcgtctgggtgaataatgaggaaaaacagtttacaacaaaagaatttgaccttttgacttttttggcagagcatccaaaccatgtttttaccaaagaagaattattccgtgagatctgggatatggaatctgttggagatattgcaaccgttacggttcacattaagaagatcagggaaaagatcgagatcaacacagcaaagccacagtatattgaaaccatctggggcgtaggatacaggtttaaaatataatggaaaaagaatggaatatcatatatgaagatgcagaactgatcgtcacttacaaaccgtctgagcttgcagtccagacaagccgaatgggtcagaaagatcttgtaagcatgttgaaaaatgatcgtgtaaaaaagaaagaaccgccgtatgtggcagtcatcaaccggttagaccagccggtggaagggcttgtccttgttgctaaaacaaaagaggcagcagcagatttaagcaggcagctgcagggagggcagatcggcaaatattatcgggcagttgttttaaaccagacaggaaaggatttgacggcaggagagaaaggaacactgacggattatctgttaaaagacggaaagacaaatctctcaaaagtagtaaatgccgatacaaaaggagctaaaaaagccgttttggaatatgaagtgctaacggtgaaagagaatcgtgcagatctttttatacatcttcagactggacggcatcaccagatccgggtgcagatggcacatgcgaatcttccgcttgccggagatagaaagtatggaaaaacagatagtatggtatccggcatgacaggtattgcactttgttcagtgaaacttcagtttatgcatccgaagacaaagaaaaaaatggaattttccattgaaccggagaatcgaattttccaattattataagaaacattaacgcatagaaaaataaagaaccacacataatttttctatgaaaaaaataatgaattgggaaaagggaacgaaaattgcaaagttgttattgaccatagcggcagtttatcttggaatgcaatatctatttccaatggtactgccgtttttgtttgccattctgtttgtacggct

SEQ ID NO: 692 - DNA, 17380 bp, unidentified
  source 1..17380: mol_type = unassigned DNA
cggaaccgctgctcaatttcgccggtcgagctgattttgcagagcggtgtacgcatacattaggaatgcccttcagctcattctgaacatactcggtggtcaggatcttcttgacggtgccttccacgtccagacgggtggtgttgtggctggtgtaggactcatccgccatggtatgtacctcgccgttgaccacgaacttgtcgtagttcaggtcacggttgtcagcggcaacacggaagtagtgacccatatcctgactacgcagacgctcctcacgggtcatcagggtctcgaacagcttctcgccgtgacgggtgccgatgatgttcgtaccagtatcgccgaacagctgctgaacagccttggccagatcgccgattgtagaagcatccgccttctggatgaacaggtcgccgggattggcgtgctggaaagcaaacatgaccagatccacagcctcatccaggttcatgaggaaacgggtcatgttggggtcggtgatggtaatgggattacccgatttaatctgatcgatgaacagaggaatgacactgccgcggctgcacataacattgccgtaacgggtgcagcagatagtggtaccgccacgctcagctgccacacgggcgttagcgtagatgacgtgctccatcatggccttggagatgcccatggcattgattggataggcagccttatcggtagacaggcaaacgacgcgcttgacaccagcatcaatagcggcgtgcaggacgttatcggtaccgataatgttggtctgaacagcctgcatgggaaagaactcgcaggaaggaacttgcttcagagcagcggcatggaaaatgtaatcaacaccgggcattgcatcacggatggactgcgggttacggacatcgccgatatagaacttcacctttttggcattctccggatgcttggcctgaagctcatgacgcatgtcatcctgcttcttctcatctcgagagaaaatgcggatttccttcaggtcggaatccaggaaatgcttcaaaacagtagaaccaaaagaaccagtaccaccagtgatcataagggttgcgttatcaaatgcagacatttttaatttcctccaaatcttatagctaaaacagcggtattatctatgctgttttattcgaaagtgcgaattgtgattctctttcctttgaaaaatagaaagccagaatccatataacagcaattctcatatggggttccttatttaaaatacacaagaatatggttattaaacttatattttcaataagtcctctctttaacccgataatactcttgacaacgaatactgtcggtagcgctccaacaacaccaaattcaaccatcatgaaagttgttgttgatgtatcagagaagttagaggccaatctgtacgcattacttattccacttcctataattgcgttctgaacaaataagctccagttcttaatcaacgcctgcattcttgcagaactacccatattatcactcagaagttttgcgtaagcgcgctgttgtgcaagccccgtcaaagttagaaatgtatcaaggttaacaaacagcagaagaagaagcatatagactatgaaaaagacacaatatttcaacacctttttatttgaaatcgaatccataaatctattgagcatcagaagatcacaaaatagtataagaacaatgcccgctgatgaggctgtagtgaaaatgcaaatgtgataaataagcgctctccaaaatggcacttccttttcgaacgtcaaatccataatgaaggataggataatcattgtcgcaaaaagtcctggttcccaataaattcctgaatttctttccggatgcgacaataaataattgaaaatgacgcctattctgtagccttctccgttgctattgtaagcaatcggtaaaaatgaaaattgcccaactctttgaagtacgaaatagattaacgtgtcaaccacacacatcgtagttataaattttgtaaaaatcttcctaaagtcagaaaatgtaaactcttgagtgatgtaaaaggcaaataggaaaatcaatgatgttcgaaaataggaacccatattatccttattaatcatgcctatcccaattacaaaagccgcaaatccataggcaagaaggcctctacaaaatgcaggtcccgaaacatttcgcctcatggttgacactattacaggactcatcagtataattccggctgcagctatacgttctgagcttgaaattaatgttatatatgttgagccgcttaatatgtaaagaatgagcagtacaagtattcttctaattgtaagcttattatctaaaactttattcatcatttccccataattatcttccttaacggcttgtcagggagattaaacttgtcacgtaaaaaagaagaaacaaaatacttatatctttgcttgcgcggaaatagaagaatatctccaatcttcttttcatacacctcatcaattctaacttccttgggatgctttaatggaaattcaagtgggtaagaaggcatcgtacaaaatcgtcttgtcatttcattcatagttgaagtaccaccatgttctgaaatttcgtcaacgccaatattctttatttgattctttgcaggtgaaatgccgtacaaatcgtagtatttgagagcaaaatccatttgataatcccaagatttagatctgccgcactcctttattctttttctctccgctctccatctatacatatattgatagtaaagttgcgttgaaacaaacctattccgcattcctgcaaaattctttttgtcgtcgcatagtttcaaatccaaatcgtagtatttcaagaattttgaagaccacgacgcccacccacaaggaagaagatgtctagtaaacatataagattctccattgggagcatcatatttgccgagatagttcgttccgcatatccaaaggactttatcgttatcacggtatcttaaaagaagttcctcgcaatattgaaagaacgaaacctccggaaggttatcatcctccaagaaaattgccatctcttcacgctcgaaaacccactgcgctcctttgccaatattcccataaacgcccctattctcaacagcgtaattcttgatgacttcacagtcccaatcaattgcattttcggctgctcttctgcattcttcggcctgtttaatctcagcatcgtttcttccataatcggccattagataaattctgctcgcttgtatctctcttaaccgatctactatttgagtgatcttgtctcttctaaaaatcaaaagcacaattggaacattaaacgccattccggtttcctccatttatcacgtctaacacaaactgattcaacttcgattcatagcccctgtagtcaaaactttcgattgccaccttccttgcagacattctcatcatctcaagttcatccgtgctcatcttcaaagcacgtctcaatgtcttaagaatatcttgctcgctatctgaatccgcaatcaatccattaatgttgtcctcaacatacactccaatatctccagttttgttagcaaataccggggttcctaccgccatactttctgctaatttcgttggaaatccagcattagatgactctctattcggtctaatcacaaggctaaagtctgcctgcctaacagcatttgcaacttgattctgtggaattctgccgaagaaattaatctgatcttttagtgaatccgaaatttctcggtatttacctagctgttcttcaacttgttccttagacggcccatatatatttaaaataggaatacaattctcactattgtgaacctcatacattgcccttatgaattccactaatttatcttttccaccgcccaaagtacccgcaaaaacaaatgtcctctgttccgtatcattacactttgttcggctttctgtcttttcaacatccaaaattgttggaattctcaatgttcttaagccttgttccgaatagtaattttctaaaaagcgactaattgcaattactccatcaacctttggataataccatttccagcaactgtgaaattggtagtatctgtaatccgccttgccaaacctccaatttgtcgagtcatatttctcacaactttcaagaataattggaattctatacttccttgctgcatgtaatacgcacggaaatctgtcatatgccgaactgctaataattaaatccgggtgttctgactgaatatagttttctaaaaaagatgacaaacgtggtcttgttaaaaaacgattcagcttacttttcttcggcactatctcatagattctagtattttcaaatctcccaatgttatcatgcattctatacttattatcactcaagtagtcacatacaacatcgacattatatcccaactccgaaagggccctactaaagttctgtgcccgtgaagaataggcaataccgtatggaaacgattgaggcattaaaaatactattttcattttttccccttctattaaagaccgtctatcccactacttttccctagaattccatcaaactcttctggttcaaacggtaaaaagccactgcagggaaagaatgtcatttcgctgaagtatacttttccttgaacttcgtacaagtcaactctcacaaatggaatatcttttgacaattttcctgctattgtcttcatttcttcatatctttctggcttaggaggaacagtactcaacggtcgataatcgctccttttaaaccgcgcgacttcccagttcatatctaaaaagctcatctgagccgtcgtgtgatcctctaaaccgcaagaaacatatacaaattcaggcgttccattgaagcaaaagaatttgtagtctgtaaggccattactacccagcacttttgcagctgtgtcttccatatatttttcagcaataatacgcggttttacatttttgtatggccactcacgttgtccccagaagaaattatatttgaggcatttttcaatttttgttcgtactgaggatttgtctaatttcgttttatctctgcaaataaccaatccgccactgtcatgtgtgcatttcagaacaaactggttcggtagtttatcgaaatcgatgtcatcaaagctatcccaaacaccgagagtaggtatgacatcccccccccgattttatcagcaacccatttcttcgcctcatacttatcgaccatagtcgtatactccgggttacgatcatggatcttcaaccattgaagtttttcattgaaggttactggtggatcgaggttcagctttttccccatcttaacccgataggcaatcttcagataggtctcatcatccatccaatgaaaccatccacgatgcccaagcgaaataaaaaggagccctggattatcaagaaaattctttatgctcttagacattgtctttccccttatcctacgatttcctcataaacggcctgatattttttgctcatctttactgagctgaaattctcatgtgctgatgtataggctttttttccggtctctttcacattgctgtgatacatctgctcaagttttcttccaaggtcttccccatcatcttgacggtaaaggaatccgattttgtcgtctactccaaagatttccttatgttgttcaatatcagaaagtacaactggcaagcctgtggccattgcttcaagaacgccattcggcagtccctccgacttactcgtagaaacataaacatcgcaggcttttaggtaataattcacattggatacacttccacggaaatcgatacgcaaattagacgcatacttttctgataacgcctttaattccggcccgcctccaagtagcagcatataagagcgttcatcatttccgaacttcttcacatagttttccaacaagaatgggatattcttacgctcaataaattgcccagtataaacccaaataaatgcattctcaggcaatccaagctctttccgaatcgccagtttttcgctctcatcgggcatggtatactgctcaatatcaacaccattacgaatgaaatcataggactgttgcagcttttctttgtaaatctttgtaagactttcagagcaagcaatcgttttgtcgctctttttcatagccgatagctgcatctttgccagaattgttcccttcacctttccaaactttgccgggtaatcatcatacacatagttcctcaaagtatggatttgcttatatttagcaatctggctgactgcatagtcagggaaaacgccaactgtatggattaaatcaggctgaagttcctctaatttcttccgtagagcactatcctgccccagcataatgctcttttttccggttttcacaagataatgagcagaaacatacgggagataatccgccattctgctatccgcctcttcgtcatacagcgtaatcagaatcggctcgaattcctccggatcaagatttttgataatattcaatgtctgctgcgttggtccacattttttgcaagcggtcattaaatacacaattctaattctcttcttattatttacaggcctaaccaattttgtgccgacggtatcgctatacgcaaatttgatagtgtccagtggaatcatatacaaaccgcgatgtccctcatagacagaatcaaaacagatttttcttccatcacggctccagcgtggatgcaaatcacatcgagtatcattgtcatatttaaacggagcgaacacctttgcgattacaatattaaagtcttcattcaaaaccttcagaatcgccatgcgtttgcgattggggtatgtatctgtcacaaccaaacgcctgtccggggagtaacttggatgaccatccgaactgatatgtggccacagatggcggtactcctgcgttttatcatgcatcagatagtatcccgcacctgttttctttttgttctcgaatgcaatgatcgtctgatcatctttccaatagcagtggctgaccatatcgtcatcgctcagattgtacatttccgtaccatctacattcacagtaacaagacggctatattttctttctccattaaaccatcgatgtaagaccataaaacgctttccgctcggagacaccataatatggtttaccttatgctctgcacccgccatctccctacgaggttcaaaggaagcaaaatctgcatacttcagaacaggatctaccgtattattgataatatctagtttccagatgcatggggcatcaggaatcttctcattttttgttgtttcctccacattcgagtatccatagccaggtcgaagacgatgcaatctcgcaaaatctagtgtcaacgcaaaactaccatcggaagcaacactataaaccggtttttccaacacacgttcttttccggtaaaaacattcagcacgaccgaaacgaacttaccatcacggaagtcattatagataattttctgatcaaacttgggccccagccactgtgccatacacccctgctgaacattccacgagtgagtggtcgcaattctagtggccatgttattctgttttgtgtcaataagcagaatatccgcaggatctttcggtgcaacatcggaccatgtatctttcgcttttaggcaaagcacataccgcccagaggcatcccaaggagacttatcgtagtagccaaaaaaatactcatgatttggatcatccggtgatagccgaatgacagttccctcatgatccactttagacgaaatagcatacattgtatgctgatacacactctttactgtcctttttatagctggatacttatttaactgctgattgattttttgttccaatcccatagcaatatttctcctcaacctgttactttctcaatacctttttaaacatgaactgccgtagccaattaggagcagaggccgaacaaactcgaattgccgaagactttaagtactgtgggtatgtaatgtatccagctttatacattttcttaaaaagattgacctgaatttcgacataaagctttcccgaacgccgcttaaacaggttactgtcagctcgcatccataccaatggttcctgaatgttataccctttcatgcctgcaatcagcatatcgatccacagatagtagtcctgcatatatcggacatcagaataatttcctgctttcaaaacgtctttcttgcgatacattacagatgggtggttaaagggattccttttcttagaaaaggctacaatttcatcgctagtttcaggcacaacacgctttgcatctatgacttctggggttgtagaaaactcctcaataacactgccaacaatactaagttccggatgggccgcaaatacttcaagttctttctcacaacggtaaggtcggctaatatcatcgctatccattcgaacaatcagatcattgcggcactctttcacgccaacctgcagggcatgacctaaaccgccgttcttctcaaatctaactgtgcgaattgtttcgccatacttctgttgcagctctgcaatagtcgcatccaattctggagttaaagggccatcgcaaacaagcacaaagtcattcgtcggcatcgtttggttcatcatgctttcaatactcgtcttcaagtactccggtttttccttaaagtacactgacatcaaaaccgagtaattttcatacttgtttgcgtccattatcttgttcctctctccgcatatcaaagattacagcccagactcaatctcaaagagtctgagccgtttattccttataaagctctactaatcgtcctcagcagtgtgatttacacgctgccgctatgtcttgtaccgctgcagtgggtctccactgcgctccatcttgcctttccatagcactatcaaagcccttgtctttattccagatgacaccatcatctcgctatgggaatccatgtatttatgcccgacagcactcatatcgctatggaaactcatcagtttattccagacagcaccatgcctttcactgggagccctcgtatttgtgcctgataacatttccatgaccgggttgaaagttccgatgatgttgtcatcgaaaccccttgtttatgcctgactgcacattccgaggaaatgtcgattttcgccctcagaaagcggtcaaaagcgtctatatttagttgttttctccactcattgcagtggtttggccctcagaaatcccctcggtgctttcaggcataaacaggattttcactgttgcaaacatgattttcaaatcttcgacaatgctcggatgagctatgtacattaaatccatagtcagcttgtcgtaaggagtagtattgtacttgccataaacctgtgcatacccagtcaatccagccttagcctgcaagcgcagtgcgaactctggcatttcctcacagtactgagctgcaatctcggggcgctccggacgggggccgacgatgctcaagtcacccttcaagatatttataagctgcggcaattcatcaacgcggcaagcacgaatgattttgccaacgggcgtgatgcggtcatcgttttcgccgctggaaagacgggcgacgccgtccttttcagcatcaacacgcatacttctgaatttgagaatgccgaactctttgccatccttcgtcaaacgaatttgcttgtaaaatactgggccgtgatccgttgctttgatggcaatagccgtcacaaggaagatcggactcagaatcacaagcgcaatagcagaaatgacaatatccagcagtcgttttacaaacagatactccggctgaggattataccggccaacacgaagcatcggcagatggaacatatgcatgtgatgtgcaccggacatgatggtgtcaccgatgcgcgggacaacaaatacgataatgttgttttctacacagtatttcaaaataatattccgatcatggctgtggatgccgctcaaaaacactgtgttgatgccgtccagcatggaaagattctcgatgcattcccccgccgtagctgtggaaaccactttgtacttggcatcaagaccgtacttaccaatcagctgctccataccacgtctggtatcataaataacagctgtggcctgcggcgggaaggttttaaagtaggcgtggtgagcgttataagcccaaattgaggccataataacctgccccacaagggctgcaacgccagggagaatgttgggcaggtgcttggacagtagccaaatcacaatgtacatgataaagttgctgaccgcagccgccaaaaattgctcgtagataatttcggagatacgctgcatcgacatcagaaaggcgtcatatacgcgtccaaagatgatgaacagcacaaagaacagtgccacgaccaagtaatcgccctttgcgtagtacggcgatgcaacgcgcttagcatagtatagataccagcacattgcaaatggtatcgtcacaagcacagcatctaacagctttatcatccgcaaaatcaagtcatgcctaaatcttgtcatgttcttactcctcgttcttctttgtacacatattattttcaatattgcaattgaaatcagggaaagcagttttgagcagcaaaaggcattcccataaattactcatggaaaatccttagcacaattcagcagtctaccaacgcaatattttgccaatatatgtatggatataatagcacacaattcgacatttatcaacaaatcggattcattttaattatacaagtacacaaattcagcatattttacaaatacacccttgttcataaggtgaatgaggctaaaattcgatagattgttatatgtaacagtcaattggtacatgatttaaattttgcttaaaacgaaaccgattcaaaagaaaacagattgctgcgcttgcagcaatctgttttcttttgaatcaatattaactactaacgctcagatcatcacctgcgtccgaacttcttccgcttctttgacgggtgtttttccttgttcaattcacgctgatacgcatcttcagaactgaaaccaaagattccttctgagacccgtttaaccagtgccgtaaacatctcgtaatcgcgcaagtagttattccttgccttgtcatccattaccttaaaaaacctcgccatcaaactcatgtatgcgttatagtcgccattctgcgcagccttgagcaggcattcaaaccgccttgcagatggattccacagttcttcccttttcatctcaaaccagcttctttctcaattctcttgcaatttttcttcgtgccttagaaatcgtgttgggtctaaccttaagcttcctcgccacaacctctataggataatccaaataagtacgaataatcattagctctctgggtgagagcctttccaattcctgcttcaatgataccagaagctctactcgagcgaattcatcttctgcacgaacatcaatgacatcagccacatcatcaatattgataataatcggctgatttgcattaccagcaagtcgccttttccccttgttcctatatccaaggagacgtttctccgacctgtatttaatttcctctttgtctaacaaatcaaggatatggctgttgaacgaattactaagccagtttttttctatcgtctggttaagctgattataattggcccatacacgaagtgtgcaccaaagttcatacatttctaattcagtcattttgacctcctatagcgatttgagttttttcggtcaaatcacatctaggaggtcccctgctccgagcgcaactaagcagtttcaccacaaaatcacctatcccctcagttacaattgattgcgtcgcttaggtgatttgggaatcataaatataaatttcacaattcccgcatgtggtttataaagaaggccaccagagaagccaaaaaagacttcttaggtggccatcatactgactgtatttaatttactatccgcatccagttgaataatccgtatcatactacatttgtccgcatcagttacaatacaaccttcagacaaacaatttcaacgtgttttcactctttttctgtcgaactttgttgaaattccaagagaattatattccagtatttatttcaggtttttattcccgcactcattttatcgacgcaatcaattatacttgatggataatgtgaacaagccacaatgtgaaagccgaacagaacatgccggatagctcttgcaaaaacgaagaaaagcacgaacccttcatacctctttcggtacaagaagttcgtgcttttttacttcgattgtaaataagtgcttacgttgacattctctgcggtcatacacttcactccttgcaattagctgtcacagcggacactttctaactacaagggcctctttgcttaccgaagtaagcaaagaggccgcacattctgagcttattgtcaagtatttataagaaaaaaatccctctataccaatttctgtgttggtgtagagggattgcctatttaactaagtgacattgcctttatcggaatagctctttcctttacaacaacctcaccttacagtttgggagaaacgcttagcgcttcagttccagcaacgcatccccctgctttacggtgccactggctttagcctcgacaacggcatagtcatcggtattgcagacaatgaccggcgtggtcacgggatagccttctgccttaatggcttccagctcaaagcggatcaacggctggcctctcttcaccttgtcgccctcgttgacgaggtaggtaaagtgcttgccgcccagcttgaccgtatcgatgccgatgtgcatcagcagttcggcaccgtcagccgtggtcatgcctacggcatggtgggtctcaaaggtggaggagatctcaccgtcagtaggtgccaccagttcaccatcggagggctcaatggcaatgccatcccccagtacaccgctggcaaaggcttcatccttcacatcggccagcggcactacagtaccgttcaggcaggcagacagcacggtatcctttgctgcgggtgctgctgccggcgagggagcgacaaccgggtttttgggtgtactttccagataatcttccagctttgccttgatgacggccaccttgggaccgtacaccacctgtacgccgttgcccttgcagatcacgccggaggcaccggaggctttgagcacatcctgtttgaccaatgccgcatcattgaccgtgcagcgcagacgggttgcgcagcaatccacatcggccagattagcggcacctcccagaccttccacgatcattgcactgaccgggtcatttccggcaggcacactcccggaagcagcattgcgggcgttcacgtccgcacgggtgtacagcttgacttcctcggcatcatcgcggcccggggtcttgtagtcaaacttggaaatcataaagcggaaaatgatgtagtacagcacaaagtacaccgcaccgaccacgacaacccacacccagtgggtcttggcgttgccctgcatcacaccgaacagcaccaggtcgatgagaccgccggagaaggtcatgcccacgcccacattcaggatgtgcatcagcatgaaggacagaccggccagtacgcagtgcaccgcgtacatgggtagtgccacgaagataaaggtaaattccagcggctcggtgatgccggtgaggaaagccgtcaacgcggcagacagcagcaagccacctgccgcctttttcttttcaggcttggcgcactggtacatagccagcgccgcgccgggcaggccgaacatcataaaggggaacttaccggccatgaagcgggtagcgctgaccgagaacacagtggtggacttggaagccagctcggcaaagaagatgttctgtgcgccggtcacggtcacgccgtcgatgatggcggtgccacccacagcggtctgccagaacggcatatagaacacatgatgcagtccaaagggaatcagtgcacgctccagcaggccgtaaataaaggtacctgcatagccggaagccagcaccagtgcacccagcgcggcaataccgttctgcaccaccggccagatatagaacatggcaatgccgaccaccagatacacaatagaactgacgatgggcacgaagcgtgtgccgccaaagaaggccaacacttgcggcagctcgatcttatagaatttgttgtgcagcgcagccacgcccagaccgaccacgatgccgccgaacacacccatttgcagcgttgtgatgcccagcatggtggtggtggagttggcaggcatagcttctacgccgcccgccgcattgatcatggcctgaatggctgtattcataatgatataggccactgcaccggacagtgccgcgacctctttttccttgcgagccatgccgatggctacacccatggcaaacagcagcgccaggttgttgaacaccgcattgccggtctggctcatcacgtccagaatggtataaatgagggtgcccggatggatgacgctgttcaggccataagccgccagcatcgtttcgttggtgaacgagctgccgatgcccagcagcaggcccgccacaggcagcagtgcaatgggcagcataaagctgcgtcccacgcgttgcagtacgccaaagatcttgtctttcatcttcagttctcctttcttaagttcgtaaccagcatatatctacacaggaaatacctgtggagaatcaaaggcgaaacaaaaagcttactttcccatccaaatccgtttcagatggatagtaaggaacaccagttcctcgtccgaaagctccttgtgccaggtattgcgcacatactccgcaatgcagcaggcgcatttgtagtgttcactgcaattgcgggcgatcagagcgcggaacacttcgtcatgggtatcgttttcctgctcctgttttccttgaaatacgcgctgtgcaaaaaagcgcaaatgcactgtaaagcggctgaaatccagtgtatcccggtcaaaatggaagttgtaaaagcattctactacctgcacgcaaccatccacaaagcgggtgacatcgttcaccacgctcatggtggtgttgagctctgcgttgacgatgtgcaacgcaatgaagccgccctcgtcgtccgaaaggtctgcatggaaacgctggcggatggtggcaaggcactccataccaaggtgatactcttccgggtagaattcccgaatggaagtcatcagcgggttagaaaagcgaattccctgttcgctgcgctgaatggcaaagctaatgtggtcggccagcgtgatgagcaggctttcgttcagtgggtatttcagccgctgccggatggtttctaccaactcatcggtgagcagcagatgctcatacggaatccgttccagaagttccaccaacttttgctgcacggcagggctggtcatgcggtagctgcactccacggtttcagcctcgattttatagcccggcttaacaccaaagcccagaccacgcccggtgacgatcaactcacagcccgtggaatcaaccacgcgcaaaatattgttgttgattggctttttgacggtatattgcattgtttctcctcctcggggttgaaaaaggcaataaaaaaagaccacccttgacacagcaaacataccgaaggctgaaacacgctttcggcttgtgctatgcagagttggtctagcccgccaaacggtaacaatccaacgacgctgctcacgtacatttttcttttttgtaaggcacaaacaaatcaggcacttgaatagcgacttattctgtgcatgattacaataccatattccttgtggagtgtcaagacaagaacggctttctttttcactttgttagctttgcacaaattcattcgataatttacagcagattgacaagtaaaaagatttcttttattcgtgctttttatggtgcacgaaatctgatcaccttatctcccacacggaaaactgtatagttggattcattgctaagaaatgcccgttggctattcatacacgttccctccttcattactttggttttttcagaagctgttcaaagtttgagtatgcctcgcgaatgatttgtatttgcctacttcgagttttataaacaaattacgtttgggattgtccgttaaaaatctttaagagtgttttcaaaatacttacctttcaaaacttttgcaccgtccactggatgataggccctgccattataattgtggcaatcgtacacgcaccaaaacgtccgccgcaaagcacaccaagcacaaccataagcacatccagcaccatgcggacgtatttcaccggccagccgttcttctctgccagcgcaaatgtcaaggcttcgtaggagccacgccccagatttgcagacgaatagagccccgtaccaaatgaaaacacaacaattcccgcacacataatgataaagttgaggattcggctctggctgtatacgtgtaatcggctaaaaatttctacaaagccactgtaaaacagctgataaatcactgtaccgatatggatttgacggcggtcatagaagaacacaaacgcgagcatgaccaccgctaccgcaagcgacgcgccgccaatcgtaagccctgtcaggtttgccacaccctgccaaaagatagccagcgttgcgccgccaaaacctgcatataccgccaatgtaaggccataggccgccagaatggagccgaccacgattttcagggtcgcttttctcgacaggtgtttttgttccatttcttttctccatgaaaaaacttcccccgccgcttgtgtgaacgtgcaggggaagttttttactgttccttcgccttgatggccgcatcaatcgctcttgcggcctctttaccggcacccatggccagaatgaccgtggcagcgcccgtgacggcgtcgccgccggcgtagaccatcgggcggctcgtcaggccgtcgggaccgttggtgatcaggcagccgtgcttgtcggcgtccagacccggcgtggtggagcggatcagcgggttggggctggtgcccagcgccatgatcatcgtatcaacgttcagaacgaactcgctgccctccttgacgatggggcggcggcgtccggacgcgtccggctcacccagctccatctcaacgcaggtcatacccttgacccagccgttctcgtcgcccagcacttccgtcgggttcgtcagcgtcttaaagacgatgccctcctcctcggcgtgctcgacctcctccttacgggcaggcagctcggccatgccgcggcggtagacgatgtagac

SEQ ID NO: 693 - DNA, 11307 bp, unidentified
  source 1..11307: mol_type = unassigned DNA
  misc_difference 5318: note = a, c, g, or t
  misc_difference 5319: note = a, c, g, or t
  misc_difference 5320: note = a, c, g, or t
  misc_difference 5321: note = a, c, g, or t
  misc_difference 5322: note = a, c, g, or t
  misc_difference 5323: note = a, c, g, or t
  misc_difference 5324: note = a, c, g, or t
  misc_difference 5325: note = a, c, g, or t
  misc_difference 5326: note = a, c, g, or t
  misc_difference 5327: note = a, c, g, or t
atgaaagaaaataagataaaaaaagcaaacacatccccggaagggcaggctggttctgagaacatgagtacagcagatgtagatgcagtaatgaagaaatacgaccgcgaatccaatattcgtgtgtggaccggcaaatataagctggctgtacgcggcctgctggttgccttttctctgtggtgtatctatgttaccttatttgcaaccttcctggaggaaatccgactgacttcttttctggggctgatcattcttatcggatttcttacctatccggcgaaaaaaggagatatcagagaaaactacatgccgattggtgatattatttttatgatcgcaggcgcaggtgcttttctgtattttactttttctgcaaatcagatcatcaatcagggtaccagatttgccccttatcagattgtgatcggtattatcggtattgctgcactgatcgagcttaccagacgatgcgtgggcctgccgatcctgtttgtggcaggttttttcctgatctatgcactggctgtagggcttaccaatccggcatttttgggaagagtgaaattcctggtgcggaatcttttctacacaaaagagggtattttctccacacctgtaaatgtatgctctaaatatattgtggtatttattattttcggtgcgtttctggagagaacaggaatctccaacttctttattcagctggctaactgtattgcaggaaaatatgcaggtggaccggcaaaggtagcggttatcagttctgcactctgtggaatggtatccggttcctctgtaggtaacacagtaacaaccggttctgttacaatcccgatgatgaaggacacaggctacaaaccggaatttgccggagcagtagaagctgcttcttccacaggtggacagatcatgcctccgatcatgggagctgccgcattccttatggcagattttgtgggtgtaccgtactccaacattattgtcagggcgattctgccggcattgttgtactttacaggaatctttatttctgtacatctggaagcaaagaaattagggctttccggaattccgaaggaaaaacttccggtatttaagcttctgatccgtaaaatctatctgttattacctctggtcatgctggtaatctgggtgtccggaaactatatgaccatgcagaaggctgccagctatgcaatcgttctttctgttatcgtaagtctttttgacaaagaaaacagaatcagtgttaccaaatgtattgatgcgctggaagcaggaggaagaggtgttatctccgtagcagtagcctgcggtgttgcaggaatcatttccggttccatcaccatgacaggacttgccaatgacctgatcaacggaatcatcagtgttgcaaacggaaaactgatcattgcactgcttctgactatgctgtgctgtatcgtacttggtatgggtgtacctaccactgccaattactgtatcatggcagcaacctgtgctccaatcctggtacgtatgggagtacctacactggcagctcatttctttgtattttactttggtattgttgcagatatcacaccgccggtagcgctggctgcctacgcaggttcagccatagcgaaggccaatccgatgaagactgcatttacagcctccaggctggctatcgcagtatttatcgtaccttatgtattctgcttcaatccggcaatgctgctgatcgataccacaccgcttaaggttgttcagatctttatcacctcactgatcggtgtgtttggattgtcctcctcactggaaggcttcctgtcagtgaaaatgtctgtaccggttcgtgtcttaatggcagcaggcggactgatgctgatcgatccgtcactgatgactgatgttgtgggaatacttctgatcgtgggatgctgcgtatggcagacagcgcagaagaagaaaactgcatagagaagaataaaaaaaccggcaaaacacctgtcatttgggtgtcctgccggatttttttatttagaaatccagttctttcagataccgtccaagtgcatcctgccaggtggggagtggtgtgaaaccattggctgtcagtttgctcttatccaggcggctgttaaacggtctggctgctttggaagcgccatactctgcagttgtgacggagttgactgtcatgttttccgggagatattccgggtgtcccatggcagcggcctgacggaagatttcttttgtgaaatcataccagctgatatatccgccctcattggttgcatgataataaccgtatttttcagtttcgatcatatctaccagaagtcttgccaggtcataggtataagtaggtgtaccgatctggtcattgactacggagagagtatcatgagtttttccgaggttgatcatggttttgataaagttcttgccgtttttgccgaatacccatgcaatacggacgataaagaacttatcaactgtgccggatacggcaagttcaccgtccagctttgtctgtccatagacatttaatggtttatagtccttgcagtcaggctcccatggagtggttccctggccatcgaatacataatcagtggacagatacagcatcttgatgtcaagctctttgcacacatcagcaatattctgagttccggttacatttaccagacgaaccttcggctggttctcttcatcttcggcagcatctacagctgtccatgcagcacagtggatcacagcatcaacatttgcttctttaatgactttttctacagaagctttgtcagtgatatccatctgaacataaggcattgtggtaactgcagtgccatcagcgattccgctgtaggaaggagcaatgtcgcttcccacaccttcatagccgcgtttcgcaagttcgttcataacatcatgtccaagctgaccgcctacacctgttacaaaaattctcataaattatgcctccccgcggtttgcgtacattttttcatagtagttctggtattcaccggagatgatcgtttcccaccattctttgttatccagataccatttgatggtcttcttgataccgtctgcgaattttgtttccggtaaccagccaagttcgttgtgaatcttagtcgggtcgattgcataacgcatgtcatgacctttacggtctgctacgtaggtgatcaggctttctggtttgccaagttctttgcagatgatcttaacgatatcaatgtttgtcatttcattgtgtccgccgacgttgtaaacttctccaacacgtcctttgtggatgatcaggtcgattgcgcggcaatgatcttctacatagagccagtcacgaacgttttcgcctgttccgtataccggaagtggtttgtcatttaatgcattggcgatcattaacggaatcagtttctccgggaaatgatatggtccgtagttattggagcagcggctgatagatacaggcagtccgtaggttctgtggtaagccagtaccagaaggtctgcagaagccttggaagagctgtaagggctgcttgtgtggatcggagtttcctctgtgaagaacaggtcaggtctgtctaatggaagatctccgtaaacttcatcagtggatacctgatgataacgcttgataccgtatttgcggcatgcatccataagaacagcagtaccgatgatatttgtggtaaggaaaacttccgggttttcgatggagcggtcaacgtgactctctgctgcgaagtttacaaccatatcagggtgttcttcttcaaaaagtttgtaaactgcttcgcggtcggtgatgctttcttttacgaaacggaaatttgggttgtccatgacaggtgcaagagtggaaaggtttcctgcataggtcagacagtccagacagatgatgcggtaatccgggtatttttttaacatgtgaaaaataaagttgcttccgataaatccggcaccgccggttacgataatgttcatagtgattctccttaaaaaatatataatatgaatatctgtaagattctgttatagagtcaggcagataaaattatccgccttgctgcatggcgggtgatatatcaaataactgtttgaaaatttgatatatcactcacttgactgcgaattcgcttgtacaggtctaaaagcttcggttagtgcaatacatccagatatttaccgtccagaacgtcttttaagtactgaccatactgatttttcttcagtatttcataaaccttcagcacatcttcctttgtaatccagccattgagatatgcaatctcttccaggcaacctattttgcggtgctggtggctttccattgtttttacgaaattggtagcttctacaagactttcatgtgtgccggtatccagccatgtgaatccctgtccgagaagttctacgtttaattcgcccttttccagatagatgcggttcagatctgtgatctcaagttcgcctctggcgcttggtttcagattttttgcatactctacgacgcgattgtcatagaagtataaacctgtgacacagtagttgctcttcgggtgctcaggtttctcttcaattgagatagccttgccttcatggtcaaattctacaataccgaatctctccggatcatctacatagtatccgaaaacagttgcaccctcgccggattctgcgttctttacagcagctttcagtcttttcttcagtccatgtcctgcgaagatattatcgccgagaaccatggcaactgtatcattaccgataaattcttcaccgatgataaatgcctgtgcaagtccgtccggacttggctgtactgcataggtgagatggacaccgaactgatgtccgtcaccaagaagttcctcaaaacgaggagtatcctgcggagtagagatgatcaggatatcgcgtatccctgcattcatcagtacagacatgggatagtagatcattggtttatcatagattggcagaagctgtttggatgttaccattgtaagcggataaaggcgtgtgccggaaccgcctgctaaaataatacctttcatgtgtattctcctttgttattggcagtatgcggtcggagcgatattctgtcagttatctgtgtaaatgataagcaaaatatcaggcgactgcggtactaatcaacgggtttctggattgtcagtctgagttacgatatcatcctgactctggtgattgtattataaaaggtgaccttaggtcaccttcaagcatttttttataattttggtaaaattgttggtttttacttataggacagagannnnnnnnnncttaggtcaccttcaagtactttttacaaaaaagttaaattttggttatttttcacaaagaaaaatgccggcatccttggtaataaagaacccatcctttgtctttcgcgatacaaatccacggaaatctttgtatttgtccagaagatactgattctgatttccatggcaggagaggatataggaaatcagcggttctgcatcggggacaagaagagagtccttatagctttcccagaaaatacgggaaaaatacggtgccaggatatctgctccgttttctctgccaaaacgctcatagagtctgtctgcggagagaacgatccggtcgtcaaaatcccggaccagtctgctgacttcctgcatgtgtttttttccataggtactgcagatcagttttccgcctggagtgagcactcgttgaatttcgctgcatacagcagagatatcttcacagtaaaaaagcacatggtttgcaatgaccagatcaaagcttctgtcttcatgaggaattcttgcacagtcaaatgcctcgaaggaaaaacggctgtctttgcgtccgatagcacgtctggcatcacgaagcattccggatgaaaggtcagaaagagtaacggaaactttaccggggaggctggaaatattctgtgtccacagaacaccgtcgccgcatccaagttcaaggatacgcatccccggatgaatctgacactgctcataaatccatggaaaccatccctgtttattctgggaataaaggctgtgcagattaatgcgtgaggaaatgttggaggcgttctggtattgatttttcatgcttttctccatgcctgtcaggtggatcaggtcaagcatctgattccagtctatggcatgatgggagcggatcgcatctgtggtatcctggattgccttttccaccagctgcatttgttcgatacggtcacgtaccagctttagctggatgttcagggaattttccataaaatgatagtctgagtcgtcaatggtcatttcccgtatgtcatccagggagaaacccagatatttcagaagcaggatctgggaaagtcttgcaaaatcctcatctgtataaaaacgtgcgccggattctgttacataggagggtttgaggatattctgtttgtcataatagcggatagtgcggagtgttacatgtgccatccgtgcaaattctccggaagagtagtagccgtcttttttcattgtaaaaccttctttaagaaaaatagtcttgcccgcaaatgcggatagaaacagttgttcagcctgcatttgcgtattgctgatatgtgtagagtataacacagctgaccggcaggctacaagcatcaggtattaccggatggataatactatactggctgaatggtaagtcagatggtgatttttgacattttttggaggatgctaatccttgtcttttgacagaaattatggtatgttaaataataacaatcaaaactgattttcatacaaatcataatctggcagttctgccatattttttccaaaatacaataaatattaagagagaacagtaatgacaatatgaaaggtgcagggacaggaggagcctgatgattaatttatttgattttacttactgcggagactataatcggcagattcagaatctggcaaggatggtgccggagaagtggagcttttcggatacagatgataacggaattctgaaaggatacctggaacatacatttaaacgcctttatgaagaacagaaggtgtgggagaaaaagaattatgccatatttaatacaggactctttaattactattatcagccgatatatgcgtattttattcccaatctggtcccggacaggcagccctggtttctggatggcttttatacagaatactatttgttaaaagaaggaatcacctgtctgccggaaaaggcatgctatgtggaaaatccgtcagatcttgtgtttgatacaaaacttccggtaatcccacagtacgagcatattttcggggatgaggaaaatgctgcccgtcttccaaaggaagtacgtgacagcagcatgaaaatgcagctgtttgacggcgcgctgaaacagacaaaaagaatgcttgaggcagattacaggacggcaattccacagtattataatcactcaatccagctgctgctcccaatctgtctccgtcatccgggaaaacccgaccttgcactggcgtgtatgaaaacttcggacggaagcaaatatctggggcgtacctgcctgactctcagaatggcctatcataatgccaggctccttgcaagggtggaccgaagctggctgatgacttctgtatctgcctgaggtttgacatgtgtggttcgctttgatatattatagcagcgaagcggatgattttatctgtctgactgaaatgatgtcaggttagatatttttacggattattctgctgctatagatgaaacaacagaaaaaggtgggtgagaaatcaaatgcgaaataaaagtctggatgctgtaaaggccattgctgcgtgcctggtggtatgcatccatgtaagctttccgggacaggccgggcagcttgtaaaagtactggcaagatgtgcggtgccgtttttctttatggtatccgggtatttctgttattatcaaaattgcaatgcctcaaaaagaatattgtctaaaatcctgcatatcatgaagctttttgcagtttcagttgtgttttattttatctgggaatgttttatgaaagcctggaatggggagagagtatggacatggataaaagggcttgtgagtacagagcatctgaaggaatttttcgtgtacaacagtacttctccggtaagagcacatttatggtttcttcctgcattaatttactgttatctgcttgctctcctgattgaaaaatggagaatgcgtaaggctgcatattgtatggcacctgtattgctggcaatacttttatggagagcggagttttgtgtcttttttgacagattttatcacactatggaatacagaaactttctgtttacaggaatgagctttttccttacaggtcagatgatccatgaatatcaggataagatagtatgcaaacgtctggagcaatggatgcaatggggattgaaagcagggatgagtttcggtgtggcactcagcatgatggaatatgctttccggggggctggagaaatttacacaggaaattgtgttgcagtgatctgtctgtttctgtggcttattttatatggaagggaaataaattttccctctgtactggtggaaaccggaagaaaatatgcgttcctgatctatcttcttcatccggcgatgtcagaccttctgaaaaaatgttcagaaggtctgggagtcagcaactgtcagatttatttttggctgcgtccggttttggtatatatgctgacagtggtgacagtttctggcatatctgcggtctctgcgtatgcaaggcaaaatattttgcagaatgatcatgtatagtcagggtatgaaaatccggaatgaattttggctgcgttactgagaatggaatgaacagtaacatagtaacgttatcttcaggaaccgcgggaattataactgttcacataatggaaaatgtgatatagtaatcagtaaatcttatgaacgtaaccgtccggtgtttcgcagaatggcggactgctgaacagttaccggaaatcattatgcagaaaatacaaaggagagagaatggcagaaaaaaatcagaacatgaaccagagcaagaacagagcagaagagcacgatgaaagtgtgctgaatccggagattaagaatgaatcggatctgtcaaagaaggaaagacgtctgattgagaaagaaaaattaaagggaatggggccaaagaaaaagctggaatatatctggatgtattataaaccggctattttcggagtgatcgcagtgattgctcttatattcggaataaaggattactatgaacagtccaaaataaaaacagttctgtccatgacagtggtaaattcaatggcaaatgatacggaaactcctgagcagaaaatcaaagaaacacttgggtacaaagatgatccctatagtaaagtagagataggcgtgaatcttactacggactctgaaatggcagaatttgattataatgcacagatggcttatgtggcacagatccaggcaggttccattgatattatggttatgccggagaagctttatcagactttgaagaagaatgagccatttgcagatttgaaggaattgatgggtgaggaagcttttgagaagtttggaatgcagacagatactacgcacatttccattactgacagtgagcttgaacaggaattaggtgtaatctacgatcctgtatgcattgcagtgccgtattcagcaccgaatcaggagaacgcagtaaaatggataaaaagtcttgacagcaggaaataaattgtgatatgtttatcacaccaaaactggtgtggatttttcagtcttgtgacaaacatgaactcttttcgccgcacgattatcatacagcaatgtagagataattgtgtggcgttttttgttgcaatgaaacagagaaaggaaaaaagaatgaacaatacttttatgaagaaaaaaccgattctgccgcttctggcatctatggcaatgcctatggtactgtctatgctggtgaattcactgtacaacatcgtagacagcttttttgtggcaaagatcagtgagcaggcgatgacagctctgtctctggtatttcctgtacagaactttattaatgcagttgccattggtttcggtgtgggaatcaatgcacagatttcttttcaactgggagcaaaaaatattaaaaatgcgaatatagcagctacccatggtatgctctttaatattatccatggaattatttttacagtaatctgtattccgtttatgcctgtatttctcagtatgtttacaaaagagcaggaagtgatctcatctggtgtgcagtattcaaccattgcatttgcattttccacagtgatcatgatcagcctgtccttcgaaaagatttttcaggctgtgggcagaatgaaactgacaatgatcagcctgatgatcggttgtatttccaatattatcctggatccgctgctgattttcggagtggggatttttccggaaatggggatcagaggtgcagcactggcaactggtcttggccaggtatttacagttattgtatatctgatcgcatataagaagtgtagtattccggtggagatcagcaggaaatatctggaacttaacaggaacctggacgggaagctgtatatggtagggattcccgcaatcctgaatattgccctgccgtcagttctgatctctttcctgaatcagatattatcggctttttccggaagctatgtagtggttctgggaatctattataagcttcagacttttttgtatctgcctgcaagcggcattgtccagggaatgcgcccgttgataggatataattacggagcaggagaaataaagagggtaaagaaactttttgggatttctgtgcttctgaatggtatgatcatgctggtaggaacgatcatctgctttacagcatcagagacattgatgggaatgtttactgagaacccggaaactgtaagatttggcactgcagcattacagattatcagtatcgggtttatcccatctgccatctctgttacagcttccggtgcattagaaggactgagcaaaggtgctcagtccctggtgatttcgttattaagatatattatagtgatcattccggcagcatacctgctgtgccattttgccggggcagatgctgtgtggaatgcgttctggatctgtgaatttataacagcagtagtagtaggtatcgggataaagtattactggaaccgtctgctgcagtag

SEQ ID NO: 694 - DNA, 27850 bp, unidentified
  source 1..27850: mol_type = unassigned DNA
atctgatcccggaaacattcgtccggcgctcaggccggtgcggcaaacgcatcggccgcaacggccgttccgcctgcgccgcacgccgcggagcaatcttttcggcggaaatttcccgaatctcccggaaaatgctatttttgcggctgacaagagcacgttatgacagaaaagctgattcggaaagtctggattgcggtgtccgcggccgccctctggggatgcgggggcgcctcctcctataccgccgtggacggcgtgatgctcggcacaacgctgcatatcacggccgacgtgcagggcgtctccccgcaggaactctacgccgccgtgatggaactcgaccgcgaagccaaggcgtctatgtcgatcttcgatccgagctcgctgctgagccggctcaaccgcaacgagacggacagcgtagaccgccatatcgccttcaacctgcatctggccgacagtatcggcgccctgagcggcggccgctacgacgtgacggtcaaaccgctggtcgaagcgtgggggtttgccggcaggcaggccgaacggcatcccgacgtcgattcgatcctcgcattcgtcggccgcgaaaaggtccgtgtcgaggagggccggctggtgaaggccgatccccgcgtacagctcgacttcaattcgatcgccaaaggctacacggtcgatctgctcgcccggctggtcgaatcgttcggcgcccgcaattacatcgtcgacatcggcggcgaagtccgctgcaaaggggtcaaccggcagggcggtccgtggcgcatcggcatcgaaaccccgttcgacggcaacatgtccgacggcgaatacgtgcagaaacgcatccgcctgaccgacggcggtctggccacttcgggcaactaccgccgcttctacctcgatgccgacggcaacaaggtggcccacaccatcgacccgcgtacggggcgcagcgccgtgtcgcgtctgctctccgtgaccgtcgccgcgccgacctgcgccgaagccgacgcgctgggaaccatgtttctggccatgggggccgacgatgcgctgaaggccgtcaggacgatgccggacgtgaaggcctatttcatcctcgccgacgggaccgacggctacgaagagtatatttcacccgccatggaggcgatgatcatgcaataacgatccctatgaaaagcgctgtttttctctacaacacccaatccgggaaatgcaaaatcgaacgctgcaccgaagccgtctgcacggtattccgggcttacggctacgatatcaaaccgcagctgatcgacttctgcgccaatccgttcgacggcaacgaacagatcgacctgatggtcgtggccggcggcgacggcacggtcaactacgtggtcaacgccatgaaaaacaaggggctggacatcccgctcggagtgattcccgccggtacggccaacgacttcgcgggtgcgctgggcatgtcgcaccagccgctcgaagcggcgcggcagatcgcctccggcgcggtggaccgcgtggactgcggatgcgtcaacggactctatttcgtcaatatcttcagcttcggcatcttcacgaccacctcgcagcgcacgcccgaccagcgcaagcacaagatcggcaaactggcctatctgatcgagggcgtcaaggagctgcgcgcgatgcacgccgtgccgctcaaagtggtggccgacggacaggctttcgatttcaactcgctgatggtgctcgtcttcaacggcgagacggccggcggattccgcctcgcgcgccgttcgtcgatcaaggacggtctgttcgactgcatcatgctcgaaaagaagaacttcctccgttcgacgctggccatgggccgctatctgctgcggggcaatccgaagatcgtccgccaccttcaggtgcgttcgctcgacatcgtatcgacggtcaacgaaccgacggacgtcgacgggcagaaaggggccgaattcccgctgcatatcgagtgcatcgccggaggtctccgcatcatgtgcccccgcggagagtagcgccgtttcaggcgtttgaaaggcgtttcaagacggtcgtttccgccgccgccggcctgcgtacttcgctatttttcctccggcctattgcaatttcggacgaaaattgttacatttgtccgaaaaaccacgacgatatggcggataatatcaaagcgacacggacgacgcgggaaggaggacgtgagaatttgcggaaagtttcgatctcacgcatcaaaaaggagatgagcgacgtcttctatctgtcggacgatctggtaatcaccacactcgacgcgcagaacaacacgacgtccgactacccggcttcgatcgacggtttctcggccatcatcatgatgacgggcgaagccaccgtgtcgatcgacatgcagaactacaacgtcaagcccaacaccatcgtctttttcaatccagacagcatcatccgcacggtgaaatgttcgtcgaacgccgcggcttattttctggcgttctccaaatcgttcgtcaatgagatccagatcgacctctcgacgtcgctgccggtctacatgcgcttcggcaaggctcccgtactggaggtcacgccgcaggacgtggaccagatacgccagctcttccagctcatcaaaaccatgctgcgcagcgacaaggagcgttaccgccacgaaatcatccggacgcttttcaccacggcgttctacatcatcaccgagatcaaccagcgcgagcagcccggcgagatcaaacaaggccgctgcgaagtgctcttcgatgaattcatgtcgctgctccaacagtacaacaaacgcgaacgcaacgtcagcttctacgccaagcagctcaatatcacgccgaaatacctctcgtccgtggtcaaggaggtgagcggcaaaaccgccgcgcgctggatcgacgaatcggtgattctggaagccaaggcgctgctcaaatactccggcatgagtattcaggagatcgcctaccacctcaacttttcgacccagtcgttcttcggcaaatacttcaaacagcacaccggcaccagcccctcgcgctacaaacgcaaaggctgagccgcagatacggcacgaaaccctctcccggagagggttttttgttgtctccatccgaaaagtacgggggtgcagcccggtattcgtcgatataacatgaatttcgagcggccgtttctcagctgttcgacgcttattttgtaaaccatagcgtaaaccggaaaaacatgaaaatccccaaggcgaccgtcacggcggtcctttacaaatcgaagaccctcgccagcggcgaacaccccgtcatgataagggtctgctacaacagcaaacgccgatacaaaagcacgggactctcctgtccggcgaaatggtggaacgccgcgaagcaggaggtgcgcgaacggcatccgctggccccgaacatgaacgccatcatcggttccgaactgacggcgctgaaaaacaaagtgctggatttcgagcggcagggggtgccctactccgtgcagcgcatattcgaagcctcggtgcgtaaacctccgtcccggaaaaccctgtacgaccttttcgaagagcgtatcgcttatttcagggacaccctccagaaacacaacacggccaccggctaccagacgctgctccatatcgtcgaacggttctcgcagcaccggaccgtcgagctgttcgacgtggacggcgcatggctcggcgagttcgaggagtacctccatgcgcattatgccgatacgagcatcaaacggtttttcagcgccctgaaagcgctgatgaactacgcctgccagaacggactgctggacgccaatccattcgaccgcttccgtctgagccgcaggctcgacgtgcggaccgccaaacgggcgctcgaaaccgacgaattcgacagcctgatccgttactacctcgatacatattattataagacccggaagagacccgatccccggacgatgaaaagacgctgctggcgcgcgccatgccacggatgccggggcgaggagcggcaggcgtcgtacgacgccgagcagttcgcgctttcgatgttcatctgctcctatatttttcaggggctggcgctggtcgatctggcccgcctgaggtggaaagacctcgtatgcgtggagattccggaccgggagaagtacgaccgggattgtgcggcctacggcccccggtatgccgaagcgcataaggagacggtcgctttttatgaaatcaatttcgttcgcgccaaaaccctgcatccgatccgcattctggtcgaacagcgggtggcgtggccctatatgaagccgttcgcccgcacggcgaagggcggcgccggagacgacttcgtttttccgatctacttcgacgacgacccccaacgccggttcgaacgcataacctatgccaacaacgtgataaaccaagggttgcagcgtgcggcgaagcgcatcggcctgtcgcggaaactcaccttctattcggcccgtcacacctatgcgtcacgtctttatcacgccgacgtgccgctgcccctgatcgcccagaacatggggcgcaacccggcggaaatcgaaacttacctcaaggagttcgacacggacagaatcatcagcgccaacaaacgggtctggcaaattcccgatccagcccgcaaagacccgaaaaccggcgccggcttgtaaacctccatgtaaaccgagtcgttatgcgaggttgtaacatcataaatatcaatatataacttaacatgtattttgttcttaaccggaacaatgttagccggtgtcggttgtaaagactacgacgacgacatcgacgacctgaagggtcagatcaacgacttgaagggtcaagtcgagttgaaggccgacgcttcagccctcaaagctgttaccgacaaattaaacgggatagatttctcgtctttcgttaccaacagcggtctccagacagagcttgacaaaaggctggcagactatgccaagaagtcggatctgaaagattggctgactagcgatgaggtgttgaaacttattaaggctcagggatatcagaccaaggctgacgttcagaaactgatcgaagaggctaccaagaatcagctgactgccgacgatgtcaagaagattttcgagacgatgatcgcttcggacgagaccatgggtaaactgcaggccgaaatgcagaagatcatccagcaggctctggtcgacggcaagtacgttaccgagcagcagatgaaggatttcgtcgagggtaaaggttacatcaccggtgccgatcagctgtcggcgactcagatcaaccagatccttaccgctgtcgccaattccgtatcttcggagacggctacggtcaccgatgccatcaagaaggtcctcggcgacaacttcgcttcgtacatggctgagtacatgaatgacgagacggtcaaagccgaaatgggcaagaccatcaccgatacgatcctcaaggagctgaccgatgccaacgtaactctgaaagaggctatcgaggcgatgatcgaggagggtgtaaacagcaaactgttcaaccccgacggcagcgcaatctacctgaaagaagccgatctgaaggatcgtttcgacaattacgacacgcagctccgcaatctctggagcgctatcgcagacctcgccggccgcatccagtcgctggtttacgttccgacttcgctcgaagaggtatcgaacaatgtcatttccatcgagggacttccctatatcgcgatggttgacggtgaaggtgaggactacaagttctatctgggcagcgacgaaggcggcaacgaggccgcgatcgaagctactttcatggtttcgcctgcggctctggcagtcaagatgaccaaggagaacgtatcgttcgtaacggaggagatcaagacgcgcagcgctgcgtcgttcgaggttgtagacgtgatcgatcaggacgtcgtgaccggtaagtttaccgttgtcgccaagactcagtacgagtacggaaacggcaaaacgctggccattgcgctgaatgtgaaactcgcaggcaccggtgtcgccggagctacgcccgaagatgccatttcgggcgaggatttgggcagcgatttcaccagtgcctttatcggtacgcagtataatgcaggcggcgcgatcaatgccgatctggttgccggtcgtatgaaagaggacggaaacctcgaactggtagttgacgacgatacccagttcccggaattcgagggcgatggcggtctgaagtataacgacgaggaaaccgtcgttgagttcttccatgatgtgaagatttactacatgaaagacggcaaaccgcaggagctggctgagatttggggcgaggatgttcccgttctcaagaccgttgttcctgaagacgccgccgtagcgacggtagatcccgaagataacaaggacagctatacgcttacggcaaccacggcggcgatcaaaaagggcaagggtgttccggctctgatcgacgacgtgattacctcggaaccgttctcgttcgacctcgtatcgggcgaatacacctgccgcgtggttaagaacgccaaatcgcagttcaccatcatcaaggacaacaccgacgtcatcgtttccgagccgcagacggtaacgtggaactatgcaacggttagtgctggcgacgattacgaggctgtggattacctgctgaatcccgatcccacgaagccgcagatcggccacgtgatttacaacgcactgaaggctggatccttcgaggatatccagatcttcgacggcgagaccgaaatgaccgacgaactgccgttcgatgtcgctgacattatccttactagctctcctgctgacgatcgtgcagagcagcatctggaacttgtcgtagccggcaacagtgcaatgacgagcggttcttacacggtcaaagcacgttacaactatgagaacaccgatattacgattactctgcccgtcgttatcgagggtatgcctgagatcacgatggctccggagaccgtaacggtggattacttggcgggaacgagcgaatacacggtgatcgagacgtatgccgagaaactctggaataaggattgggctccgaagtacttcgccgacaagcagacgttcgtagatgcgatctatgccgctaccttcgaggctactgccgatgaagcggaagatggaaccgaactcgtgcaggcgaccgacgatgcaaagaacatcgctatcaagctcggcaccggagcaaaggagaagagctacgaactcacggctaaacttactgccgactggggtctcgatgtaacggttgccgttacggttaatttcgaaggctttgcaggcgagctggtacagggcgacaactatgcgaatccggtgcgtctgaacgcaaaacttacgacgacggcttatgtgcccgatggacttaacctcgacaacacttgggttgcacccaaagattccaagggcaatgaaatcggaaaggttgtcttctcggtagacgctgaagagtatgaaggcgcttcggtagacgccgacgccaagaccctgacgtggggtactgagtacaagggcctgaacatggcgctcagcgtaaaactgatgctcgattcttatgtccttgacgagcaggtgctcaatgtcgagattcccgacccgatcaaggataagacgatcagcctgcgtaagagtgccgctactacgatttctgcgagcgatgccgatgcttccctgactgtgggcgatctcctccagctggcgaatatcaacggcaacaacgtgttcgaggctgcggctgccgatgagaatacggttctcggagtcgctgtcaagtacgaggtgatgaatccggaggttctcgttgaccgaattacgattgcgggcgatttcgcaaccaccggtacgattacggtcaagggtaatgccgacagcgaattcgtaggcgagaagacggtcaaggtgaaagttaccgtatcctatgattacggcacggaccgcgttcacaatcttgatatcaaagttaagcagaaagccaactaataaagaatcccccttttccgcgaaatccggcgccgttcttcggggcggtgccgggagcgcgggaaatcaaatccctaaagcaggaacggcacatcccaaagttttttggttaacaactcccacttttaagtaacattcctgcttgcggcagaccgaagaggcgcggtctgccgcttttttatcgttccgaccgttgctgcaatccgtcggaccggatacgataggctgttgccggatcgggtgcctttgtcccgacttatatgaaaaatcagccgcagtcaatactgcggctgatttgatttgatttgagcctatttccggcatttcccggatgttcttcccatgttccccggcgttttccggcattttgggcgtttttttcggtccgccgttccgtcgcgccgcagagccatgcgggctttacgggcgtgtttgcggggctgtagggatgcgtttcatgcgccagccttccgcgtccctcatcgtatccccggagggcgtgaaaggcccctgaatccgtttttctgcaatacggacagcgccgcgtcgtcggtgctgatttcgggcgggatttcgcgggcgtttcgtgcgcgggcgtattagacgccgcaccccgacaaagcctctccggcgcttcctcccccgtgttgcggcggtttcagccttattttgccttggcggctttggcggccaccgcttgatccagctcgatgatgaagtccgaaaggacgttcatgtagttgatgaaggcgtcgtatgccgagtcgtacgggttgaagtaggagtgtacgtcgccgtccgagagccatttggtcgccatgtagtagaagtggtccgaggtctgcatgaaactccatacatagtcgaaatcggggcttttcagggcggcgaccttctctttctgggcgtagagtttcgagaaagcctcgttctgcaactcgttgccgagccacgccgtcacgtcgcgctcctcgtcggcccacgacattacgtgcggacagtggagtacggacaccggctggtacttcttggcggcctcgcttacggtggcgaactccatatcgttcttcttggcgaggatcgctttgggaagcgcacgcatgaattcgaagattcccgtatccgccgtctgatgctccccgaaggtctcgtagtccatgaagaggttgatgacctcgcccggcgtttcgtccgaagagagccatttgacgtatttgtccgccgtcagcggccattcgtcccagctgcggttcgagaaacggaacgcaatgtcgtccgagagcttgtagttgcgcaacagcaggcgcaatttctgattgatggcgttggcatagacgtagttaggcgatttccagcccagcacgtgcttggcgccttcggccagcatcgtgcggaagcccatgtcggcgaccatggcgccgatctcgtcggagtagatcagctcggtgttgcggaaggcggtgggcttcacgccgaactccttcttgatcatggccgtatggagcttcacctgttcggtgaaatcctctttcgacgccagcgacgccagcgaatgggagtaggtttcggccagaaactcgacgcatcccgtggcggccagctccttgaacgagtcgagcacctcaggcgcgaaggcgcggaactgctcgacggcgatgcccgtgatcgagaacgaacagcggaatttacccttgttctccttgatcaacttcagcagcagggcgttcatgggcaggtaacactgccgggcgactttctgcatgatcgagcggttcaggaggtcgtctaggtagttgtggtccttgcccatgttgaagaagcggtacttcttcagtcgccaaggctggtgtacctgaaaatataagcagacggttttcatagggtatctgtatttttattgttttttgttctcttcaatgaccgcttcgtatacggctttgatcttcgccgcggcgtcgttccacttgaggttggtgacctcttcgagtcctttcgacgcgaacatgcccgacagggccgggtattggatgaggccgtagatggcgtcggccagcgcgtccacgtcccagtaatcgaccttcacggcgaagtcgagcacttcggccacgccgctctgtttggagatgatcaccggcacgttcgagcgcatcgcttcgaggggcgagatgccgaaaggttccgagaccgacggcatgacgtatacgtccgacagctggaacatcttgtgtacgtcctcgccgcgcaggaaccccgtgaagtggaagcggtcggcgatgcccagccgcgccacgcggcggatgacgtggttcatcatgtcgcccgaaccggccatcacgaagcgtacgtcgggtacgcgcttgagcactttggcggcagcctcgacgaagtagtcgggacctttctggtaggtgatgcgtccgaggaaggtgacgatcttgtccttcacgccgcgttcgggcattttgcaggggccgccggcgaagcgcacggcgttgtgcaccgtcacgaccttttcggccggaacgccgtagcggttgatgacgatgttgcgggtaaggttcgaaacggcgatcacgcggtccgcggcgtgcatgcccgcacgctcgatggcgtagacctgcgtattgacgttctcgccgctgcggtcgtattccgtggcgtgcatgtgcacgacgagcggcttgcccgacacgcgcttggcggcgatgccggcgtagtaggtgagccagtcgtgggcgtggatcacgtcgaactgcccttcgaggtccttggcgacctgcgcggccaccacggcgtaacgggccacctcctccatgaggttggcgccgtactttcccgaaaaggtgtaacgctgtttccatgcgtcggtcgtggaccagacctgctgacccgattttacatagcgttcgtggtagacctcgtactcttcgggggagatgtagggcaccatgttcgagtcgatgtggatgaacgacattttttcgagaatgtcgtcggctccgctcccggtcgaaccatagagagcctccacgtcgctggcgttcattacgtgcgtgaaacgctgatcttcatcgccgtaagcgtggggaaccacgaacgtgacgtctacgtcgttgcgcgccagaccgcgcgtcatgccgtagcacgccgttccaagaccgcccgcgatgtggggcgggaactcccaaccgaacattaaaactctcatatcttaattcttttcattttgttgcctttatttctttgcggcttttcctgccgctgctttcggcgccgcctttttcgccgcggccttgggggccttcgccgcggtcggacttttggcggcggcctttaccgtcttcccggcgcttttcgccgcaggcttcgtcttcgccggctttttctctttcggaccgttcgttctgccgcttttcttcgcggctttgggcccttgggaatcccctttgctccgctcgcggatcatgcggtggatgtccagtgcggctccgacgctccacgcctgcgaaatggctccgcgcgaagcgtagggcgggtcggcgtcgtacaactcgcagatcgagccgatgccgtaacgctggatgtcctcgtcgaagttttccagcgcctcctcggcctgcggcaggaatgcgtcgccgtcgatgtcgaagcaggccttgatgtagaagggcagcagccacggccataccgagccgtttttggcggcgaagtcgcgttcggcgggcatgccctcctgcgaacccctgtaaagcgggttttggggcgacagcgtccgcagtcccttcggggtgagcaggtgctggcgcaccgtgcggatcacctccagttgcatcgtctcgtcgagcatcttgtaattcagtccgcaggcgacgatcatgttggggcgcgtcgatttgtcgggaccgctgccgtccacgaagtcggccaaatagccctccggcaggcggaacagttcgatgaacgactcctgtgtgcgagccggaagcgaggcccacgccttgacgaaggccttgtccgtcttgtccccgtatttgccggccagttcgagcgcatagcatacggcgttgtaccacaaggcgttcacttcgacctgatagccgttgcgcggggttacggggcgtccgtcgatcgttgaattcatccacgtcaggggcacctcttccgatgaagcccatatcagcccgttgtcgtgcagcgccacgcggccgccgattccctgccggtagctctccagtatgtctttcatggccgggccgtagctcgcccatatctccttggcccccacttcgcgttcgagctgctggagggtccagaaaaaccagaggggggcgtccgccgcgacttcggccgaggcgctgccggtgaacatgccgtcgcgcatctcccgcaccagcgtatccagcgcgtcgatgcagtcctccttgtgtccctgttcgagcgtgatgcccggcagcgagatgaaggtctggcggcccgaaaccccgtgccacggatatcccgacaccacttcggtccggtcgcccggacggcggatcaggaactgccgcgccgagtgttcgagacagctgatgaagtcgatcttatgcgtacgccgcgcgatggatgcggcgaaaacctcttcgatggttttggtcgagcccatttcgtcgagcgacgccgagaagatgatgctctcgcccttcttgagctccgcttcgaaatagcccgtcgtgagcaggtcttcgtacccctcgtatccgcgggccagctcctgctggtattcgaatccgtaataccagtcgggcgcgggcacgaactccgtgccgggtttgctcgtctggagatagagccacgggaacgagttgtagagacggcacttcacgccgttcacggcggggtaggagtgtccgtcggcctccatgttggcgtgcgtcagcgcatgcttgtcgcggaaggcgaggaacggccgcagccgcagccgggtttcggagtgggcgtccacgagcgtgtagcggatcatcagctgcgtccgcttgtgtatccagagcatctccttcttgaggattacgccgcccacgcggtaggtgatcgtcggcgtcggcgtatactcgaaatcggtgatatacttgtggccgcgcggctcgtatacccccttgaaacggtgcagcgccagattgaacgtctggtcgtgctgcaccacggtctcgtcgagcgacgagagcaggacgtaggtccggcagctgtcgtcgatgggggccaccatcagtccgtgatagcggcgggtgttgcagcagacgatcgtcgtactcatgtagccgccgatacggtccgtcgagagcatttcgcgctggagggagtactccagattgcccaattcgcttttgtcgaaagtaagtgctgacatatctttcttaaaaatgcagttcgtcctataaagatattaaaattttcagataaataatacccgataacagtaaattaataccttttttaacattattcacgccaaatttgctaggcccactttaccaatgcaaaatccatgcggtgcggcaggtgggggttgtagggatagagacgcagcgccacgtcgaacgtgccggcctcgccgggaacgtaatccagcgcataggtcacgcggctgccgtcggttttggtgtgtttcagcccgatggtgcgggttacgttcaccttgccgccgccgacgatctgctgggcgatgaccatctcgacgccgatatcctcaggccggaggttggcgatgtccaccgtcacttcgaagtggtacttctcgccgacgaagatcgcctcgtcgtcgatcctcacgcgctggacgtcgatcacgcggaccttgtcccatgcggccgaaaccttgcgcttccacgccgcgatctcgcgggccagcttgtagccgccttcgacgatttcgcgcttgcgggccgcgagcttgttgtagaaccgctcctcgtaatcccccagcatgcggttggtcgtgaagttcgacgcgatgtcggcgacgcactttttgaccgaatccacccactggtgaggaatgccgtcgctgccgcggtcgtagtatttcggcacgatctgctcctcgatggtgttgtaaatcatctcggcgtcaagctcgtcctgatagccctgatcggcgaacgtgcgttccatgggcagcatccatcccgcgccctccttgtagccttcgacccaccatccgtcgagtaccgagaactggagcacgccgttcatgacgcacttctcgcccgacgtgcccgacgcttcgagcggacgggtcggggtgttgagccatacgtccacgccctgcaccatgcggcgggccagctccatgtcgtaattctgcaggaagaggatcttgcctacgaactgcggcatggcggccacttcgacgatgcgtttgatgaggtcctgacccggcttgtcgttagggtgcgctttgcccgcgaagatgaactgcacgggacgctccttgttgttgacgatcgccgacagccggtcgaggttggtgaacagcaggtaggcgcgcttgtaggtggcgaagcggcgggcgaaaccgatggtcagcacgtcgggcttgatgccctcgatgatctgaatcatctggcgcggcgagtcgagacgcacctgattggggtcgctgtagcggcggcggatatgctttacgagcttgttcttgagatacatgcgctcgttccacagctcttcgtcgggaatctggtggaccttctgccatgccgggatgtcgtaggtgtgcccctcgaatccgtcggcgaaatagcgggcgtacaggcggcgcatgctggtcgcgatccacgtcgggaagtgcacgccgttggtgacgtacccgatatgaagctcgtttttgaagtagcccggccacatgctgcccagaatatccttcgacacctcgccgtggagccacgacacgccgttcacctcctgcgagaggttgcaggccagcaccgacatcgagaacttctcgttggggtcgttggggttggtcttgccgaggttgatatactgttcccacgtgattcccagcacgtcgggatagtgcgacatgtactggcggatcatcgattcggggaatgcgtcgtggcctgcgggaaccggcgtatgggtcgtgaagagcgacgacgagcggatcacctccagcgcctccgagaaggagagcttcttgtgggtcaccagatcgcggatgcgctcgatgccgatgaatgcggcgtgtccctcgttgcagtggaatacgtcgtgtttgatgcccagcttgcgcagcgcgcggataccgccgatgccgagcaggatctcctgcttgagccggttctcccagtcgccgccgtagaggtggtgcgtaatctgccggtcctcttcgaggttggcctcgaagtccgcgtcgagtaggtagaggtccgtgcgtcccacctgacatttccagacgcgtgcccagagcgtacgtccggggaaggcgatggtgaccgtcatccagttgccggcttcgtcgcgcacgggcgagatcggcagcttgtagaagttctgcgcttcgtaggtcgcctcctgcgcgccctgcgacgagagccgctgcgtgaagtagccgtaacggtacagcaggcccacggccgccatcggaacgttcttgtccgacgcctccttgaggtagtcgccggccagaatgcccagaccgccggagtaaatcttgagcgacgaatgcaggccgtactccatcgagaagtaggagatcgaggtcgccttcggatcgggtttctcgttcatgtagtcgcggaactgcgcatatacggcgtcgagctggctgaggaaattcgtatcctgttcaagctccttcatgcgctccacgctcattttgtcgaggaatgcgatcggattgcgttcgcactcggcccacaacgcatggtcgatgctttcgaacaggtcgcgcgtgccgggattccagcaccaccagaggttgcgcgacagctcttcgagggcgtgcagccgtttgggcagggtcttgtccaccatcatgcggttccagttgggcttctcggcgaaaagctgctggcgcacgaagttgatctgctcgttgcggtttccgccctcgtccagcacggcgcggttggtgcggatgaccgaactttcgacagcctcggagtaagcctgctcgtaggcggcgaagaggtgttcccagagcgccgtttcggagatttcgtaggccgacacgcgcatctcgttcacgtgcttgtcgtccagcaggctgaagtgcagcagcgactcggcgatcttctcttcgacctcctgatcgttgtagtcgtcgcgcagaacgatctccacgcccgcatgctcgcgctgtttggccgcccagagaccgaatccggccagcgtcgtggtgatcgtcggcacggagaaggccaccgattcgagcggcgtgtatccccacggttcgtagtaggaggggaatacggtcatgtccatgccgaccagcagttcgtagtaatccttgccgaagatgccgtcggccttgttgaggtaggtcggaacgaagatcaccttcaccttcgaatcgggcgtggtcagaatgctgccgttgagggcgttaacgatcgggtcgctgctctggtattcgaggtagtgggtcgtgtatttgtactgcccgccgtcgatgggtttcgacgggtcggccagatgcgcctgcaggtccgcgcgcggaccgcggttggcggcgggcacggtgatataggccagcacctgacgtttgagccggggcgatgcggccagtttcttgagcgattcgatgaatacgtcgatgcccttgttgcggaattcgtagcgtccgctggtgccgacgatcagcggctcctcggcgaacttttcgcccagacacgcttcggccaccgagatcatcgttttgcgggcttcggcgcgcttcgcgtcgtactcctcgccggtccagacgaagtcgttttcgaagccgttgggcgtgatgcagtcaggctcgcggcccagcaggaatttgcactcgttggccgtgatgtcgctgaccgtgacgaatgcgtcgtggtaggcagcggcggccttctcgatcgagtgtttggccacgacgttgaactggcgtgccagctcgtcggcattgaacttggtcaggtcggtgtagagcggcaggtggttgcccgcgatgcagcggcccatgaccgtggcgtgcgtggtgaagagtgtcgccacataaggcgcatggcggcgcaggtagagaccgcccgccgcggtcatccattcgtggaaatgggcggcgatcttgtcggtcgcggtgcagaagttctcgacataggaggcgatcaccgcgcctgcggcgtagccgaagagcacgggctcgatgtagtcccactgacccgaaatcgaatcgacgtggtaggcctcccagagtttcttgagtatttcgtccttgcggggaatcagcgaggtgaagtccaccagtatcgccgtcggttcgcccttgattttccagtgtcccacgcggatgcggatgccttcggcgtaaagcccctgacgccatgtcttcagcaggttgggatcctcctcgaattcggggtttacgccttcgtgctgcaggtcgggtccgatgaggatatagcgctcgttgaatttccggatggccgtttgcgctttggtcgagactaccgtatggatgccgccgattttgttgcagacctcccaacttacctcgaacaggtaatcgggggttagttttgcattgctcatatttgtgatgcttgtttgtaatttacttgtcgaatcggttgaaaaccggtgcaaaggtaatacttatatttatattaacaatctcgaaagggtaattagtaaaaaaatttaagaataacttaacatttcagtttcacttggttgcgcgcgtcgttatgtttcgaaaagggcctcgatcacggcgtccgagatcagaaaccgctccgggggaaccgccagccgtccgcctgcgtcgcggagcgcgccgctttgcagatagggggccgcctcttcgcgcatccgctccagccgtttcgtgccgaaacgggccgcgacctcccgcgtgtcgattccttcggcggttcggagcgccgtcatgacgtactcgttgaaacggtccctgttcgtgaggagttcgcgttccgccggatcgcccgcgatgtaccgctccaccgaacctacgttccagtgccgctcctcgccgtcgaacgagtgcgccgcaggaccgatgccgaggtacttcgcgccgtgccagtacgccgcgttgtggcgggcgcggaagcccggaagggcgaaattcgagacttcgtagtgttcgaatcccgcttcggtcagcgtgtggtggaccgtgaggaactccgtttcgctgatctgctcgtctacggcccggaattcgccccgcgcggcgcgccgtccgaaagccgtatcgggttcgacggtcaaatggtatgccgaaatatgctgtacgccgagcgaaagggccgcatcgagcgagcggcgcagcgtatcgccgccgaaacccggcatgccgaagatcagatcgacggtgatgttgccgaatccggcgcgctgcgcagcacggaccgcttcggccgcctgcgcggccgtgtggcggcggttcatcagtttcagacagtcgtcgtcgaacgactgtacgccgatcgaaaggcggtcgatgcccgcttcgagcagcccgccgaggtactcggccgtcaggtcgtcgggattggcttcgagcgtcgtctcttcggcgccggagcagtcgaagagttgtgcggcgtggtccagcagtcccctgatcgcttcgggcgtgcagagcgacggcgttccgccgccgaaatagcgggtcgtcaccgcttcgccgcccggatagccgcgccggtcgtccagttcgcggtgcatggccgccagcaggtcgtccatgcgccgcaggtcggcgcttttgtaaaagtcgcagtaggcgcagacgcgcttgcagaagggtatgtggaaatagagtccggccatggttaccaaagttaagaaaaaaaacggagacgacggcacattattttccgatttttccgaaacaggccgaaagccggtgcgctccgcgtttttcggaggctgccggattcgtccggcacaaccggaaatcgcggcagcatgtttgcggtatgtccgcagttcctgagctgcgcgcggcttcgggcggaggagatacgaagttataaatgaatcatatacgggtgccggaaaaaataatgttctttttttgtgttttttactgttaattttttcacaagtgtaaaagtttttctacctttgtgcggttaaagtccgcacgcgcggatttcgacggttaggttaaatcttggatttgatgttttattaaaaataacgattgctatgaacaaaatggatttgaaaaagtacgggatcacgggtgtgaccgagatcgtgtacaatccgtcgtacgacgaacttttccgcgaggagaccaagaaaggcctccgcggtttcgaaaagggtcaggagaccgaaatgggcgccgtgaacgtgatgaccggcgtttacaccggccgttcgcccaaagacaagttcttcgtaatggacgagaccacgaaagatacgatctggtggacttccgacgagtataagaacgacaacaagcccgtaaccaaggcggcttggaaagagctgaagaagatcgcttcgcaggagctgtcgggcaagaagctttacgtcgtcgatactttctgcggcgccaacgagaactcgcgtctgaagatccgcttcatcatggaggtggcttggcaggcgcacttcgttaagaacatgttcatccgtccgaccgacgccgaactggagaattacggagagcccgatttcgtcgtgctcaacgcatcgaaggccaaggtcaagaactacaagaaactcggtctgaactcggagacggccgtcgtcttcaacctcaccgagaagatgcaggtcatcatcaacacgtggtacggcggcgagatgaagaagggcatgttctcctacatgaactacctgcttccgctgaagggcatggcttcgatgcactgctcggccaacaccaacgagaagggcgagaccgctatcttcttcggcctgtcgggaaccggcaagaccacgctttcgaccgacccgaagcgtcagctcatcggcgacgacgagcacggctgggacgacgacggcgtattcaacttcgagggcggctgctacgccaaggttatcaacctctcgcaggagaacgagcccgacatctggaacgccatccgccgcaacgcgctgctggagaacgtgacggtagacaagaagggcaagatcgacttctccgacaagtcggttacggagaatacccgcgtatcgtacccgatcttccacatcgaaaatatcgtgaagcccgtatcgaaggctccggccgccaagaaggtgatcttcctctcggccgacgcattcggcgtgctgcccccggtttcgatcctgaacgccgagcagaccaagtactacttcctctccggcttcaccgccaagctggccggtaccgagcgcggcatcaccgaaccgactccgacattctcggcctgcttcggcgcagcgttcctttcgctgcaccccaccaagtacggtgaggagctggtgaagaagatgcagaagtcgggcgccaaggcttacctcgtgaacacgggttggaacggcaccggcaaacgtatctcgatcaaggatacgcgcggcatcatcgacgccatcctcgacggttcgatcgacaaggccgagaccaagacgctgcccatcttcgacttcaagatcccgacggctctgcccggcgtggatcccaagatcctcgatccgcgcgacacctacaagaacgccaaggattgggacgtgaaggccgaggacctcgcaaaccgcttcgtgaagaacttcgtgaagttcacgggcaacgaggaaggcaagaagctcgtagctgccggcccgaaggttaagtaattcccgatgactgcggcgcaggccgcgcatcgtcagaacgcggaagcggggtatttccaccccgcttccgtttttttgcgcatgtagtgcgccgtccggatcatgccgtccggaggaacggacagagtcggcaaaaccggcagccccgcagattccgcagcccctccccgcagaatccgtggaacttgcggagtcggcggaattagcggaagaacgggcagaacccgcggagtcggacgtttcgaaaccggcgtttgctttcggagtgtagccgtgttttgccggcccgtaacctgtccggacacagccggcaagacgaaacgccctgctcctcaaagagcagggcgtttgtgtttgtccgccgtttgcggccgtttttcgcaatccgtgttatctgctgcaggaaccgtcggtgcgcagtcgcttgggcatgaaaatccggtagccgatcgagacgccgagcttgttgggataccactccgacgagccgttgaacggatcggggttctccggctgcaccggacggtggggatacatgtctaccttgccgtcgaaactgtatccgttgtagtggctgtccatccatgcccatccgaagaaggcgtcgagcagccaccgctccccgaactggtgttcgtaacccacgcacaggccgatcatcatgccgtagcctttgcagtagcggtcttcgaatttcagcttccagccttcgatatagggtttcgacatgtcgaaagccatcatgccgatattggcgcccagataccagccccggttgtgctccttgaagtagcggcggtattcgcccatgaagatggcgaaggtcatatgcttccggttgatcgacttccacggcgagaccacgatgtcggtctgcagggtcgatttgggggatatggcgaattccacagaggggtttacgacgccgaccagcgcatagagcgcgttgagtttgacgtagccctgcgatgctgcgttctgtatgccgaacagcgaaaacaatacgatcaggaccgaaatcttgcggaatggctttttcatcgggacggaatgtttaggaggggcaaatatatgaaaaaatccggccaatatacgaatcgggccggattttcatgcggatgaaaccgtttcagacggtcatgatctccttctctttcttcaggagcgcttcgtcgagcagcttagagaatttttccagcagcttctgcgactgggtttcgccgtccttcgattcgtcttcgggcatgccctccttctgggccttcttgaatgcctcgacggcgtcgcggcgggcgttgcgcaggctgatgcgggccgtttcggcttcgccgcggatctgcttcaccagctccttgcggcgctcttcggtcaggggcggaatcgtcaggcgtatctgctcgccgttgttcgagggggtcaggccgatgttcgagtcgatgatggctttttccagcgggcggagcatgttcttgtcccacggctggatcaggatcgtcttggcgtcgggaaccgtgacgctggccgcgcccgatacgggcacctgcgagccgaagtaatctaccatgatgccgttcagggcgttgggcgaggctttgcccgcgcgcacgttcagaagttcctcttcgaggtggtcgatagccttctgcatacggccggaggcttcgttgagaatcgttttggtatccatagttattcgagtgttttttcgatggttttgatcatttcgtcgaactcttcggggtcgtaccctaccgacgccagcacgaccttgccgttgcggtcgatgacgaaattacgcggaatgtagttcgacgcataacggtcgtagacggtctgcgaggggtcgagacccatcgggaaggagtagccggtcttttcgcggaacgccgccacggtctggtgcgtttcgccgcgcgagatgggcaggaatacgaaatcgcggcctgcgaaacggtcgatcacgtcgctctgcacgcgcgccagctcctgccggcagggcggacaccacgtggcccagaagttcagcaggacgaccttgcctttcagttcggcgaggtcggttttgccgccgccgaacatctcgaccgtgaagtcgggggctttgtcgccggccttcacgagcgtcgtcgattcgacgtcgcctgcctttttgctgctgttgccgccgcatgaaggcagcagcaggatgacggcgacgatcgcgacgatcagcgccagcatgatccataattgtctgttactcttttttgtcgccatgttttttcgttgttttggtttgtcgggcactttgtcgcacggagtccggagtgccggccggaagctcctatgaaagcccggttacgagcgttccgatctgttcgcctgcaagtactttgcccagattgcccggcgtgtccatgtcgaagacgatgatgccgagtccgttctcgcggcaaagggtgaacgccgtgaggtccatgactttcagcctgcggtcgagcacctcctcgaacgtgatccggtcgaacttcacggccgtcgggtccttttcggggtcggccgtgtaaacgccgtccacgcgggtgcctttgagcatcacgtcggcttcgatctcgatgccgcgcagcgccgacgccgagtcggtcgtgaaatagggattcgacgtgccgccgccgataatcaccacatagcccgcttcgaggtactcgatggcacgggccttggagtagtattcgccgatgggttccatgcggatcgaagtcagtaccttggccttcacgccgttgtcctccagtgccgactgcagcgccagcgagttgatgatcgtggccagcatgcccatctggtcgcccttcacgcggtcgaagcccttcttggcgccggtgagtccgcggaagatgttgccgccgccgatgacgatgccgatctggacgcccgttccggcggccgccttgatctgttcggcgtaggactggagcacttcgggcgagagtccgtatttctgcgaaccttgcagcgattcgccgctcagtttgaggagtattctcttgtatttcatgttgcaatggatttaccgtaacgcgaagatagaaattttttcgaaaaaaaccggcatcaatgactatctttacagaaaatagacgccctccggaccgtgtccgaacaaattcggcgcggtgtccggtgcgcacgcttttcgacgccgttccggaaaggctgcgtccggccaaaaggcggacgggcttgcttttgtgccctgcttgcattatctttgtctcgccatgacgccggaagaatacagactgcttctacatatcgattcgccggaggacctcaaaaggctctccgcggaggagttgcgcgcttactgcgacgagttgcgacgctatatcgtcgacgaatgttcggtaaatcccggacacctcgcgtcgagtctgggggctgtggagctggccgccgccctgcattatgtcttcgacacgcccgccgataagatcgtgtgggacgtggggcaccagacctatgcccacaagatcatcacgggccgccgcgaagcgttcaaaaccaagcgccggctggggggcatcagcggcttcccgcgcatgtccgagagcgaatacgacgctttcggcgggggacacgcctcggtgtcgatctcggcggccttcggcatggccaaggcggccgaactgcggggcgagaagtatcgggtcgtggcggtcatcggcgacggttcgatgaccggcgggctggccttcgaagggctgaacaacgccggggccagcaagcgcaccaacctgctggtgattctgaacgacaacaacatggcgatcgatcaggccacgggcgcgctgaaaaactacctgctcaagatttcgacttcggtccactacaaccgcttcaagcaacggttgtggggcatcctttcgcatacgccgcgcctgctgcgtctctgccagaaggcgggcaacgccgtcaagcaggggctgctcaacaagagcaatctgttcgaaagtctcaatttccgctatttcggacccgtggacggccacaacctcaaggaattggtgcggacgcttcgcgcgctgcgcgatatcgaaggacccaaactgctgcacgtcatgaccgtaaagggcaagggctacctgcccgccgagcacaaccagcccgtctggcatgcgccggggcggttcaatcccgatacgggcgagcggatttcgtcgccgggttcggcgtcgcgctatcaggacgtgttcggcgagacgctcgtcgaacttgccgaacgcgacagccgcgtcgtgggcgtcacgcccgccatgccgtcgggctgctcgatgaatctgctgatgcaggccatgccgtcgcgctgtttcgacgtgggcatcgccgaggggcatgccgtgactttctcggcgggactcgccgccgcgggcatggtgcccttctgcaatatctattcgaccttcatgcagcgggcttacgacaatgtgatccacgacgtcgccattcaggaccttccggtggtgatgtgtctcgaccggggcggtctggtcggcgaggacggcgtgacgcatcacggagtcttcgacatggcggccttcggctgcgtgccgacactggcgatcgccgcgccgatggacgagctggaactgcgcggcatgatgtatacgggactgcagtacggccatcccttcatgatccgctatccccgcggctgcggcgaaggccggatgtggcgcggtgcgcggttcgaaaccctgcccgtgggccggggacgcaagctccgcgacggagcggatgtggcgctggtgaccgtcgggacggtcggcaacgccgccgcacgcgccgccgcacgcgccgccgaagaaggggtgagcgcagcccattacgacctgcgcttcgccaaacctctcgacgaggaactgctcctcgaagtgggtgcgaagttccgccgcgtggtgacggtcgaggacggcgccctgcgcggaggcgtcggcgaagccgtcgcggcatttttcaatgcacgcgggctggacgtttcggtgcgttcgctgggcatcggcgacgagtgggtcgaacacggaactccggctcagctctatgccctctgcggctatgacgaggagggtattctgaaagccctgctcgaaacgaaacaggcgccggtctgcgccgaataatatccggactccttacatcgtaaacacccagtcgtcggctttgctgagcgtcggattcagccggaaaccctcccactcgaacgctttcagctgctgcggatcgccgatgcggtttttgaggatatgacgggtcatttcgccgcggcacattttcgtatagaccacgacggttttcagccggtcgtcttcgcggatgcggaattcgggggtgacgacccgcacttcgcggcagatgcgcttccagtcgaacagccgcttcatctcactgctggccagattgaccagtatgccgtcgtcggccttgatcttctccagaaaggcgtccgtcagtttgtcctgccaatattcgaaaaccgtctgctcgccgtggccgggcagtacggcgtcgccttcgagccggtaggtgcggatcgcgtccagcgggcggagcagtccgtaaaggaacgaggtgatgttgaggtgcgcctgcgcatattcgaaatccccggccgtgaaatccgccggagcgatccgtttgaacacgatgcccgtgtaggccgccagcgccggcagcgccctctccgcatcgtcgtggaagcggctgtagcggagccggttcgtcgcggcgatccgatggtttacgcgcaggattttcgccagctcttcggtggagagcgtcgccagctgtccggccaactccccggcctgcgcgccgtaaaggggcgaagtggtgcggggtatcggcagggaggtgctttcggccatcgttttggcgcaggagaggagtatttgcatgatttgtcagttgttgtcgcccgtctgctccggaaagcgggtgaacgggacgaagggcgtcaccgtaaaatcggcggtgagcaggtagttgcggtgcggattttccatgtaaacgtttttgcagatgcggtaacgggcgtatacggacggatagacgcgcggcgcgagccgggccgtgaagccgtaggcgtactctttcgtctgccgggcgtcgccggggacgggaaattgcgggcggccgatgccgatcagcagggagttccatgcgtcggcgcccggcagtgtttcccaccggccgttttggaacctgcaaacggtgtagtccgtcccgaaatagacggtcgaatcgcctcggtagcggatcgtaagccgtacgcagtcggtctccgcagggtagaaggcgtattcggcgtccatgctcagtccgtcgggcggcggcgtgccttcgggggcgggcggatagggcgtcgtgtcgggatcgaacccttcgagccggatcagggggctgtcgtgcacgtaacggcggaagcgggctttcatcgccgagtcggcccggagcagacggacgcggacgatcccctcggtttcgtcggtcccggacgaccggacggcgtcggcgacgcttgcgatttccttgggcgcagatgtgcgggcggcgttcgcgattccgtcgaatgcttcgcgctccggtgtgcaggcggcgaatccccggtcggtcgtgcgcaggatgtcgagacggcgccacacgctgtcctgcagttcgcccagttcgcgcgccgtgggacggcgctgggcggtcgccgtacaaccgg

SEQ ID NO: 695 - DNA, 27279 bp, unidentified
  source 1..27279: mol_type = unassigned DNA
ttacaccggccggtcttcccagttccagtcgaaccgttctacatcctcctccacaagtttcgttcccatctgtacctcaatgagacgcaggtcagttatagcccttaccgcatgcctgacctccttgcggatgtgaatgacatcgccacgaattactttcctgacctcgccatcaagaaccagttctccctcaccattgataaatgtccacacctcgtccctatgccggtgtacctgataatcggtgtctttccctgccttgacagtcaacagcctggtctgagcctgatgtccgtcttcaaaaccagtgctgtcaatcaccttgtattccccccagctgcgctcctcgtacatgggacaatgctgcaacttgtcagcataatgcttgatgtgctcgctttgttccttgtccgaaatcagtataccgtcgcaagaagcggctatcaccatgttactggctccgatgcacatgacaggtatttccaactcgttgaccacatgggtattctccgacttctcatccatcaccacgttgccgatgcaacgctctttcagttcatcggtaagcgtattccacgtaccgaggtctttccattccccctcgtatggcaccaccactaccgatttggctttctccgccacctcgtagtcaaaactgattttgggcagttcctcatatcgggaacgcacctcttcaaaagtgttatatgcaagatacctcctcacaatgtcggtcatatacccgagacggaaagcgaacaccccgccgttccagaatgcaccctctgctataaacctttcagcggtggctacatccggtttctctgtgaaacgctccacttcgtatatcccgtccgtcttgccttgttttttaggtatcacatagccgtatttggcggacggataggtgggctttatccccatcaacacaaggtcggcgatattattctgtaccgctttgcccatttccgctatggtctggaaatacttgtcttccgtgtacggatcacatggcataacgatgaccgtttcttccctgtcgcatttcgtcactctctccagataggcggaagcaaggcagatggcaggaaaggtgtccctccggcaaggttcggtgacaacggtcacgtcctcgccgagctggttggtgatggcatccttttgagatgcgcttgtggcgatggttacaggacaggaaagccccgattccttgatttgccgtatgacacgttacaccatggattccatgcctccgtccggggaaggtagcagtctgaggaattgttttgaacgagcctcgttggaaagcggccacagccttttgccggaaccgcctgataaaagaatgatctgcatgattatgtcgtgattgttaccgttccgccctcatggggttgttcaagaaatcttcgtaggaaaggcgtattccttcctccaactctgttttgtatgtccatccgagagagattgctttcgatacgtcaagcagtttacggggcgtgccgtttggtttcgtggtgtcccacttgattgctccatcgtagccgatgacttttgccactaattcagtcagttcctttatggtcaattcctttcctgtacctgcattcaccgtttcgttgccactgtagttgttcatcaggaacacacacaggttagcaaggtcgtccacatagaggaactccctcaacgggctgccgtcaccccagcaagtcacctctttcaaccctgcctccttcgcctcgtggaagcggcggataagggcgggcagtacatggctgtgcgtgggatgatagttgtcgttcggcccgtacaggttagtgggcatcacgctgatgtagtccgtaccgtactgtcggttcaagaactcgcagtatttcagtccggaaatctttgccagagcgtatgcctcattggtcttctccaattccgaggtaagcaggcaggattcaggcataggttgtggagccatacgagggtagatacacgatgagccgaggaactccaacttcttgcatccgtttttccatgcggaatggataacgttcatctccaatatcatgttatcatacataaagtcggccaatgccgattggttggcgatgataccgcctactttagctgctgcaaggaaaacatattccggtttctcctccgcaaagaacttttccacggcttcctgccgtgtcaggtccagttccttgtgggtacgggtaatgatattcgtatatccctgccgttgcagctcacggacaatggcagaacccaccatgccccggtgtcccgccacatatatctttgcgttcttttccatcatttcacgattcctttctccagatattcggcgaggttggtgcgcacggtttccgaagcacgttccacggccaccttcgccatgtccgcatccgtcatgattttcacaagttgctcaaacgtggttctctgcggattccatcccaattcccgacgagctctcgacgggtcaccccaaaggttcaccacatcggtcggacggtaaaaatcgggcgacacctccacaagtaccctgccggtagccttgtcgatgcctttctcgttctctccctcaccctgccattcaagctcgatacccacattgaggaaagcaagagtggcgaactcacgcacagagtgctgctcgccggtggcaatcacaaagtcctcgggcgtgtcgtgctgcagaataagccacatgcactctacataatccttggcatagccccagtcgcggaggcttgacaggttgccgaggtaaagtttctcctgcttgccctgtgcgatgcgtgcggcggcaagcgttattttgcgtgtcacaaacgtctcgccacggcgttccgattcatggttgaacaggatgccagaacaacagaacatgttgtatgcctccctgtattccttcacaatccagaaaccgtactgtttcgccacggcataagggctgtagggatgaaatggtgtatcctcgttctgcggcacttcctctaccttgccgtaaagctcggaagtggaagcctggtagatgcggcaggtatcggtcaagtcgcattggcgcaccgcttccaagatgcgcagcacaccagtagcgtccacatccgccgtaaactcaggcgagtcaaaagagacctgcacatggctctgtgcggcaaggttgtatatttcattcggctttacctttttcactacttgcaggatgctcatcgagtcgccgaggtcggcataatgcaggtggaaattcggatgtccttccaaatgggcaatacgttcacggaaatccactgaagaacggcggatggtgccatgtacgtcataacctttctccaagaggaactcggcgaggaacgagccgtcttgacccgtaacgcctgtgattaatgctgttttcttcatgcttgtaaaaaataaattggagggtatcggaatatatgatagcacaataccctccaacgattagataatctactttcttaatctgtttagtaacgactcttaacctttattacttccacctgtatgttggcggttccaagttcttgtgatgacagacaccgttccgtattgttttccggaaacgctacgtcctaatgcggatgcggtgagcgtggtcacttcctgctgaccgctgatattcatggccgtacctacaggcagggtcacattgatgggataagtgccggttgccgttgtcacgcctgcacctgccgcacgtgccacaatctcaatcaggtaagaagtaatcttgcctgtaccggaagaagtgatgtccgtacctatcttataagaataggatgcggaagaaaccggcatgtcgccactaccgtacaggttgtcccattcgttaggcgtgaagctgagagcttccgaagtcgtagaagaagtgatggtggcggtacagagcaatgaataggaagtgaattggtctgccactactgtgacttttccgtctgcacctaccgtatagtccgcatccacccattgtccgttcacgtatttctgtgcggtgatggtagctgccatttccgaatccacatcatattccaatgttataggatttcggggagcggctgaaccatcggaacagcttactctcgttccaatcagcaaggcgctttctgtagctcttgtgctgacagcccgcacagcttttgttccggaagaacggcctgtaacttgttctgcctcttccgtggaataaatgggagtaacgataatttccgcacctgcatccacagcatcatccggagctgtcattgtcacctctatcgaaccttcttcattgcctttcaatgtctcggatgtaacgctgccgccggctgagccttcagcgtctgcgatgaatgacttaccggtattgctcaaagccacgttccacaccgggttgttactgtcgccattgcttacggtcacggttgtctccttggactccttgccgcttgctgatgccgtcaatgtataagtacctgcggcaacattctcgaatacgaacgtaccgtcagaagcggtagttgtggatgtcccgttcatggatacggttgctgagagaccctcgccgtcaattcctgtcacacgtccgctgatgctgtgtgtcacgtctactgtcggtggggttacattgctgtaatcgggatcatcgtcactgcaggaggtcgcaccgaaggtcagtgccagactgaggagtgcgagcactccaaatttaaactttttcatttccttaaaatttaaattgttaaattagacataaattgtattttcctttcgtttagaataggttagtttggaagcataagcctccggagaagtatttcccgtcctgcaagactacttgcaggaacagatgtttccacaacaggcagtctgcacctacgtttatctcgtttcctgtgtactctgcgatagcccgcaaattttggacgaacgaaggacggtaagtgataccacctacgaggccgttccatttgttgttatagtttctcttgaaatggcggtaagtcaaatgtacacccagctcatgtcgctttatatcaagatgtttactcattgctacataatagttgcagaaatactgactgttcccatcatcgcctcgtgctatttgttcatccgtcagtttatccttgtctcctgtgccatagaaatcattagctcctatggcaaccgaaggccaccaattgccttttttctcctgaatagggctaagtttgagtgagaaataccggtctttctgattgaacttcggtttttcacgcccctctgccaatgtcttttgcagagtaaacgtataactcgcttccatccaccagaaaggcgtgatgctcagataataatctgttgtgttgtattttgccccattatgggcaaatcctttgccgtcaggtgtaaattccttgttcaggaaatacatgccgatgcgtgcattcccttccttgttcatctccgcagaaggaacatggataagcccggatattccagtatagagctgggcacgaagtgtggttgcgcagatgcacagcaagccgagtaaaatatgtcttctcattttgcaccctcctttcttttctccacgaagtcgggaatcatcaagtcctgtccccaaggtaacaaatcgcggtcaaaccagccgtcacgttcgttttcttccgggtcagtcttgtacatcgtattggaatacggattggcctcaatgttataggtaagacggaaattggatgtcggacggaaattcacacgatgccggttgcgtttgtaaggcggtagcatgacgactaccttgaaacctccgttctctttcgctatattgctgtattcggcatacacacccacgctgacatgcctgaaatgtctgaatccttctcccaccaccccatagtcaccatagacaaaacggccgcctttggcactcagttgggtgttccaacgatgcagataaacctctgctccggccaaccccgtgaaacgccccatcttgctgcaattccatttgtaagccattgagcaatgccctgtcaatcctacctgtgcagtaaaagccagccaatcattggctataagcatacctttcaagtctatgccataccgttcagagccgaacagaccgcctgaggctttcagtttcagacggtttcctaccgccatctgcttggagagtgtagccatgtacagccgtacatatttgtaataatcaccatagtcattgtaaaccgggacatgaaccaatgcggcaacttcccatctgtgtcccatattccacttaaaacccggcgtcaagttaacaagcacgtcatacacccggttgttccagtaaatatccctgtagttaaagtcaacccccatgaaaatatctacagttccggctttctgctgagagaatcctgccaaggacaacaaaaaggacaaaccggacaagagtacttttttcctattccacatatcgttctctcctatatttacgcattatttctttcacaaacaatttgggtaatgtcaacaaaatcatgctacaccgttttatttgtttcttcggctccttgaatatcctgtgtacaaattccagatgccatctaatcatccattgtggtgcacgcttggtatccgtaccactatagaacttgaaggccgcacccaccgcaatcatcactcctcgtttcaagtgtggcttcaagaggctcataaatatctcctgcttcggagcacccaaagccacccatataatatcggcaccgtccgcctctatctttttggcaatactttcataatcgaaatcctctacagttttgtatggaagttctaagaaagtcatattgggcacgtctggattttccttcagcaaattgttctgcaagcctttcaaggtagcttgtgatgttcccatgaaaatcatccggtacttcctgttgcgaatgatgtccatgaaaatctggcttccgcaatattgttcataccgctttccgtaaatccaacgaatatagagaggtacataactgctgtcacagatagagaacattcccccgttcaccactttcaaatagtctgagttcctatttgccacatctaatatcacgccgtccgcgacacatatataatctgcccctttttcttttacctgtcgggcaatacatttgcttacgagctctttgtcgaactcgtaacggatattgaaatatgtattcatatttatgttttaatgccaatgattctgaaaaagccactaacaatacttcactacacgttaatgaaccatggctttatcccggttaacatctctcggattaaagaaccgggcttttcaattaatgaagtgccaagcagcgcattgtaaaaatcaatatactttttactttcgaggtaatccttacatttaagaatgcaatttctgtttgtatctgaatgttgattcaagctgttgccataaatcatgccattgtcaaatataatatttgagtcagatgtaagttcagattcagagattgagattccatttacaaaccgaattctaaaaggtacatttacaaatttattcaggttttgaacatacatctcaggatatagatatgttggtgctgatttaagcatcatgtcagccatatacgccatagctcttgtgataccgtgtatatagtttgatacggaattatatcctattgatttcaattgtaaagataaatcttcaccctcatgaacaatatcggtatagtactttctgaaatctattgctcctgaaatagctgacaaaggaaaaaactgctcgttttgtataaccatatttataggacaactcaagtatgccattctcactgtgttgtcccaagaattaaatatctctaaaggattattaaagaggacgtgtagagtctcatcattgcacaacaccgtattatatcccttttcatcgagatggaaaaaactttccagcctattccttggagcaagggctcgggatgtattcgttgtcggatctccacacaatccccagaacagcatgtatgcgataaatggataaacatgatatgggtttatcttattcctaaaacagaatctatagacatacgtaaacatggaagtatagtttgtatatccaagatagtcagtcctcccaatctccttaccttcgtttcttttcttttttcccaaagacatgaagttctcaaatgatttttcccgaataaaatcggcaattctttctccttcatctccatatttcagaactatttcagttgactgtattataaaagccaacgattccataaacgaacggacggaatagtctgtattataagaatccaactggaaattgtctttctcttcatccatttggatttgtaccaatgccggataaatcaaatatttgtcaaacagaggtaacttatctaattcatccgatggtacatcgttgaatgccgatatgttgtagaacgggacatcattctctgaaatgcctttatgccttaacagttccgatttcctttcaggtgtcaaacctaaccatcggttaaatggtaaaggcagatacttgtaacgcttggatgaatgtttccatgaatcgattgcaatgacagaaaacgataacgagaagattctttgaagccaatgagtcgttaataaaggtgcagttaagtagtcgtggaggtgtcttccttcatggatataggtggtgttgaacacaacctgttccaatgtattttgaaatttgtctgttgataaatccaaatcaaaattcggacttctgccattcaaataattaagaatggcgagcttcttctcctgtgtatcacaaatgatagtcgctcccggaaaattcagatcaaattcccccgtctttgacatcttgttctatgcttaattcggtttctatatcttccttcaactctggaattatcgcgtcaagattacctgcgtttatcacatacctttcattttcagtgattacagaaatttctgtcttgcaataatcgacaaaatccctgataacatcggttacaaatggagagaatacactaatcgcaatggaaatcaaccaactgttcgtttccgacagtttagcatcatacgatactgcgtcaacagctccttcgcttattattttatattcttcttccgcagagagtttgtctgccatgaattgtttcaatctatcaagattggaactgtttaactctatactgattcgcatattgaaaataattagttctaatatgattatattttatttcataaatcacttgcgttatttctatttgtgtgcgggggggggtaaactcctgttgtataaatagttacaattttcactaaaagagaaagaagatatgctaaaacaactgatatcgtaaagacaataattaccgccatccatgtaggcatataattcgcaagagaataatgccctaaacaaaatggatgatgtaccaaatatatttcaaacgaaatagttgagataaaagcaactgttttcgaaatatgttttctgttgaaaattataggtgcggcagcaatccaaagcatcgaatttattgcaattgcccaaaaaactaagagggaattttcgtgtagtccatattgaaatcctataatacttcctaaattgcagagcagcaatattacaactaagatgagtttcggcattctcctaatatacggaaatacaatatttcctttaaagaatacaagcggaaacagagacaacacgacagacggatagataaaatatctcgaatatgagcagagtgaagaaccacacacaaaccatccgattgtagagtataaccaaaaaaaatttgtccgtttgacaaaaacaaggaccaaagaatatagcgttattatcaaataggcccatactatacaactcatgaaccatagatggcctaattgaggaagcggagattgataaatacgagttgaaggaataaaccaatttaagaacagataatgccctacagcctgtttcaacgccaaatctcccaaactgcataatcctatgacagtaaaagcaacagtcaaataagtataataaatagggcaaagacgtttcattctcgatcttaggaacagccaaggagtagttgagattctttctctgtaatgttctcctaacaagtaagccgacagtaagagaaatacgcaaacatacgttccaccgaggtaatatcctaaagacgtgcttattccaaatccttgacatatgtggcacagcacaatcattattgctgaaaatgcccgcaaccaatcataactgtaatcacgactatccatttttttgtcctctgattatggttttgtatatatttaccatttgaatggctttgttttcccaagacaattcatgttgtctttccacgcaagcctttgacatctctgccaaacgattcctgtcatggtatagcatacggatttgactgccaaaatcaatgactgattgtcttgttgaagtcagtgcgattttgatccctacacgttcattgacagatgccgactgtccacaagtgtccaaacaaagaacaggaagacaatttgaaatagcttcaagtacaacatggggtgtgccttccatgatgcttgtaaacaacagcaagtcactttcacgcattaacttttgaacatcatcattcttaattactccgtgccagcaacacattgaatctattcctatgtttttagctaatcccttgtagtatgccacatcagcctcactaccactcccaacaatatgtaattccactttcatatcactcaatccagcgattgtcttaagggcaatattcagctgtttgcggaagtcgaacttgcctacccatagtattttaagtgcctcattctcttttgagacatgctcataataacctttgattttacaccccgtttcattaatcaaaacaacatctttatgataatatcgttcgattttttcctttacacctttcaccgccgcaaccaatgcacttgcctttccgattgccttatgtactcttttgctatgtcttgtctgattattattaaggcaattcttcagataggtcattgatttttgtttcaatgaagctccttccaaataactaatgggcatcaattccattccaccaatcggtccccaaacaaaaggtttctcttgtattttccaaagaaaaccaggttcacgaaaaccaatcatgtttaactggtgaagtatatctatcggatgttccatacaaattttccgagccatttccaatgtcttcagttgccatttcctataataccaataaaatctccagtcaccttgattccagcacatcttacggactttttcaggaacaggattgtagtagaaatggagatgctctttataaggatggacaagtacagccttttcaatctcctctttccattctccttctgttataataaacagattgcaatatgaagccaaattggaaatccagttccatgccattcccggctcactgccccaattaggactgcaagcatatgcgtttattaaaatgtttatcatctttttatacttgaatggttatccaatcttcgggaattatctctgaccatccttccgagttcatccatcgtgatggggctataactatcttgtcaggattttgattgagccaagcgccccaccatgaaaaagaagagtttgcgataatattgtgcttgcacaggctcatcagttgcatatcccgaaaactctctttccctttgttccagttaacaaaccgagtatctgcattccctataattgcgccaaactgttccatgcaccagtctatgtcatcggaaaagatggcaaataactccggagaggaagactcctgaatgtatgctattgcctttttgtaatagtcaatggtacatatcccggaggtattactgattttcagataatctccacggcgtatatggacagctatcgaacgcctttgctgtaattctttgcttaatgtttcattttgtgagttggaagtaaacgatggaaatgcaaacgctttcaatatctcgttgcggatagaacggaagtaacgctcagtttgccaatagcctatcaaataccggtctcttgtgtcagtgagaacactttcatcataagccatacttttccattcgtatttcatagtactccttttggggagcagacggcataattgccaaatgcgataattaagataaggataggctaccttcataacctcactaatggttgcttctggtatctcgacattaaaaattcgtttcagctcatacccgttatggatgggataaccacaaaaggcacgtgggtcaatgcggacctccgacatatctttacattggtattgtaatgccaacgccaatgcgtattggaacatctggttgccaagacctcccaatatatttactattttcattctttttggctcttatagtgaatcatcacacccaaataatcgagaatattcatgtcgcagacgattataggcagattcataagagtataactctttagccctacaatatatgttcctgctatattcgtcaattcttttttcctcgaataattggacgattatatttgagaatgcttcctttgacattttattcacaatcagttcctcacaattaatcacgtttttattgaacccttgatctgtcgctattggaattatgccccatgtcatggcttcagtcaaagcatttgaatgtccttctccgttttcctttgtaggaaatatatagaagtgcttatctgccagatattgtttcaatacatcatgaggacatctggttttcaatgtgatagaactattgaacggactattgacaaccctgttttttattcggttgaaatattcttcgctttccggatttcctattatcgtcaatgtaactacagaatctattcgagtagcgacatcctcaaacaagtcaatgattaactcgatatttttagtccgggacaatcgaccgaaataaatgaggtttatggattccttgggcttggaaggatattcttttggcgagaaatcatgttccacatagtttggataataatagaaatctttatgtaggtctattcccaaaatcaaagacctgttatcctctccttgtgaaaatatgcagtctgccttacgaaccgattgcacaaaactccatttatataatttgctaccggaatggtaatgctctataatgccaccgccccttagttcatacacagtcttgtaacctaataattttgatatggtaataagaacaaaagtccaataaaccatactgcccgaaaagcctgcaatatgaacgatgctattctttcgtttccctttaagcaagatgaacagaaatgtacatagatttgcgaagatatctaaaaacttatgggaaagggcaagaatggaagtcccctcgtttcgagcatatttaggaatggccaccacattataaccaatctgtttcagaagtcctaaggtacggcgattgccgacttcaccaccgccaaatgcaggttgggatatatcgcctaatgtagcgtaaaaaaagattgtatgattattcattttgatataatttttcgacaggggctaaatcaatcggagaatccttaaacagatgctgttcatgtaataagacatcagaaaatttcgggaatcgcagaccgattattttagcaggaacacccccaactatagtatatggcaaaacggatttgttacacaatgcaccggcagcaacaatagaacctcgtcctatggttgttccttttagaatggtcacattggttcctatccaaacatcatcctccactataacatcctcatcatcttccgtttttttgtctgaaagagtataatcatataggaatttgcatggaatgttatatctgtgattaccgcctcgaatagtcacatgtggaccaaatctgactttgttacctatgtgtataaatgcaattgatgcgatgaaagaagcgtgcggcccgatttgaacatcattgccaatggtgatatgccgataaataaaatctgaatttaaagggttgaaactgacattcttgccacaatgaagaaatctgacttgatttgcctttctcagtaaacagacaaataccgcatagcttaatgaagagagccggtcaattacccccaggtcgtccgagaactccgtttttcagattttcaactttcagtttataagctgctttgcttgtatcagaagcttgactacctaaaaataggccattattgcctgtgaaaaagcgcgaattatcaagtgaacttacagattgtaagatttcagacttgtgacctatagttttcggacagcctcccccagatttatgaataacaaacttattttaatcatatttgtattttagaattttagctggtacacctcctacaactacattgtcgggaatatcattcagtactaccgcaccggcagcaatggtaacattatcgcctattgtcactgggccaagtattgtcgcccctgtactgatgtagcaatcatctccaattctgatagtggaatccttgtcggtaggatgttttttcccgaaaagcaccatgggtaatattgtacaattttttcctgcttgaaccatgcagcctattcgtctgaatcccggatgcataaggagtaaaccggggcccatagtattggggaatataaccatattggtttttacctgagaatgtctgtagagaattttgtaataaaacaaaagcggcaatctccaccaccttggacagttcatttgaaattccaacttgcggagaagccgtatatggcgatgcactaaatagctgtcattatatgtcagcttcttaatccattcatgcttcatgccattaacctttcggtctgcgtccaaatataatttaagatccgacttcgattgtatcatcttgcatatcttctaattcatcctctttttcggtttccactttggtgtagtcatgcatgataatagccaatgtcatggcgattggcataacagaaatatcccagttcccatggctgcccgaacatttcacgataaagagaatgaaaatgattaatagaatatttttatactgactcaaaactgaattgatttttttatttgcactaattaatgagacaagtgtcttaataaaaaggaataagcctcctataccatatatatacatatagtcaagccatccgttgtgagataatattgccataccataagttcgttttaataaagattgaactgaaccatatccgttcccaaacaaaatatatagcaagtcattatcccaaaaatgcctccaaataattgcccaaaatatttgtcgtccgctgccaacagatccgctacgcatatcatattcatgtctggcaagaaggttattaatcgctaatgtggcaatcggaatgatggcaatagcaaaaagaatgcttaaaatagctatatcgcttttctttataccctgtcgtaaataactaaaaccaaaaggaagcgttgctattgcgaccaatgcagccgtccgttgcccacaataaattgttcctaaaaatagtataatatacgtgtatagcctcaaacgttttattggaagtatcaaagtaaaaggtaaacaacactcaagaataaatccagcatgagaatcgtgtatgcctcctcttctcatatcaacggcataccccataaaaagatcttgccaaagatgataaaaggcaaagatgatttgcattaaaaagataaaatagatattacgttttgccatttgttcatctgtgtcaagatgaatataaagtgtgaacataaagagaatggacataaaagctgtcaaatagccaagaaaattattagcaatatcagcaaggctttctgagaaaaagacatatacaaatcccatgagcatcaaagcaaaaaatggctgaaacaatttcacttgaagcagtattctacttttatttatcgcaatccatagacaatatatacaaataatacccatagttatctgtggaaagattcgataaccttgaagagaatcatctcgtgcaggaaacatcattgttaagatataatatgccaagacgaagaaagtaagtaggtttgatggtgataatttcattattatatgtgattatcagaaaatgacattctttactgttctattaaactaattggatagcagctgattcaattctgcacaccattcatccaatattttatccgtatcgaaattatgtctggagctgttaattgcttgtacagacatttcatctaatttcgcatcatgccccattaaatcatcgactgtctttatatattcatctaaatcgttgctttttacaatagttccattagaaccattgataatatcgtgtaaagccgcaaagttatcaaatgcgacaggtacgcatccaaaactttgggcttctatcaaagtcatgccaaatccttcccagatggaagtcatgagaaagattttactgtctgaataaaattgttctactttattagaccccccaataaaatctactctctctatttttttctttcttacataatctttgtaatattctaaatcctttccttttccaacgatgaccaaacgccagtttttatatttcctaaataaaatctcccacacttttaggatattactgatacgtttttgctcctcctccatacgtgccacaaccagtaatgtatcatttttcttatctgctttgtacttttggaaaaagcaaggattatttataccaatcaattttgagctgtcattgggctttacaatatttataaaaacaggtataaatcttttggacagtagaacatatctgtcacttattgcatagacccgtttcatttcctctataaaagcattccctataatattgaagtaaattgttttgaagatatcttttatatatatgcgaaatggtgttagtttaaaactatttttgttcgttgtcctgtccggattggcgtgtaggcaggttacaattttcacatgaaatctttctttaatttctcgatacacattacacatcttgacagaataaacgttctgacaaaaaagtatatctatattgtttgtttcaataaaagatgaaaatacttccaaaatattttgtagggggctgttcatattaaaaatcaattttctttcattggaaatcaaattggtatctgacatcttttcatggaatgcataccaggtattaaaccctttttcatgtagtccttctcccaatatataagaaacacgttgaacacctccgtcagtaggattgagctttcgctcaataaataatatgttacagttcatgagttcaatatcttattcgttacgttttaggctacttttggctaaaacggttatataatgattttacaagtatcttgggatatttgtcgctcaaatacatgatgcaaaaactacatatcgcaaaaagaatcgcagtcattagtccttgtaagaccagttgtgtataggaaaccacattatattctccaaaaaatatttttatgagagaacaacatagaaatgaagaaacacataagactgtgagatatttcagatagcgaaatatgtattctcttatgttttccttgaatccttttttataaaggaaatagggcttccaacaatatacaatcactatcaaacttgtggaaacgcccagtagaatccctgttaatccccaaaaataaccgaacaagatggataaacctaaatttagagcagcctcaataaggggtgcccaaatatcttggtacaatccgtatgcagacaagaacatgtcattcgttcgcgtcaacgatataaacatatttaatatcagtacaagaaaagcggattgtggaataataaaatccttacctacccaaagactgataaaaggatctcctataaagtataacgtaaaacagattgttgccgcaatccatatacgtatgaatgttattttccaaaacacattttttattttgtacgaatttccttcagctaccaaattaccaacacctgcattgatgctattcgacaaggcgttcattaacgatgtaatccccattacaatcaacatatagttgccataagaggcaactagagagagagaagcgtatgcgtatatgataagagggcttgtttgtgtcatcacaaatcctcctattttatgaaagaacaactgctttgtctttgttataatttgcggatatttctctcgtaaaacagaacctaattttatgcttggatgtaaccaaggatattctttttttatacttttatttaatgctgctgatataataaacgaagataatatttctatgataatccaactttcataaccgtattttaaaaaacgaatggccaatatctgaatcaacactttaatggccattccaccttttacacaaaaggttactttatactctttttgatctgcggacaacactatctgtctgtaattagcaaagtaacctaataatgaacttgtcaacaaggccataaaagaaccataagtgtaccataatggcaactgagcttttacaaaaatgaatgggaaaaatagcatcagtatcaaactgccaacgattacgaaataagcaattcttcgatacagccaaccttgtattgatactatgtcatttatctcgtttatattattattgaaaatgggcttgtaaagattataagcaacagaggcgcctattcctaattcggcaatatttaaaatgcccaacaaattctgagctgttgtattcaatccaagaacctcactcccaagataatcaagaaaaatctttcttgaaaagaattgaagtacaaggttgatgcaatagaatacgagagcaatctttgcattatgaaaactttgggaagtacgcgaaatcatacagagaaaaagttcgtcattctattattatacgccatgatgttaatatttaaattaagtaatttgttttattgttctgtatttttatattgactattgcgatgtttaaccgaattggtataccattctgtgaaagaacgaagtcccaaacgaagtgaagtcgctggcctaaacccaaaatcttcttccagcggtgtagtatctgcatacgtcacaggtacatcaccggcctgcatcggaaccaattccttgtgattttcaaagtcataatctttcgataacaccccggcacgtataagttcttcttgtaggatggtgacaaaatctagaagattctcaggattattgttgcctatattgtaaactttatatggtggaactggtaggccatcttctccatttcgtttttccggtgcatgttgcatcacccgtacgactccttctacaatgtcatcaatataagtaaagtcacgtttgcaattgccataattgaatatcttgatggtttcgcctctcactaatttgtccgtaaatccgaaataagccatatcaggccgaccagccggaccataaaccgtaaagaaacgcaatcctgtacttggaatgttgtacagtttggaataggcatgtgccatcagttcgttgcttttcttggtggcggcataaaggctgacaggattgtccaccttgtcatcggtagagtaaggtactttcttgttgctgccatatacactgcttgaactggcatacaccaaatgctccacactgtgatgacgacaagcctccaaaatattataaaaacctatcaaattgctttcgatataagcatccggattggtaatgctgtatcggactccagcctgtgcggcaaggttcactaccacttgcggatgatattcatcaaaagttttttctacaagttgcttgtctgcgattgaacctttaatgaatacaaaattcttgctttgggagagctgcttgagacgttcttctttaagacgcacatcgtaatagtcgttcatattgtctatgccgacaactttggctgtatcaatatccttcagcaatcttttcgccaaattactaccgatgaatccagaaacacctgtaataagaatagtttttccaaccaaactaatattatatttaagcataattattgaaccgtttctttggtaatccgatagcaataaacatagatagaatcatcatttccaccactggctccccctttaaaacctgaaatagctgttaaaacacgttccgcggttctggcctctgtgatatttttcgcttttaagacagctacacaatcttgttctgcaacattgtgttcttgcaaacgacgtgctaaattatccgtgattccgacataaaagtcagacgtttcaaggattccaattctttttttgatactggaaacaatagaaacagcatcatacatttcttctttcatttttattttttatttttaatctcttctaaaaatatcccttgtataaaccttttcttttacatcgtccaagcaaacatcatagcggttggcaatgatggcatggctttgagccttgaaagcatccatatcgttcaccaccttgctgccaaagaacgtgctgccgttttccaatgtcggctcatagataaccacttccgcacctttcgccttgatgcgtttcatcacgccttgtatggcagactgccggaaattgtccgaattggatttcatcgttaaacgatagaccccaatcacgcatccatgctctttattggcatcgtagctgctgttatctgcgtaataatcagtcatttgcaaaaccgcatcggcaatgtaatccttgcgggtacggttgctttccacaatcgcctgaattaagttttcaggaacatcggcatagttagccaacagttgcttggtgtctttgggtaaacaatatcctccgtaaccaaaactggggttattataatgagtgccaatacgaggatctaaaccaaccccttcaataatagctttggaatccaagccttttacttcagcgtatgtgtcaagctcgttgaagtaggatacacgcaatgcaaggtaggtattggcaaaaagcttcacggcttcggcctctttcatccccatgaaaagcgtgtcgatgtcctgcttgatagccccttcctgcaagaatgctgcgaatgtttttgcggcctccttcattctttcaacattggtcacggacttgatggcctcgttctcctccgtaaattccggacgttcgataatctttggatagcccacaatgatgcggctggggtagagattgtcatacaaggccttgctctctcgcaggaattccggtgaaaacagcaggttgaattgtttgacacccttattagcgtatttcaggtaaagacttcgcgtgtaaccaacagggatagtactcttaatgaccatcacagcatccggattcacctccaacaccaagtcgatcacttcctccacatgggtcgtatcgaaatagttcttcaccggatcatagttcgtgggagcggctatcacaacgaagtccgcatccttgtaagctgttgctccgtcaagggtagctgtcaggttcagcggcttttccaccaaatacttttcgatatagtcatcctgtatgggtgacaccctatggtttatcttctctactttatcgggaataacatctacagccgtcacctgatggtactgtgccaacaatgtggcaatgctcattccaacgtaaccggttccggccacagcaattttcaaatcattcataatatcaatgtttttttattttatagacttttcctaatttgcaaatctgtacaggtatcccatcagtgctttttttatcgcaatcattatttgcataaatcaggaatgcagcaccttcatggctagtttgttggaaatgttgctcaaatcctgcactattttccagaaataagcaatagatatgaatacggaattgctttgcctgttttatataatcatgagataagataaagttacaatggaatgaatcccaaatttgattatccctctgctctgaaatttcatttacgacattaaagctataatcatctaaacttaaatatcctttggaagaaaggtctatcttagacaattggacgtattgtttactgtcttgatgggcttcattcccccctacgatgcgtttcatatatcctccatccgtattaggaactgctttcatttttgttgagatgtaaatcgaaacattagtaaccccggctttcccttcattgtaaatactgaaaggtaatggtatctcatatttttgcagcaggcttttttcaaatacaaaatagagactcacctcttctgcatttttcaagggataattgcctatctggacaatgacttccggggatgacgaagtccactccttgatgaccggatatgcacatataatggttgcaactgttgcaaaaatccctatccattcttttatcttatttgcacatattttcatcgaagtatattctattttcattgaagtatatatctctcccgaggaagggcagagttctatgatgaatttcatgcaataggcttcgatgcctgatgaagtcgttttcgttgaccaacgaaaccgttttcattggctcatgaagccgctttcgttttttctcctatctacacgctttcatctccgcttccaatcttccaattggtgtattatccaaatgtcagggagaacaggattttccgtccattcttgatggagcgcatggaggcggatgaaatcctcctgatagcggtatatgccgaacgtggcggtacggaatatgtttcccgattaccacaaatcggctttgcacatttgttcatggtcggcttgcggtattttttgtttgtatatggttgactccaaaacggcaaggctgtgagtgtcgctgcctgtcaggtcgtaggaaccgtttttcagtagccatccggctttcttccttgcttctgttccgtatacgccggtcaacgagaaaaggtttaactggaacttcacgttcagctctttcagttggcggtagtcgccctcgtccatataattgtaccgttccggatgcgccaagaccggtgtatatcctttcgacttgatgcggagcaggatgttgctcagtcccatcggtgggttgaagtaggaagtctccaccaacaggtgtttcccgttcttgcccaacggcagcaggtcactcttcgccaagcgttcttcaaagagattgtcgagcatattctcggaagcgagatgcagtgcgatgtttccttgataaacagttttcagttcctcgaaacgggctttcagagcggatgtcgtatttggcatatcctccatgatatgcggagtcagccaaacctcatttacacccaactgttcatagagggataggatttgcaggctctcttccattgtctgcacgccgtcatccacttcggggagcaggtggcagtgccagtcggtgaatccccggaagattccgctgtcggcaaggctgatacgttttctgaaaggccacatctttccgcttactcttctttcgtatatccggcatatccataatggtagccgtacttatacccatatttatatccgtacttgtaaccgtatcgtccgttgcctccgtctgtaccgttcaggatgagcgacatgttcctgtacttcttctcggtgtagaacctctcaatttccggcaacatgccgcggtcgagcagtccggcacggacaatgaacagggtgatatccgccagcttgttgatgatggcggcgtcggccacgatttccaccggcgggcagtcgatgaagatatagtcatattccttgcgcaggtcgtttaccagtcgctccaaccgttctgcgaacagcagttcggtggggttgggtggtatcatgcctacggggatgatgtccaattggccgttctccggcttgcagacgatttctttccaggtcttcgtctctccgataaggtaattggagatgccttctttcggtctgcccacatactcgctgagcgagcctttgcgcaggtcgaggtcgatggcaactaccttctttcccttgatggcgaggctggtggcgaggttgaacgtgatgaatgtcttgccgctgcccggattggccgaggtgagcatgatgacattcgactcccgttccttacccacgacaaactccagattggtgcgtaccacacggaatgcctcgttgatgacattgcgactcttctccttgaccacgattgcacacttattctcttttgtctttgtcttgcggtcgtaccatctgcccttcttgcggaaagcaagcggtatctcacccacgaaggggacggtcatattctccaagtccttacgaccacggacaacggtgttcatgttctcacggatgaagatgatgaccaccggaatgagcagtcccaaagcgaaagccaccagaaggatatttttctttaccggtgcggtgggtatcatgcttccgcccggcatggtgatgatgcgggtattgtaggcagtgaatgcctgcgacagttcgttctcctcacgtttctgcagaaggtaaaggtaaagcgactccttcaccttctgctgtcgttctaccgagagcaggtacttggcctgctgcgggttggaggcgatctgcgaggtggcctgcccgctgtaactccgctggctccttatctgggcgttcagggtaaccaactggttgtcgatggaggtgagcaacgcgctccgcatggcggagagggaagcgtccatctccaccaccaacgggttcttctcgctactgtgcgacacgaggctgttgcgctccagcagtttgctgttgtactcgctgatctgcgtggcgatgcccggattgtctatgccggaattggcgggtagcaactgggagtcgttactcttgtttgtcaggtagttgcgtatataacgtgccatgtagacctggttgtccagttccttgatggcggcattggcctcactcgcctgcgccatgtacatgccggcggcggcctgtacatcgggcagcaggtgctcgctcttataggaggagatgtcgtcgtccacattgcccaattcgccctcaatgactcccaaccgtccgtcgatgaacttcgacgtactgatggctatctggttcttgtcccgcacccagttctcgttatagactgctatcagggtgttcagcacatcttccgcccgttgggtggagacatccttgaacgagaggctgatgatgttggatttctcgtcggtctgcgacacgaccaggccggcactgtaggcggaagcggcactgccaaagggcaagcgtgacacatacaattgggtatccgtgccatccgtgtagtaagaggtcggggtgatgacaatcttcccgatgtcgcttggaagggtgtcgttcagatttcctctcagttccgtttcgcagatgctctcaccgttccgctcaatgtcggataaagtgatcttgccgccttccgacagttgcaaggtgaacgtggcggattcgttctcgggcaggtcgctgatactgacgttgacgggaagctgccgtccgtagaccgtctgacggtggaaacgtccgggtactttgtaatccatgtccagatgcaggcgggataccacctcgcgcatcaggtcgggtgactgcaaggtgcccatctcgttgttcacgttggtattggaggtgaacagcccgaagtcggcgaacgtttccatgtcaccggatgcggacttccctttggaatcgtccttgatgaggatggatgcggagcgggtgtacacgggaggtgtggtgagcaggtaccagacggtggtgccaaggcacaccgccaatgacattatgaaccagtgccatttgccgaggcagaggtaaaacaaatcctgtatgcggataaaatcctgcggattttgtgcggaaatatttctttgtacagttgccatggtcgggcttatttagcgattaatacggcgatggaagtcagcagggatgccaatgaaatccagaacgaggtgctgcggacgttattgccgttcaccgtggactgccgtgccttggtatcattgggctctacatacaccacgtcgttctgttgcaggtaataggccggcgaggagtagaggtggtcggcggagcagaggttgatgccatagacacgctgtttcccctcttccgtgcgcaataccaataccttctcacgcttgccataaatggtcaggtccccagcctggctcaatgcgtcaagaatggtgaggtgatccttgtcaatgttgtaacgcccggggcggttcacctcgcccatgacatcaacgctcaggttcatgaactccaccgtcaccaccggatctttgatgaggtcatgtgattgcagctccttctttatataggcggccatctcctcacgggtcatgccctgcacgtggagcgctcccagtacgggaaactcaatgtcgcccttggagtccaccgtgtagccggagactccccggcttgtacccgatgacgtttcctgtccaatctgttgggacacgatgggcaggttgaacaggttggtcagcctcagatcctggctattgaccagaatggataacttgtctttcggttggattttgatctccgccggtacggcaagtgtcagttcgctttctccgggatgaaggtcctggaaataggagatttgtcggggcgtggagcatgagcctaagaccaggacggatgccgccacaaggataatcttgtaaaatttcattgtattcggtaagaactatagttttttgtaggttttctgtattttccgggtcagccatatattcgccgctgtccataccaggatgtctgcaagcaggagcggtgtcacgctgacatatgttgacagcaggatgttgcatagggtgaaaagcaccgatacggacacgatggttatcattgccgtacgctgccgcatcccgatggcgagcagcttgtggtggatatggttcttgtccggcaggaacgggttcttcccgttgcgtacccggtggagatagacacgcaccacgtcgaagcaggggatgatgaggggcgagtaagccagcacgaacacgttgggcaggcttgccgatgtgtcatccggaaagcaacggcaaactctcaggctgaggatgcagagcatcatgccgatggtcaggctgcccgtgtcgcccatgaaaatctttttcccccggttcacgtcgccgaacacattataataaaagaacggcacgagcacaccgagagtggcaaaggcgagcatggcgtagatatactcatgagccatgaggaatatcatcccgtagaagagcatcgccacaccgcacagtccggaagccagcccgtcaataccgtctatcaggttgatggcattgatgatgaacaccacggcaagtac

SEQ ID NO: 696 - DNA, 11749 bp, unidentified
  source 1..11749: mol_type = unassigned DNA
ctaatagcttccattttccgtttcccctttcctgataaactgttctacaacttcctgcgtaagcagccattcctcacatttttcctgatagtaagcacgccctttgccggtgatccggtagtaggtacggcgtttgccggttgcagtgttctgatcctgaaaagatgtgatatagccatttttctccatacgtgtaaacgcagaatagagcgtggtctccttgataatatatttttcatgggagagcgttttgatctgtctggagatttcataaccataggatggctgatccagcagaagataaagaatcatggtgtcattgtaaccacggataacatcactgctgattgccatatgcatacctccttactgtatctgtcgtatttcgtctgtcgttgctacgatagatgtactacgtctgatgaagtaaatataacagaatagaggaaacgcgtcaagtgaaaaataaaaaaaccccatgaataaatcatggggaaggtgattacggttatgctattttttcccggcagcaagttttctgcggaattcctgcgttaattgtcggagtttttcatccggtacaaattgctttagggtttcttcatccatggcaacacggttatccatggttttcatgatgtcggtcacctgcatttcctgataaacgtttttgtcgctcaggtcgtagatctgattgtcagaaaggcgcaggacaaccggacgcataaaatcacgggtgttttctataagaacaatgcctttatcacctgtggaaagatcaacactggcggcctttggaacaatatgaatacactctgcaagtgctgtgacaagcaccggaagaaacttctttgggtattttttgaaatactgcatggcggcaatttccgacatcggttcatgtccgctgttcatggcagtcatccggtcaaaccagtcggcgatgcgcagaatggatgccatttcctgtaattcctgatccggagcggttgcgagtttttccaggtggtcttcatatacataggtctgcatcagagccagtgcgcgtggaaaaaagtcaaaatcattccggtacatggaaagcggaacgagtcctttttccagagaaagctggatgacatcctgatcggatgaggacaggtcgttcattcctttttccagaatattccgcggaacattccggtatccattgtcataaagaagggcagccgtggtcagtatacggagtttttccttcggtagtctcagatgggcgcccatcatggttacaagtattgcggtgctgatcgcatgcttgtacatgaaatcatcactgctgcgcagattctggttaaaattcacacggtgttttaaagacccgtagtgggaaaggatatcttccagaaataccgggtatttttcgagttttctgcgctcggtaatgcagtttaacacttcccggagacggaaaatgtataccgtctgtaactgctcaaactccagatcttcacgggaaagcggaggaagcggttcggccggctcgagaatgtagacaccgatcagaccgaaattttttgcactggcaattcccggcgcggtgagtgcggaattgcgctcataaagcagcacaccttttttattgtaaattggtttggcaagacgcatgcctgcctttaagtcttctgttcttacaaatttcatatcacatgatcccccgtttggattcccctcagtattgcttgaaatataccataaatataccatgaaacagagccggttgcaataaatgaagaattttttatgaacaacgtaggttttcattgattttgtgcggaaaatgtggtattatagacattgttaaaaaattaacagcatcattgggtgcgagtttgatttaaaggagaacgaagaatggcaaagaaagttgtattagcaggtgcttgccgtacagcaatcggcaagatgggtggagcattaagcaatactccagcagcagatttaggtgcaattgtaattaaagaagctttaaacagagcaggtgttaagccggagatggttgacgaagttaagatgggttgtgtaatccaggcagctcagggacagaacgtagctcgtcaggcttccatcaaggctggtttaccgatcgaagttccggcaatcacaatcaacgttgtttgtggatccggtcttaaatgtgtaaacgatgctgcaacaatgatcatggccggtgaggctgatatcgttgtagcaggtggtatggagaacatgtctatggctccttacgctatgacaaaggctcgtttcggatacagaatgaacaatgcaacaatcattgatacaatggttaacgatgcattaacagatgcattcaaccactaccatatgatgatcactgctgagaacgtatgtgacaagtacggtattacaagagaagaacttgatgagttctctgcaaacagccagcagaagtgcgaggcagctgtcgcagcaggcaagtttgatgacgagatcgttccggtacctgtaaaggttaagaaggaaatggttgatttcgtaaaggatgagggacctcgtccaggaacaacagtcgagactctttccaagttacgttgctgctcaggtaaggaaggcggactggttacagctggtaatgcttccggaatcaacgatggtgcagcagcaatcgttgttatgagtgaagagaaggctaaggaacttggtgttaagcctatggctacatgggtggctggagcactcggtggagttgatcctgcaatcatgggtgttggtcctgttgcttctacaaagaaagttcttgcaaagaccggtctttctatcgatgatttcgatctgatcgaggctaacgaggcatttgctgcccagtctatcgcagttgcaagagacttaaagttcgatatgagcaaggtaaacgtaaacggtggtgcaattgcacttggtcatccggtaggagcttctggatgccgtatccttgttacactgcttcatgagatgcagaagcgtggatctaacagaggtcttgctacactttgcatcggtggtggaatgggatgttctacaatcgttgagaaatactaatttttttgccagataagatacatagagggggtgcgctgcatccccttgaaatgtgaatatatttattatttaggaggaactaaaatgaaggttggagttatcggtgctggtacaatgggccagggaatcgctaaggcattcgcacaggttgacggatatgaagtagcactctgcgatatcaagcaggagtgggctgaaggcggaaaagacaagattgcaaaaggatatgcaagacttgttgcaaaagagaaaatgacacaggagaaggttgacggcattcttgccaagatcactccaggcttaaaagaagacctttgcaaagactgcgacctgatcgttgaggctgctttcgaggatatgaatgtaaagaagactacatttgctgagttagacaagattgctaagccagagtgtatcttcgcttccaatacttcttccctttctatcacagagatcggaaacggacttacccgtccaatgatcggtatgcatttcttcaatcctgctgaccgtatgaagttagtagaagttatcgctggtgtaaatactcctgctgagactgttgaagcaatcaagaagatcgctgtagagatcggaaagactccggtacaggtaaatgaggctgctggtttcgtagtaaaccgtatcttaatcccaatgatcaacgaagctgctttcatcaagatggaaggtgtttccgatatcgctggtattgatgcagctatgaagctgggtgcgaaccatccaatgggacctttagagttaggtgatttcattggtcttgatatctgccttgcaatcatggatgtactttacaacgagacaggtgacagcaagtaccgtgcatgcccactcatccgtaagatggttcgcggtggtaaccttggtgcaaagtctggtaagggattctacatctacaatgcagaccgcacaaagacacctgtagacgcacagtagaaaagtataaataaaaataaatcataattaaggagtgttaaaatcatggattttactttagacaagaaacatgagatggctcgcggtcttttcagagacttcgctgagacagaagtaaaacctcttgcacaggagacagatgagacagagcagttcccggctgaaactgttgcaaagatggcaaaatacggattcatgggaattccggttccaaaggagtacggcggacagggatgtgatcctctgacatacgttacatgtgttgaggagttatccaaagtttgtgcaactaccggtgttatcgtatctgcacatacttctctttgtatcgatccaatcatgacattcggtaccgaagagcagaagaagaaatatgtagtaccgcttgcaaagggcgagaagctcggtgcttttggtcttactgagccaggcgctggtacagacgcacagggctgccagacaaaggctgtattagatggtgatgagtgggttttaaacggatctaagtgtttcatcacaaacggtaaggttgcagatgtttacatcgtaatcgcaatcacaagcattaccgaggacaagagaggaagaaagaagaaaaacttctccgcatttatcgtagagaagggtgctcctggattctccttcggtacaaaggaaaagaagatgggtatccgtggatcttctacatacgagctgatcttcgaggactgcagaattccaaaggatgcattactcggtcaggaaggaagaggtttcccaatcgcaatgcacacactcgatggtggacgtatcggtatcgctgctcaggcacttggtattgcagaaggtgctttggatcgttgtatcgagtacacaaaggaaagaaagcagtttggccgttctatcgcacagcagcagaatacacagttcaagcttgctgatatggctgcaagaatcgaagctgctcagcttcttgtttacaaggctgccatggctaaggctacacagaaggtttattctgtagaagctgccaaggctaaattattcgcagcagagaccgctatggctgttacaacagaagttgtccagttattcggtggatacggatatatccgtgagtacgacgtagagcgtatgatgcgcgatgccaagatcacagagatctacgaaggaacttccgaagttcagcgtatggttatttctgggtcattattaagataatcgtacagttgtatcacaaagattgaagaaaaggagataaataatacatgaatatcgtagtatgtattaaacaggttccggatacaaagggcggcgtaaagttcaacgcagacggaacactcgatagagctgcaatgcttgctatcatgaacccagatgacaaagctggtcttgaggcagcacttagaattaaggatcagaacggtgcaaaggttactgttcttaccatgggacttccaaaggcagatgctgttcttcgtgaggctatggctatgggagctgacgatgctattcttgttaccgacagagtattaggtggagctgatacatgggctacttccacaacaatcgccggtgcacttcgtaacttagattatgatctgattatcacaggacgtcaggctatcgatggtgataccgcacaggtaggaccacagatcgctgagcatcttggacttccggtaatctcttatgctgaggatatcaaggttgagggagattccgtaatcgttaagcgtcagtatgaggacagatatcatgaagttaaggctaaaatgccttgcctgatcactgctctttctgagttaaacgagccaagatatatgactccgggtggaattttcgatgcgtgtgacaaagaagttaccgtatggggcagagcagacttaaaggatgtagatgattctaaccttggtctgaaaggatctccaacaaagatcgctaaggcatctgataaggtaccgaagggtgcaggagagaaagtaaatctggatcctgcagagtccgttgcatacttaatcggaaaattcaaagagaaacatattatctaagattatagagaaaagtggtgaataacatgggtttagaagaatataagggcgtatttatctacgcacagcaggtagacaatgaacttagctctatcgcttttgagttaatcggaaaggcaaaggagcttgcaaaagatttaggaacagacgtaacagcagtccttcttggatcaaacgtaaagggcttaacagatgagttaggcgagtatggcgcagacaaggttatcgtagtggacaaccctgaacttgagacataccgtacagagccatatgcacaggctcttgcagcagtcatcaatgagtacaagccagagattatgttagttggtgcaacagcaatcggtcgtgaccttggtcctaccgtatctgcaagagttgcaactggacttaccgctgactgtacaaagcttgagatcggtgatttcccaatcaacgcagttcctggtaaggaagacgagcagaagcacaaccagttactgatgacccgtcctgcattcggtggaaacacaatcgcaaccatcgcctgcccggacaaccgtcctcagatggctaccgttcgtcctggtgttatgcagaagcttccaaaagaggctggacgcaaggcagaagtaatcgagttcaatcctacacttgagaagaacaaccgttacgttgacatccttaacgttgttaaggcagttggaaacgtagagaacatcatggatgcaaaggttcttgtatctggtggccgtggagttggaagcaaagagaacttcaagatgctgcaggatcttgctgatgtatttggcggaatggtaagctgttcccgtgccgctgtagaaaacggctggttagcacaggattatcaggtaggacagacaggtaagacggttcgtccacagatctattttgcaatcggtatttccggagcaatccagcacgtagctggtatggaggagtctgacctgatcatcgcaatcaacaaggatgaggatgctccaatcttctccgtagctgattacggtatcgttggagatctgaacaagatcgttccagctctgacagaagctttaaaggctgaaatgaagaataaataatttcatcttacataaagatgtgaaaagaaaacgccgcggatttccgcggcggtttttttgtgtgaggaaatacttgacaaacaggtttaaatgacttagactaaaagtagtctaagtagtttagaccaaaaataaataggtaaaataataaatacggtgatagaaatgaaaacttatttgacaaaagcagaattaaaattgatggaagtaatttgggagaagggtcaaattccttcaaataaacttgttaaagaatgtttagagcggtttaattggaaaaagtcaacaacctatactaatttgaaaaaattagttgataaaaaaatggtttgtaattcagaggcagttattactgtattaaaatcaagagcagattatgaaaatggtcagagaaaagaagttataaaggaatatttttcaaattcattaccgcaatttgtcctttcgtttatcaaagaaagaaatctgacaagagaagatattcaagaattggagaaagtaatagacgaatataaggaggaactacatgaatgatttttttaaattttatagtggttctttgagtggaacaataatagttattatactatttttgtttataagatttttattaagaaaacagtctaattacataaaaataatgttgtgggtgatacttttgatacgtttattgtttccggtatctatatatacggaatatggcattttgtattcggaaacatttgttgaaaagaatgaaaatctttctgcacaggaaatgaaaagtgataattctttgcaaatatttccaaaagatgaaaatacatcgaaaccatacatgggaaaaaagaagaatataaatattcttatgatattgtggtatataggtcttttggtttttgctgtatattatattatacagaggattgctgtttgtagaagaacaaagaatgcaaagaagatatcttcacaggatgaaatctatgagtggaaagaaagcatggcttgtgttatcggcttagttaaaccaaaaatatttttgccatttgatttgagtccagagcaacggcagatagtgttacagcatgaaaagacccatataaaacgcaaagattatctattgatgatgttgtattatatagctcttgctttaaattggtataatcccttatgttggttaatttattttggagtaaataaagatatagaaatggcctgtgatgaacagacattacaaaatacatcaatggaggaaagaaaattttatgccagaacattacttcggttatgtgataaaggtagattaaaatatgtatcagctatgcgaccttttatttgcgaaaggagtacattgaagatgcggattaaaaatattgggaaagaatatagctgccaaaaaacaatatatatagttgttgccagtggattgttattagtagtattatttggaagttttctttataaaaaaattggtttgaataatgttgattcgaaagaacttgcaaggctggcaagttacaaatcaactttaaattttgatgatacaatgcctaaaattggttatgtcggaaaggaacaattagttgtttatgacaatatgggggtgtatgtttatgatctttcctcttcagacctgacggattatgttgattttgaaaaaaatcattttaagggattacagggagatgatgcaacatttattcatgtatcgaaggatggacggtatatccagctaagtgataatgaaaaacagttgcagtatgatttgaaaacaaaacaacaaaagaatcaattagataaaaaagaaagctggaatccgaaaacagaaccgatgggggtggagaccgcagaatattacagcgtaagcgatgtgtattatataggtgaaggcgaaacgtgttttcttgccattaacaaaaatgttactccaaattatggggcattgttatgtgtagtatcaaatgtgggggcagaaaaagaatattctttatttgattgatgcatgagttgttttaaaggctgagatgtgcaaataatttcattttatataagtgtgaaaagaggggcgtgtgaaaaaacgaaagttttttcatgcgtccttttgcttatagatacaacagtagttatattttataaaaaagtgtatactccccctttccccataagaatgctattatggaatcctatgcggcagttgcgacttttttctgtttattgtgatatttataaagattgtgtccaatagaaacaagaaatacttcaagcaatacagattttatccctcttcggacaattcttttataccaacggtcgttttttatgataccaaatgtaccttcggcctgaatggatctgttcatccttagaagcgctcccttgatactttcgagattttcaatcacttcctgatgcatcgatgtaagttcatggttgagccgaacggtacggtttttatctgtctttttacattgttctgcatatggacagccggaacaatcttcacactgatatacttcttcctgtcgtccatacttgtttccctttacatttttacgatactgaagataaaagcttttcccgtttggacaacgcatgattccgtcctccccgattgggaaatttactgcacgaaatggatcttcatgatacttcttgtcagtagtttctttcttgaacatggggaacttcatatatttttccattccatgctgctcacagaagatgtaattgttgtaagaaccatatccggcatctgcgactggatactttggatagaaaccatatatattctgaaacttgttcattagtggaataaaacagtccatatcggaacggtactgatttacatcaacaacagcaatgtattcatctgcaacaccaacctgtacattataagctggaagcagctggtcatttcccatgtagtctgtcttgattcgcataaaagtagctgaatgatctgtttttgagtagctattacgatcttctccacagatcctgattttttctacatattcttccagcttggcagtatactccctgagtttctcataatgacgttgctgcgtagttttgcgatgtcccctgccatgaacaaacatcgtttcatcaatctgccagacttctgcatactgttcagcagcttctttcagatactctggcgcatactcgctattgatacaaaactttatacccgtacattccagttccttattgatttcctcaaagagtgtggtgatcttatcaaatagacggtatctggatttttctgttgattttttccatacccaggagtatttattcgcatttgcttcaaacttggagccatcaatgtataggtgttggagatccacgtgttctgtctcgaagatttttttgtttatgtcctgaaatatttcttctatggaatcaacaagtacctcgtttataaagtagccgaaggtacggtaagaaggtgtttgatgatccatgagatacatgaagcggagattgactttacactgatcctccagctcacgtaatgatatatagccatttgccataaatccaaacaaaactgtcttcagcatgctgaccgggtcatatctgagtcttcctgtatcatgttgcggaatatttttcagatatttctccagttcgatttctcccataaatctgtcaaatgtcagcaccggatcacagatgtccagataatcttgaattagtattggcaaaactgcctgttttgggttagaatagattatgttattaattttcattgcaagttaattataacagaaagaaagaccttgagttcattataaactcttggtctttcttttttcgggactattcttttttcacagccccttttactatatttgtaacgagtcttctgttttacagcctaagacacgcgcaaattttacgacatcaatgtctagatcgcgggtattggcggcaaaatcgagaatatcgctacagcgatactttttcaatggacaaatggaaggaatccggatgtcttttatttttgtctgaaaatatgtaacaatggaaccgacaggttcgttatagttagcagagacaaaacaaaagtgaggaacgcgcgtgattttactgatgatggtggacacacccgaagaaaaacgaaaatttgtgatcctgtacgaaaactatcgttatctgatgttgaaagtggcggtggatattctgcatgattaccagttggcagaagatgccgtgcaggaagcatttgtacgggtggcaaaacatatggaaaacgtcggacagccggaggagactgccacgaaacgttatctgattacgattacaaaacatgcagccattgatctttaccgcagaagaaaccggttacaaagcagggaaatctatatggatgaacttccagaagaaaccgggcagcttacttatatggcaccggaggaagaacatggagtgttagatattttaaaaaatcttccaccaaaatacagagatatatttctgttaaaatattccgcacatctggaaaaccgggagattgccagaatatgcggacttcgggaggggacgatacggcagcggattgccagaggaaaacggctaattgaaaaagaactggaaaaaatcaagaagggagataccgaatga

SEQ ID NO: 697 - DNA, 21199 bp, unidentified
  source 1..21199: mol_type = unassigned DNA
gtcatgacacaagaaaagctccctcacaggaaggagctttgtctacagtctgagcctgaggcttctttagaagcactcaggctttatcattctgaaaactagatctggaactgatgcatcagctgtaacatagtatgtacctgcgcggactgttcttcgctgacagcggcggtctcctgagaagatgcggagttgttgtccacgattccggccacatgagcgatgttttcatcgatctgctggacgctggacacttcagcctgaagggcctgtgccatatcatccatacgcttggtagaagcctcggcttcttccattacctgatccatgctggcttcggtttcttctgcaatggcgattcccttgttgacagcatcgatggtgctctcgatcagctttgtggtctctccggcagcctcggtggactgttccgccagattcttgacctgctcggctacgacagcaaatccgcggcctgcttctccggcacgggcagcctcgatggaggcattcagtgacaggaggttggtctgggaagcgatatcctcaatgacctgaatgatagaacgaatctcctcggaacatttactgatctcaccgattgcgactttcagttcctgcatcttggcattgccatcagcaaccgtctgtgcggactgcttggagatatctgcggtctcctgtgcaactctggctttttcttcaatactctttgccatagcgtcgatcatctgggatgcttcggaaatcttggaggcctgtgcggtacagccttctgccagatcggtagctgcctgtgccagctgctcggaaccaccatcgatctcctgtgcgctgacctgaatggtggacagtgtcttcttcatatcggcaatgatcttcaccatggaatccttgatctgtacaaagtcaccgacatattcttccgtaggctctacacggtaattgccctgacccatctgacctaagatctcggaaatctcggtgatcatcttggtaaagttgtcgttcatgaaatgaacggcctgcaccatgatgccgacttcactgtcatcctccggcagatccagacggctgtcaaaatgtccctgcgcaagtactttcatctgctcggatacttttacaatgggaatcagcagttcctgttttgcaaaggtcagtgtggtgacaatcttgcgggcaatggtcaggaagcagagaatgaaaatcaccatggtagtgatcattatcagattcagagtattttgcttctgagccatacgtgcctggatatcattgatacaattatctgtggttgcagtgatctcctgtacggtagattcatattcctcaccaaatacataagaaatagctgcttgtgtatctccggaaccggccttatccatggcttcttcttccagaggaaccagaccgttggacatttcagcaatatggtttaacagtgcccattcattgtcggtcagaccgtctttctgaagaccttcccaggcaatgtcacgatttttgtcctcgtttaattccttcatataattgtcatagtaggtctggtctccggtgactgcgtaagactgtacggcagcggtcagcgtcttggaacccagacgatactggttcagatacatggtagcttccagctgctgggaattgatccggctcagatacatgttggatccgatgaacaggatcagcataacgatgctgatgatcagtatccgataggttgatcttgtgttttgctgcagcatggcagactgactggttactttgctttgctttttcatttgaaatataacctcttttctgtaatacatggtgaactgatgtgttacgaaaattttttcctacagtatactacaattatcggaattatacaaatcttgcgccttaaaaaatacagcaaaaacgcgtaaaattatttatacgaaccatcagtgacgacttgcaccctatacaggaagatggtactataaaaagtaagaggcatgattcggaaaagagaagataacgataaataaacagactgtagacaaagctccctcacaggaaggagctttgtctacagtctgaagaattgtgtcaccacaattccttttcctcgcaacaaacattttacaacaaacgttcagaccgcgccattcgcaaagtcgcattatcacgctctccgtcgctttgtgtgcaagcacccaatcgccggttctgtcattctatggctgaactattattacaagcatttaataaaacggtcgaaagccttctgtccttcctcggttctcttatagacaccggcatcttccaatacctgcatgaataccagaccgatctccttctctacgataccgtcgatgttctcagcagtgatggcatcgtatttcggacggaactcgtctacccagtctgcatgctttgccaattcctcatcagctcttaagtctttaccggcgaggattgcttccttcagatgcgccatctcacccttcaggcgggcaggcagtactgccagacccataacctcgatcaggccgatattctcttttttgatatgatgcagctttgcatggggatgatagactcccagcggatgctcctctgtggtgatattgttacgcagcaccagatccagttcgaacttgtctcctctctttcttgcaatgggagtgatggtgttatgaggctcgttatcggtgtaggcatagataaatgcctcttcatccgtatattctctccacttgttcaggatcacatctgccagtgcaatgatacgatcagtatccgtaccgctgagacggatgacagacataggccatgccacgataccggcatccacatcctcgaaaccggctacagagaaggttctctctacaggagcttttgccatggcaaactcgtaatgcccaccctggaaatgatcgtggcttaagatggaaccgcctacgatgggcagatccgcattggaacctacaaaataatgagggaactgctttacgaaatcaaacagcttacagaaggtcgcatgctcgattttcataggcacatgctgagagttaaatacgatgcagtgctcattataatatacatacggagaatactggaatccccactggctgccattgatggtcaccggaatgatgcggtggttctggcgggcgggatgattcacacggcctgcataaccttcattttcacggcacagcaggcatttcggataaccggcctgttttgccaacttcgctgcagcaatagccttgggatccttctcaggcttggacaggttgatggtaatgtccagatcgccgtatttggtgggtgctacccatttcatatccttgcagatacgataacggcggatatagtcggaatctctgcttaatttgtaataatagtcggtagctgcctcgggagatacctgctcgtacagttcgtggaaatgacggattacttcactgggtctgggcatcaacagtcccatgatcttcgtatcgaaaaggtcacggtataccacactgttctccttgagaatgcctttttcataagcgtaatccagcatgcccttcagaacctcttccagttcatcctcacgcatggtcacatcgtcgcgctcttccagttcatccagttcaaacagctccaacagacggttggtcgtgtagatcacatcttcctccggaaccagtcctgtctgtactccgtaggataccaatttacgaattaatacctgaatatccattttttctccattctgcaataccggatttctccggcatcgcactctctattctcgtcggatcttaatttcttacagggtctgggggccgtcaccgatctctactacatagaaatcagctgcataaccgatcttctccttatatgccttgcctacctgatcgataaaggtgtcaatagcctcatcctttacaatgcttacggtacatccgccgaaaccggcaccggtcatacgggaaccaataacaccgtctaccttccatgcttcttctaccagagtatccagctcgatacctgttacctcataatcatcccgcaaagatacatgagaagcattcatcagctcaccaaacagcttcacatcgttgttcttcagagcttctaccgcacgaacggttctctgattctcatatacagcgtgctttgcgcgctttctgcggacatcgctcttgataatagctttgaacttctcgaaagtctcctcgtccagatcacccagagtcttgatcttcactacctgctgcagttctgccagtgcagtctcgcactcgctgcgacgctcattgtacttggaatctcccaggcctctctttttattgctgcatgcgataacgatcttcgcattttccagatggatcggtgcgtactcatattccagagttgcggtgtccagaaaaatagcattatcctttttgcccatggcaatggcaaactggtccatgataccgcagtttaccttgttgtatttgttctcggagaactgtccgatcagtgcaagatcctgattggtcacatcaaatccgaagaaatctctcagaatgtagccggtcagcacttctacagaagcggaagaggaaagtccggaaccgttgggaatattaccgttcagcagcagatccataccggaagtcactttcatgcccttctcaccgaaagcccagatcactcccttgggataattggtccagcctgcttccttgctgggtaccagatcctccagagaagattcgatcactcccagatgtccgaaattcatggaatagaaacgcagcttattgtcgtttctctttcttgccacaccataggtaccgatggtcagtgcgcaggggaaaacgtgtccgccgttatagtcggtatgttcaccgatcagattcacacgtcccggtgcaaaataagccttagtgccctctgcatctccaaatacttctgcgaaagttttcagaatcgtctctttcatttccatttttctactcctgtctgcttacgatgtaagcctcttacatttatgttttctttcgttacgctccggcggaatgccagactgcgaattctcttgctctatgttttcatcataataaaaaaaaacggttttttctatttatttatgttttccaaacctgtcattatgttaaaagctacgagccatgcaaatccaaaaagaaaaacacgccctgggagcttgctcacgaggacgtgcttttctttttggatttatacggcgacagccgtacatgaagtagacgcagtacgtctacgaatgtgcatggcgcagttccacggcgtactttattccgcgctctgttttcgatactgtaccggagtcatgtcatatgcctttttgaataggcggttaaagtgctccacattctcgtaaccaacgttggctgcaatggtctccaccgtctgattggtctcctttaagagcattcttgcttttttcatgcgctcttcccgaacgacctcctggaaggtcatgccggccttttccttaatgtacttggacaggtaaggcttggagagatggaaagtatctaccagcatatccagtgtcacatccacatagttcttctggatgaaactgatgatctccacgatccgctcttctctgccggaggtaatatgctgttctgctgccagcttattcaccgcggacaccagtgcggcgatagaactcttgataatatcttcatctacgccgacgccccagtagaatttaccgtcatggacgataccaacataggtggcagccttggaattggagcctctggaaattgcatgctcttcatatacagacaactcgtaggtaataccaaagtatgtcttgatggcattgctgactgcatccagacgtccgttacccatagtagtaatggctctggaagctccgccctgctcgatagtcacctctgcctgaatgccgttctcctgtttgaagtggcactccggaatgttgaagatgctgcggggataaatataattttcctcgaagatcgcatagatctccttgggaagtaattcctgatgacgtctgtcggaaatacctttcacaaggtaaccaacctcttccttcatggctgcgggcagcgagaagccaaactgctgcttcaatacgaacgctacgccacccttaccggatacactgttgatacggataacatcggattcgtactctcttcccacatccgcaggatcgatgggcagataagggatatcccaacgcttgccggtcttgccttccttctgccatgccatacctttgctgatggcatcctgatgggaaccggaaaatgcggtaaataccagatctcctgcatagggcactctttcatgtaccttcatgccggtgaagttctcataagcttcacggatctccataatatgagagaaatccagtccactgtccacaccatggcacatcatattcagtgcaacggttaccagatccacattaccggtacgctcgccattaccgaacaaagtaccttccacacgatctgctccggccagtacgccgaactccgcatcactgatgccacagcccctgtcattgtgaggatgtacgctgagtactacattgtcacgatatttcaaatgcttgtgcatatattctacctgacaggcaaatacatggggcattgccacctgtacggtggtgggcagattgatgatggccttgcggtcagcggtaggcttccatacatccagtactgcattgcagacttccagtgcataatccacctcggtctgagaaaagctctcagggctgtactcaaaggtgaagttgccttcggtctcgtctgccagattctttaacatctgggcgccgtctactgccagcttcttgatggcttctttatctttcttaaatacctgttctctctgctctacggaagtagagttgtatagatggatcactgcgtggggcgcaccttttaccgcttcaaaggtcttgcggatgatatgttctctcgcctgcgtcaacacctgaatggtcacatcatttggaatcatgtcgcgttcgatcaaggcacggataaaattgtactcggtatcggaagaagcaggaaaaccaacctcgatctccttgaaaccgatctttaccaacagcttgaagaattccagcttatcttccaggctcatgggatcgatcaaagcctggttaccatctctcaagtcaacgctgcaccagatggggggcttggtaatgctgtccttcttcacccagtcgtaggtcacctcggggggcataaaataagttttctgatattttgctgctatgtctgcgctgttcatggaaatcctcctgccatatgattactttttattttcaaaacctgttatttttactattttcacttatctgattgcactatcttaacactcatgatttctataagcaagttatgctcttatcatgttaattgatgcattttaatgtgacatttttgtcatatacctataaattctggaaaaatgctattttattccgtatttctctcgttttataatttgattaaaaattttaattgcatatatcattttttgttatatttaaaaatatatttttaactttgtgttgttacgttattgattgattttattattatatatttgccagataccgatttctgtacaagcatctattaataaccgattcttgtatatacaaaaacagatgtccgtattgggcatctgtttcgcatttatacactattcatagtctaaacgatttctccgtactgcgtactctcgaaatcgtaacgcccattcgcattccggactatcgtcctacttgctcatgttcgtttacttcccgcataaaaagcccttcttgacagcaagctgtccgaaagggcttttcatgggtaagtttattctatcaaatgatttccactctctcaaaataccggatcagaatatccgcgcagttctcgattcccagcttggtggtatccaggatcatgtggtagttgttcacatcgccccacaccttaccggtattctcataataataggcggcgcgttctgcatcatttttctcaagcatttccttcgcctcatcgtgggaaagactttccttcttcatgatacgttcgatacgatcttccttatctgcgcacacatacacgttaaatacattcggctgatccttcaggatctcagatgcgcagcgtcccagaataatacagggatgttccgccaaccccttaataacctccgcttccgtagcataactgtcatcatccagctcatgctctatgtacgccttatcatacaccggcacccccaacttctcagacaactcctgtgcgatcagactggctcctgttccgaatcttcggctgatagtaattacaaggttcatcgtaagcacctcctttgtaaggtactctcattttatgataaaggcgcggactttgcaagagggatgtctacaaaagcttctgctcgatctgatacagtttctcacctgtcgcccgcatgctgtgttcctccgccagtgccctgcctgcccggattctgcgtcttactttttccagcggttcttcatacaagatgtctcggactgcctgctcgtaggaatccagattgctggctttgcgcacctgctcgccgtcggtaagccacccttcatacaccggaatgtctctcacgatcacaggaatctcacaggataatgcctccaataccacgattccttccgtctcttcataactgaaaaaagcaaatgcatccgcaccacagtacgcatcccgcaggatcccggacggttggaaaccggcaaagatcacattttccggcttctctgccacagcctttttgatctctgccggaatcaatgcattgttcccgcccccaaaccatagaaaaataatgtctggcatcctttttgccatttccagaaaatcctcgattccttttctgtgaatcagatgcccggcagatatcacgacctttttatccacaggaagatgaaaaaattcccggaatcgtccacctgcctgctctgttttgtggaaaaattcagtgtccacaccattggtcagtgcgtaaatctcccgatgcagatcatatttcatcaacaattcccgggagtattccgttggtgtgataaccacatctccctgtctataacaatggcggatccattttttgaataaaggagccgccagattggaaccgataaaagaattcttaaaatcttccatagtggaatgcccataatagacgacctttttcccctgccgtcttgcccgccgtgccaccagcggcgaatcaggcaatacggtattgatctgtacgatatccgcctctttccagacgtccgtcacggtcacttttgctgctcgcagcatcttctcctgatggcgtattgcgctgccaacgccgctttttgccaccagtgaaagtccgcctttatatatataaattttcataagtatactctcctataataggtggaaaatcacctggaacagtgtcgtcagtcccagactatacagcgcaatggagaaaggctttcccaaaaagatgactgtcacaaactgtttccatgtcatattcgtcgttccggcgagataacagagaaaatcatccggtgccaccggcagaaagattgccagtgtaaataatttcaaaaatctcccctttagctccgcccatgtcaggtatttttcaatcattttcccgggaaacatcttgtacagcaccggtcttcccagacttcttgctattccaaaagcaatacaggaacccacacagattcctatataattatagaaaaatcccggcaccgctccaaagagcagcactcctgccagacagctgatgccacccggtatgatgggaaacaccacctgaacgatctggatcagcacgaagatcagtgcaccgatcattccgaaacggttcacaaactgctgcatggtctccaccgattggaaaatgccgctctgatagctccagactgccagtattccacagaggatcagactaacccaggatgcaatattggcggctctttgccaagcgtttttctctttcgacctgtttttcttcgatctgtcgctggtatagttgttccatgcttcccgcaaatcttttttgggaaaatatttctgcggactgttttgcataactgcacattcctctgcgttcatcgtcttctttctccttccagttcttcaggtctttcaagaattcctcctcggtccggtactgccagccgtttttgtcctcttccacaaccgcccgcaggcattgatcccttctgcataataacggtaatcctgctgccagtgcttccgcataggtaagcccctgggtctcactggtggaagcgctgacgaacagatctcctgccggataataagatgctacttcagcgggtgataccattccggtaaaaataacgctttccgtcacacccagttctgctgcctttttccgtaaagtctccaaataaggaccgccgcctacaatcatcagtattgtgccgctctcctgaattttctgctggtactccagcaattcttccacattcttctcttttgccagacgacctacatataaaagcactgtggtcttccggtccattttatattttcttcggattctctcccgagaatccgtccgggtctgcgcgtcatatttactcagatcaatccccgatgggatcactgataccggacaatgaatgccatagccttttagtaatgtctctatttttgtgctgggagcgatcatactgtccaccttctcggagatctgtcgcgtcaggaactgtaccatatccctgccccatttcttgtaaggggaaaaatagtgggtataatcttcgtatacagtatggtaagtatgcaccagagggatcttacattcctctgcgatcttttttgccatgaaaaaggtagaaaattcacactgggaatgtacaatatccggattccactctataatcccgcgatacagttcgcgtcccggggacacccgaagtcttgctcccggataaatatatccggcattcacggaacccatatagatcacaccctcttcttcgtaggaacgagctgtacgggacaaggtcaggatcttcacttcatgtcctctttgctgtaattcctcccgcagattgcataccgaagtaacaactccgttgatggccggcttgtaccagtctgttgtgatcaatactttcatcttttttctcccttccgtttattttctctgaattgatctcagcataacagacacaggtaaattccatccgaataaaatcaaaagttttcctaaagtttctgtgagttttttccaaaatgtgcactaaaaaacagcattctccggaaatttccggaaaacgccgtttttaatcgtctttctataaaattattatctttcttctctgaagtacgccagtcccagacttgcggggggctgattctctctcttgctccgcatactggtgatgaccagtaccagtaaggtcacgacataagggatcatcttatacagctcctgatactccatatgctcgataccggtgggcagatacagatacagaatatacagaccaccaaacaggaaagaagcaaatacactgatattcggtctccagatagtgaagatgaccagcgcaatggcaagccagcctctgtcaccgaacgcatcgttggaccagacgccgcaggcataatccattacatagtacagtccgcccagacctgcgatcatacatcccacgcaggtagcgatgtatttgtaccgggatacgttgataccggctgcatctgcggtattggggccctcaccgactgctcttaagtgcaggcctgttctggtatgactcaggacatacgatgccgcaaacgcaatgatcactgccagataagccaggaatccataggataaaaacagcttaccaaaccagccaagttttcccgcaaaaggaagggacttactgaaataactgctggtagcagacagtgcaatggaaggtacatcactgtttaccagcttgatcagggatccgccgaagaagttaccgaagccaacaccgaaggtggtcattgccagaccggtcacgttctggttcgcccgcagggtgacagtcaggaagcagtacagcaatcccatcaacagggatcctaacaggcagcagagcatcggaatcgcaatggcaagaaacccattcatgttcgccgcgtctcctgcgaatctctcatagaagaaagatccgatgacaccacagatacctcccacatacatgacgccggggattcccagattcagattaccggacttctccgtgatgatctcaccggtactcccgtataacagaggaattccctgtacgattgctctcggaataaatgcaagtaaaaatgaccacatgattactgttcctccttttctgcttttttacggaactgcagtctgtaagtaatgaagaactcacagccgatgataaagaacaggataatacctgtcagaatatcggagtaagaatgattcagtccaaaattggtagagatctcactggctccgcgatccatgaatatgatcaggaagctggagaataccatggtcagaggattgaacttggacatccaggataccagtacagcggtaaatccctgtccacctgcaatcgtggtagtcacagtatgattgatgcctcctaccagaagcaggcctaccagtccgcacagtgcaccggacagaagcatggtacggataattaccttttccaccttaatacccacatattttgcagtattttcgctctcacccacaacagagatctcatatccctgcttactgtagttcaaatatacatacataaatatcgtgatcactactgccactacaatacttaacagatatttggagccgaagatctgcggtagccagcccacattggtgttctggttgatgataccgatcttaccggatcccttgggaacctcccatactatcgtataaaatgccaccaactgagtagctatgtagttcatcatcagcgtagacagcgtctcattggtattccatttcgccttgaaaaatgcgggaatgaagccccagatggctcctgctgccagacttgccacgatcatgcacaggatcacaactgcgttcggaagcttatctcccagacagatcatacaggctgctgctgccagcccgccgatcagcacctgtccctcaccgccgatattccagaatttcatcttaaatgccggagtcaatgccaatgcgatcaaaagcaggatcgctatattctgaaaagtgacccaggtcttgcgaacggatccgaaagcacccagaacgatggactgatatacctgtaaaggattgattcccgtggtgatcgtcgtaatgataccgcacaggatcagtgccagcaggattgccaaaaatcgaatacccagagatttataccagggaagcgcatctctttttacgatatgaaacaaaggctctttattcttttccttcatgttctttgcctcctactctggtcatcagcataccgacctcatttttgtctgtctttctcgcatccagaataccgctcacttctccgccgcacaataccatgatacggtcggacagctccatcagcacatccagatcctcacctacgaaaatcacggcaacgccctttttcttctgttcattgatcaggtcatatatagtatacgaagaattaatatccagtccacgtaccacataagccgtcaacagtacggtaggtgcagacgcaatctctcttccaacgagaaccttctgtacattaccaccggacaatctgcgtaccggagtggtgatacccggggttacaacctccagattttctaccacatcagttgcaagctgtttggaaggctttcggttcgtaaacggtgtatgtccctgtcggaaggaacgtaacatcatattatcggtcagatccatattgcctaccaggcccatgccaagacgatcctccggtacaaaagaaagcgatacacccatctctgcgatcttcaacggatccttgccgatcagcatttccttacttccatcatcttccacatagctgattgtgccggcttctgttacctgcagacctgcaatggcttccaaaagctccttctgtccacagccggagataccggcgattcccaggatctcaccactattggcggtaaaggagacgtccttcagcttaacgataccttcttcgttacgtacggtcagtccctgtacttcgatacggggcttcggattcacaggttccggtctgacaatattcaaagtaaccgcatgtcccaccatcatattggtcatttccgtaacggtggtatcctttgtcagcatgcttccaatatactgaccgttacgaagcacagccaccctgtcggacagagattccacttcatgcattttatgggtaataatgacaatagccttgccgtcatctctcattttccggagaacgttaaagagcttctctgtctcctgcggtgtcagtacagcggtaggctcatccaggatcaggatatccgcaccacgatacagcacctttacaatctccacggtctgcttctgggataccgtcatatcatagattttctgcttcggatctacttcaaaaccgtatttgtcacagatctcctctattttacgggatgcctccttgatattaagcctgccttccagacccaggatgatattctcggtagcggaaagtacatcgatcagcttaaaatgctgatgcaccataccgattcccagccgtaacgcatccttgggggatttgatgacctcttccttaccgttaataaagatctgtccctcatccggaaaataaataccggagagcatattcatcagtgtcgtcttaccgctgccgttttccccaagcagtgataatatctcacccttatagatatccagatttaccttatcattggcaatcacggatccaaaagtcttggtaatgtttttcatcgaaaccgcagctacttttgtctctttttccatcctagtcacctttccaatttatccatgacctgcaattttcaggtcttttaatacctggcataagcacactggccgccccttttctacctcatccatccgcaaaagcaaaagatccataaggtagaaaaagggcggcgcggcaataaacgctgcgccgtccgggctatttcaataagtcaattaatactgctcatccaacaggttgattccatcaattcttacattgaagtaaggagcggaacggaatgcaacatcggactcatggaagtatccgtcacttactacctcatggtcgggagtataatcaggatcagtatcaatatcagcttcatagctgtccagggtcttaccgtctacagtaaaggtggtgatatcatatacatgagccttgcctgcgatcagatcagcctttgcagcttctactgcttctgcggtaccatctgctacagcagcaccaagatcgctcagctctacagagccggtctccagagtaccacaccaatcggtatcgataggagttccatctgctacacatttaatagcatactcaaagtaaggctcccagttaactctggaagataccaggaaggtattggggcaggctgcctcagtgcttccgttgtaagatacgttgggaacgcctgcggtctcacatgcggtaggagcacccatggagtctgcatgctggctgatcagtacacatccgccctcgatcagcttgttagctgcttccttctcagcggtctcatcgtaccaggaaccggtaaaggttacatccatggtaacgctggggcatacggaacgggcacccaggaagaatgaggtataaccggacataacttctgcatatgtataagcacctacataacccatcttagcctgatcctcggtaatatcaccgttagcgatcatctcattcagcttcatgcctgcaacgatacctgcaaggtaacggccatcataaatggaagcaaatgcattgtggaagttgtccagaccctcagtatgagccttggttccggttgcatggctgaactgaacattgggatactccttagcagcctcgatgatgtagtcctcatgtccaaagctgtctgcgaaaatgaaattacaacctgcatcagcaagctcacaagctgcttcataagcttcctgtccttcaggaatattggtcttggtcatgtactcaatgccaagcttctcacaagctgcctttgctccgttcaggaagttcagatcataagtagagttctcatcatgcaggaaaataaaacctgcctttacaccactgacagcttcgccatcagctgctgcttcagtagtagctgccacctcagtagtagctgcaacagttgccgcatctgtgccggtggtagctgcatcattggatccgcatcctgccagagcagtaactgcgagagccatagctgcgagtaaacttacgactttctttttcataattctcctctttctgcgctgctgcttcgttacagatccatgtagcagcgcgggcacagatctgcagataaaccggtgagtcaacgcaaaaagggtgtatgacaccttcatacaacccctttattgtactctctcaacattagtcagtataagcatttgtctgacttcttgtcaagagaggtattaaatttttattaactcgtttgcgaatgtggttctgagtagttatctaacctatctaacctatctaacttatctaactattaagatcgaaatgtgatctctccggtcttgtcatccatgctttccacaatagcgagcgactctacacggatacccttggaacggatcaggtcgccgcccttctggaatcccttctcaacggcaatgccgacaccctctacagaagctcccgctttattgacaatgtcgatcagaccctccagtgcgcatccgttggccagaaaatcatcaatgatcagaatatgatcttccggatgcaggaattttttggaaacgatcacgtcatatactctcttgtgcgtaaaggattcgatcttggtggaatatacttcaccgtcaatatttacggactgggacttttttgcaaataccactggcacatgaaaatgctgggctgccacacaggcgataccgataccggaagcctccacagtcagaatcttcgtaatcttacggtctgcaaacagatgcgcccactcttttcccatttcattgaacagatcaatgtccatctgatgattcagaaaagaatctacttttaatacattccctgcttttaccgtaccgtctttgcgaatgcgctcttcgagtaatttcattgtatgtctcctcttttgtttcttcttaatatattttaatgatgtcggggtcaaaagcccccgactttgatacctacgaattgcttcgtgctacgcactaccacaattctacccaatattcgcatatcgtggaattatcatcccacttttatgctcttatgtctcttattatacgcaggatattagtcctttttcaatagaagaactatatttcttgctattttgacaacattttgctatgttaaccatgagaatactgaaatcacgaggtgccttatgcctatcagaggatatatcatagaaaaatataatactatgactaacgcttatacctgcaaccgtctggtacaggaagcttctgccctggatatggatctgcagattgtagggatccatgatactgtggtctctccgcatggtgttataaatcatggtaaaatactggaacccgtggattttgtcatcaaccgctataaatggggacgggaaaaggatgctataaatgcacttgccacccgaagctataatccattaactgcttataatatctatattaataaatttgaacaggtacgaaggcttcattccaaagcctttttgatcccgaaatatcttctgggaacttcacggttgcctttttcttctattgtagaacaactgggccttccctttgtcggtaaaggactggaaagctccatgggagaagaaatcgtctgcatccgggataaagcttcttatgaggaactctctcttaactacccttcctccaaggaatggctcttcgaagaatttatctcagaaagctacggcagagatctgcgcttttacagcatccgcggagaagccgttgcctgtatgcagcgcacatcccagggggatttccgtgcaaatgtagctctgggcgcttcggtagagccttaccctgtcacttccggcatccgtaccatagccgcagatatttacgagcagaccggactggattttctgggaattgatctgctttttggcagagaaaaaccttatttttgcgaaatcaatgtcatgccgggactggaaggtattgaaaaggcttccggcataaatgttgcgggaaaaattattgagacgatacaatctgactttacatcaaagacttagtgtaaaaaatagttttttcatgcgcaaatatgtgcctgcacagtgtacgaaaatacatgatactaaagtatctggaaaattgtaggctacaaaaaggtatttatatgaataacacttccgaaacatcactgcaatttcataaaatcactacacgtaaggaggcggaagacttcgtctatgcttcctatctgcgagcttccacacatcaggactatgccgcaaaggatgccggaaaaagacatcctgagctgacgagatctctgctttggcaaaaatccgttactccctgcatcgttgtcaccggaagcaagggaaaaggctccgtttccaacatgatctcccgaatcctgcagacaagattctctgtgggactgatgaccagccctcatatcacggactttcgcgaacgcttccgtgtcaatgatacgatgatcagtgaatctgacttctgccgtctgatgacagagatccagccggagattctggacattgcctccgatctgccggagtcggtatgtatcagccccatgggcattcaggcggacctggcactgacttatttttcggaaaagcatacggatttcaatgtatttgaatgcggaaagggtgcaaaatatgatgatgtaaacaacattcgtcacgattatgccgtgatgaaccggattttcttagagcatacaagagagctgggagatacgttagctgccattgcggaagataaatcccacgttatcaccggagagcagaagtgtgtctattttgcggagcaggaaccggaagttctggaagttctgcagcgccgtgccgaaactctgcatattccctataagatctacggtcgggattttcatgcagaaaacatccgttatacctgcttcggaatgcagtttgatgttgaaatcggagacaacatttatgcggatttacaaattccgttgctgggagaacatcaggcgaaaaactgtgctctggcacttgctgtgtgtgtggatgtgctgtctgatctgcgcagggaatccgcagttttttctttgccagacatccggaaaaatctgtctctgctgcactggccgggacgcatggaagtcctgcgttccaagccgtttgtcctgctggatgcctgcatccattccaccagctgtgagaatgtaaaggaagtcctgcgacatctgggggtttggaattgcactgttattgtgggaattccggaggataaggattatgccggggtggttcggtccatggaagaaacggcaagccggatccttctcaccagatccggaaatccgcactatcatttttccaaaaaacagcaagagacattagcgggagcgggcattggtgcagaatggacagactcggtggaacaggcacttactctggcggattctttttcggatcccattgtaatattaggtacgacctccgtgatttcagaagttgagcagatttttcagcaatcttaacttgccctcaccggatacaggtgctacaatgagggcaaatagaagagtagcaaaacattacgcagaaaggagaagtcccatgacaggtatttacggaatcaattattctaataattatagtctgaccggcaattacggatacggttattctaccggtgcggtatcttccgcacagcccgaagagaagggtatggtggtaaattccggaaaatccgatgtagaaaagcccggcagaaagtcttctcccgcagaatgcgaaacctgcaagaaccggaaatatcaggatggttccaacgaaatggtctccttcaaatctgcatctcatatttcaccacaggcttcctcctccagagttcgtgcccacgaacaggagcatgtaacgaacgcttacaacaaggccgcacagaacaacggcaaggttctctccgccacagtgtccctgcggaccgcggtatgtcccgaatgcggcaccgtctacaccgccggcggcaccaccacgaccaagatcagttaccgtgacgagagcaatccttaccagcaaaataagaaatctgccgatgctgccatgctgattggacggaatctggatctgagtgcgtaaatgaaacataatttttgacacgcgaaagcccccaccttttatgatatgtgagggcttttttattttcattttaatacgccacataccagtcccggcagggcaggagagtgaatccatcgaatttttccgcatctgtatagtaaatgatatatatcttatttctgtcaatatgctcccagtcgattcccatagtgaagcggattcccttgcctaggaaagactccggcttgggaggtgcatcgcttaagttcctgttggcaaggtattctgcagcatcaatctcgccgtagagcaaaacactgggatatttgatggcatcttcgatctcgatctcacgaccgctttccgctgcaatctccatggctttctgtacggcttcctcgctgccttcctgaaaataggcactgactagctctttataagaagtaaaatatgccttttcaaactgtacattttcccccagcagaagtgctgccaaaagaatgcttactacaatttttccgtagaaattcacttttttccccagaaaatctgtcaaagaagacacgcacaatgctccgcacagaacaagaggaatatagatgcagttgatctgggtcattcccacggtaaccagtaatcccagcagcaatgcgccggtcagttgaaagaatatcatccataataatgtt

SEQ ID NO: 698 - DNA, 42064 bp, unidentified
  source 1..42064: mol_type = unassigned DNA
caatgcggaagagatgatagaggatctttccttaaaatataaccgtgcaagacagggatctatcacacaggaattgacggaaattattgcgggagcaaatgcgatagagtgacgtaataaaggagaagaaacatggaaaataaaggagcaataggaaagatcacgcaggtgatcagtgccgtgctcgatatcaaatttccggaaggacatcttccggagatcaatgatgcaatccgtattcctttaaaaaagggcggagaactgatcgttgaagtagcacagcatctgggggatgataccgtgcgttgtattgcactcggaccgacggacggacttgtccgcggtatggatgctatagcgacgggaggaccaatttcggtaccggtaggagaaaaaacacttggccgtttgtttaatgtgctgggagagccaatcgatgaaattgcacctccgcagaccaaggagcactggccgattcatcggaaggcaccttcgtttgaggaacaggcaacttcccaggaaatgttagagacaggaattaaagttgtcgatctgctctgcccgtatcagaaaggcggaaaaattggattgtttggaggagccggtgtaggaaaaaccgtgctgatccaggaactgatccacaacattgctacagagcatggtggatattcggtatttaccggagtcggagagcgtacccgtgagggaaacgatctgtattatgaaatgaaagagtcgggagttatcgataagacaaccatggtgttcggacagatgaacgaaccgccaggggcacgtatgcgtgtagcacttaccggacttacgatggcagaatatttccgtgataaaggcggaaaagatgttctgttatttattgataatattttccgttttacacaggcaggatcggaagtgtctgccctgctcggacgtatgccgtccgcagtaggttatcagccgaccttacagaccgagatgggggcactacaggagcggattacatccaccaagaacggatctatcacttccgtacaggcggtatatgtgccggccgacgatctgacagacccggcaccggccacaacgtttgcacatctggatgccacaacggtactggatcgttccatcgtggaacttggaatatatccggctgtggatccgctggcttctacttcgcgtatccttgacccgagaattgtcggggaagaacattttaaggttgcgcgtggagtacaggagattttgcagaaatataaagaattgcaggatattatcgcaattctcggtatggatgagttgtcggaggatgataagcttgttgtcagccgggcgcgtaaagtacaaagattcctgtcgcagccgttttccgtggcggtacagtttaccggactggaaggcaaatatgttccggtggaagagaccatccgcggattccgtgagattctggatggaaaactggatgacgtgccggaaagttatttcctgaatgccggaacaattgatgaggtaaaggcggcatatgcagggtaatgtgtgtgccggctggaggaaacagagatggaaaagacatttgatgtagaaatcatcacgccggaccgcgttttttataagggaactgcggatctgctggagtttaatacggaatccggcgagatcggtgtatatcgtgatcacattccacttacaacggtactggaaccggggcttgtcacgatccatcatggggatgaagaacaggtggcagcagtgcatgccggatttgccgagattctgggagataaggtaacacttctggcagaactggcagaatggccggaagagattgatctggagcgtgcggaagccgcaagagagcgagcagaggagcggattcacaacagaaatgacaatctggatctgaagcgcgcggaatttgcattgcataaggctctgatccgtattaatcttgcagagtatcgataagtgaaaatggaaataagagggagggtatttcatgggaatatcctccctcttttatggacttttacaccggagtttggtacaatcgtagtagtaagtttgtatacaaatgaggagatattgtgtaccgaaagaataaaaacaattgggtaaagcatctggattttatgattctagatctgatttgcctgcaggtggcattttttttagcctatacattacgacatagaactgtcaatctatataccaattacatatatgcaaatttgtctatcgttctgatcctgatagatgtttgtcttctaattttcctgaatacacttaaaaatgtattaaaacgtggatatctggtagagtttatcgcaaccattaagcatgtggcgattgtggaactggttgctgtcctgtatctgttttcggtaaaagatgcgggaaatttttcgcgaatcacgttctttctcatggcattattttatggattgcttacctatggaacaagacttctgtggaaaaaacatattcttcgcacgctgcatctgaagcagaacaagtctgtactggttatcacaaactttgaccggctgtctcaggtggaaaaggatatccgggcgaaacgctatgtgatgtttcagatatcgggtgtggctgtgatcggaaacatgccagaggatcatccgacggaaattgcagggattcctctggttgcagcaggtgattacgtggtggaatatctctgcagggagtgggtggatgaagtatttgtaaatctgccattgcagagtgcccagctggatgatctcatccggcagttaaacgagatgggaattacggtgcatatccagctggcagataaactgatggtcggaacacagcggcagtttgtggagcgtcttgggggatacaccgtgttaaccacaagcatcaataccatttccaccggagagttattggtaaaacgtctgattgatattatcggtggactggtgggatgtgtgctcaccggtattctgtttctgtttctggctcccgccattaagattcagtcacccggaccggtattcttttcccagatccgtgtggggaaaaacggaaagaagtttaagctgtacaagttccggagtatgtataccgatgcagaagaacgcaaggcacagcttgcagcagaaaacagagtcacggacgggctgatgtttaagctggattttgacccacgcatcatcggctgcagacagctgccggatggaacggtgaagaaaggaatcgggaattttatccgtgactggtctttcgatgagtttccgcagttctggaatgtcttaaagggagatatgtctctggtcgggacgagaccgcctacagaggatgagtgggtcagatacgaactgcaccacagaagccgtctggccatcaaaccgggaatcactggaatgtggcaggtgagcggccgcagtaatattacggattttgaaaaagttgtggaactggaccggtattacattttaaactggagtctgggactggatgtgaaaatacttttccggacggtaccggaagtcgtgaagaagaatgggtctatgtagaggaagtaccggttgcagcaataaatagtttgagaaggcgtatcgcataatttctttgggaggcgggcgccttttctattatatggatcagggtcagagcatctttctgctgccactcccgttctgtttcagaaatttctccaaacatcatatagtctaaattcatatctaatgctttggcaattgccagcatcgtttcaatggacatgccacacatcccgcgttcaatatccgaacagtattttgttgcacggtcgatccggacggccagttcatcctgtgataggccaagctgtatccgtttgcgccggattcgctcgccaactgtaattttatcataaggttcccgtttcttattcattttgtgatcctctgtatcttccaaaaacttccaatttttctatataaagatagtatcagttattaaaaaataataaacacttttcaaacgtaaaatataggcgcgtttaggacgtgaatatttgtgcgtttacaaacggaaaaacgggaaaattcgccaattttcgcggataaacctactgtgagaacacaaggatatggagtaaaatatttttgtcacaaatataattatagaataattatgaacagcaaagagaaaaaatgccgattgattttcacacacatattcttccgggaatagatgacggaagccggaatgtagaaatgtcactaagaatgttagcagcgcagagggagcagcaggttgatgaaatcgtagcaactccccacttttatgcacagaaagattctgtggaagaattcttattgcgcagacagtgcagctatgaaaaattgaaaacgaaaatggcagagacaaatctggatcagaagttgcatctggcagcggaagtttattactttcagggaatcggaagtgctggaatgatcccgaagctttgtgtggaaggaacacagacacttcttctggaaatgccgtttgcccagtgggattctgccatttatgcagatgtggagaaactggtacggcaccagaaactgaaagttgtccttgcccatattgagcgttattacgaatttcagaagaaaaaagaaatctgggatgccgtcatggaacttccgttatacaggcagatgaatgcaggcgtatttctgaactggaaaaagaggcataaagcgtttcagcttgcaaaagaagccacaaccattattcttggcagtgattgtcacaacatggatacccggcatccaaatcttgccgagggacgcattgtgcttgtaaagaaatttggagaagcgttcctccagaaaacggatcgcctgaccagggaggtactgcagtgagcgaaaaaaagaaaaccatgcgtgcagttatagaaattatcattgccgtacttgtaatcattgccgtatattttatcatccgtgggatggatcggcacgacgtgcgtatccggcaggcagccacagaaaatgaaatgcagcgtgtctggaaagaatttcaggaaaaacccgtctcgattaagctacataaaaagacctggaaatttgcccatccggttcagacgtatctctttatcggaacggacaaaagcggaaacgaagatgccgagggagaagaatatcatggctcgatggcagatgcactgatgcttgttgtcgtggatgaagaagaaaaagcatatgggattttacagctgaaccgggacaccatcacggaagtgccaatgcttttgcaagacggaagcgctaatgccagtgcacagatgcagctttgtacggcacactggtatggaaaggacaaggctgcaagctgtgacaatacggttgagaccgtatccaaaatgcttggggggctgcctattgatggatactatgcattgaaaatggatgcaatgccacttctgaatcatgaggtggggggagtaaccgttacactggaagatgatatgaccaagctggatccggctatgaagaaaggtgcaacgcttaccttgacagaccggcaggcagaactgcttatgcagtcccggtatgtcatggatgacgatcgcaatacgcagcgtatgcgccgccagcagatctttttaaacgcattcatgaaaaaaataaaaaaacagaatgcgggggatgtcaatgcgaccgtgaaattatatgaccggctgcgcccgtatgcaacgacagatattaagatgaatgatctaactgccctgttaaagaatatgcagggatatacagacaaaggaattatcacaatcgacggtacatccaaaattggagaaaagctgcacgatgggaaaaagcactgggagttttatatggatgaagattcactggagacatccatgaaacaactgtatccactggtgcaagagaaaggaaagtaacgaatgaaccaggaaaaccaattgacagagcagaacagcgaagaaaccgaaattgatctgcttgaaattttttatctgctacgggcaaagctggtatggctgattctcgcatttgtgatcgggggagtgattgcaggctccatcacacattttctgatcacaccaaaatatacggcaactgcaaaaatgtatatgatttccgcatccagtggaagtgtgcttgatctgtcggatttcaatatcggaacatccctttcccaggactataccgaattgatcaaaatccgtcccgtgttcaatgaagtgattgataacctgaatctggatatggaatatgaagatcttttgaagaaagtaagcatctcggttgttggagattcacggttacttgctgtgtcggtggaggacaatgatccaaaacttgcacagtcgatggtcaatgaacttgtagatacagcggtaacctacattccgaaagttatgaatgcatcggagaatgcacagccgaccattgcggaatatgcagtggttccagatgaaccgagttcgccgaaccttgccaaaaatattattctcggagcggttgttgcaatgcttcttgtagccgtgatcttcgtggtacgtatgcttatggacgacagcttaaatacggcagaggatgtcgaaaaagaatttggtatcatgccgtttaccgttattccggagggggatatcgaagaaatttctgatgaggtagaaaaagcgatcagtaaagagaaaaagaaaagaaggaagaaaaagtaatggaatttacaccgaaaaaccgtgcgaccgtccagaatatgccgaaacttccgtatgcggtagaggaagcactgaaccgtctgcgcgtcaatgtgagctttcttggaagcaaagtgaaaaaaatcatggtgatatccagcgctccggatgagggaaaaagttttattgccatgcagctgtggcgtcagatggcagaagccggcagcaagagcattcttgtggacatggatctgcgcaagagtgttatggttgacaaatatcagattgtccgggaagacaatggaaaaattctgggaacttccgattatctggcaagtgacgatacgctggacaaatatgtgttgcgtaccaatatcggagcgggagatctccttccgaataaagaaaatattattaacccgtccatgcttctcgaaggacagaaactggcaagtacttttgaagaattgaatgaaaattaccgctatacatttattgatgctccaccattgaatctggtatcggatggagaaaagatcggctcgctgtgtgatggcgcactgctggttgtccgcgcaggagaaacgccaaaggcaatggttcgtaattcgatccgccagttggagcgtgccgggtgtccggttgtcggcattgcactcagccgtgccaaaggcgctgcaaatggatattatcacaaatatggcaactactatggcaagagttattatggaaaaggctatggctactatggaaaacatggatattatggctatggcacagagcagaagtaggtgattccccaaaagggttttcacataaatcaatcatcagggaaaggaggattatatcccaatgaacaaattaatcaagaaggtgctggtaggtattaccgctgctactatgatgtttggatctgtttgtactgcttatgctgcaacagattctgcaacagtagctccagctccggaaaaacagacaaacgtcaaggctgataatggcgcaaaggtaagtaccgcagcaaacggtacagcaaccgtaaaggctttaccaaagacaacaaagaagagtgttacagtagcttctaaggttgttgtagatggagtctcttacaaggttacagcaattggagcaaaggcttttgcaaatgctacaaaagctacaactgttacacttccagccagcatcaagaccattggcgctcaggcatttacaggtgcaaagtctgtaaagacaatcgtcatcaagtctgcttccgtaaaggttgacaagactgcatttaagggtgtagacaccaaaaagatgacaatcaaggtttccggtatgtctgcaaagcagctgaaagcattcaaggctcagctgaagaaagccggattcaaaggaaccgtaaagaaagtttctaaataatcccgggttcttgaaaagggcgcacagagttgattctgctgtgccctttcccatagaaaaaattgggaatgaacaaaagtaataagaatcataaaaatgaaagaaaggagacatcatgtatcagaaagcaaaaaacagctggatcaaacacattgattttgtgatactggatattctgtgtctgcaggtttcttttttcctggcatatctcgtcagacaccggaatctgaatttatattccaattccgtgtatggaaaccttgccatcgtgttgatcctgattgatgtatgcatgatgttctttttaaatacatgtaagaacgttctgaaacgtggactgctcatagaactggcggcaaccatgcgtcaggtcagcctggtgatactgtttgccgtgttttatctgttctttgtgaaagatgcgggtgatttttctcgtattacactgtttctgaccgctatcttttatgctataatcagttatgggacaagaattctctggaaacggcatgtattgcggaatctgcggcttggaagaaagaattctatcgtgatattgaccgactgggccaatcttccacaggtgcgggaagatatccaacatcacagctatgaactgtttcagattcgaggaatcgctgtgatcgatgtcaatgaaaagaaaacacttcccgaaaaactgggggacatcccatttgtggcagagggagaatctgttatggattacttgtgccatgcatgggtggatgaagtatttatcgatctgcagccaaatgatccgcgggtagacagatggatcgaccagctgacggagatgggagtaacggtacatctgaaacttgccaaccggatggatctggcggcaaacaaacagtttgtggaaaatctcggacgatacacggtgctgaccacaagcatccgtaccgtaagtacctgggaactgtttctcaaacggctgatggatattctcggaggcatcgtcggctgcatcctcactggaattctgtttctgatccttgcaccgatgatctatcatgaatcgcccggtccgatcttcttcggacagaccagagtcggaaagaatggcaagaaatttacgtgctataaattccgcagtatgtatctggatgcggaggaacgcaaagcggcacttgctgcagaaaaccgtgtatcggacggaatgatgtttaaactggattttgacccgcgcatcatcggcagcaggcgtctgccggacggaacgataaaaaaggggcttggaaataagatccgcgactggtccatcgatgagtttccacagttctggaacgtgctcaaaggggatatgtctctggtaggtacacgtccaccaacggaagatgagtgggtgaaatacgagttgcaccacagaagccgcctggcaatcaaacctgggatcaccgggatgtggcaggtaagtgggcgcagtgagattacggattttgaacaggtggtagcacttgatcgcagttatattgcgaactggagcctgggacttgatgtgaaaatattgtgcaaaacagtgggagtcgtgctgagacatgaaggtgcgatgtgagcggtaaatgggaaaggagagggcatttatgggaaggtttgggaaatcctatgctgcaaatatgcttgccgcgtattatagcaaaggatgtgattctgaaaacatgttttcgggattagaaatccgtaaatcatcggattttaagttgcacctgaatcaatatgatgtcatccatatgggaatgaacgaatgatctttctgagcggcagaaatgccgcacaggaagaaatttcgaccaagagggtggggtgacagccagcggacaggtgagcaagcctatccgttctttgtgttggctgagaaattgatgaagaaattgatgaagaaattgagtgggattgtgggaaagatttatgagtaagaaacttgcgattgcgatgttcggacagaagcgattatcgagagaaggcggagtagaaatcgttgtcaaagagctctgcacccgaatggcacagaatggctgtgacgtgacctgttacaacagagcaggccatcatgtgagtggtgcagaatatgacgatgctggtaaaacggagtacgagggaatccgtcagaagtctgttccgaccattgaacggcgcggacttgcggctgtaagttcatctttttttgcagcagtatgtagcgcgtttgggagatatgatgtggtacatattcatgcagaaggaccagcattttttgcatggattccaaagctgtttggggaaaaagtcgttgtgacgattcatgggttagattggcagcgagagaaatggaaagctggtttgggatctaaatttattcggcaaggcgaacgtaatgcagtaaaatatgctgatggaattattgtattaagcaaaggtgttcaagaatattttcgagatacatatggcagaaaaacattttttataccgaacggagtaaataggcctgaaatcagaagggaggagttcattaatcagaaatttgggttgacaaaagattcctacattctgtttttggggcgtttggtgccagaaaaaggtcttcaatatctaataaaagcattcaagtctgtaaatacagaaaagaagcttgtaattgcggggggctccagtgatacagattcatttataaaagaattgaaagaattagcaagggatgaccaacgcattatttttactggttttgtacagggacagctattggacgaattgtatagcaatgcatatatttatacattaccgtcagatttggagggaatgccgctgagtctactagaagctatgagttatggaaattgttgtcttgtttcggatattcctgagtgtattgaggtcgtagaagataaagcgattgtttttaaaagatcggatatcaatgatttacgagataaattgcaagatgcttgtgataatttcaagatggtatctgagctaaagcaacacgcggcagattatatctgcagtaaatataattgggatgaagttgttgaagaaacgttgaacgtgtatgggagtgaaaagtagtgcggatattgatgataaatactctcctctaaccgaatgcgggtggtgagatatgcatagtaaaaataccggggaaatagcgtaattacagcactttttgatggttggggtgagctgcgagaacagttttggtctcagaatctgttttcagcaacagcagatgattttaccataaggactttcagtgttactacctgcgtttgtatggagaactccggtttatgaacaacacattggacgtgcttcatctgaacagaggttgtgaaatagaaaacaaaagggacaatacatgaataaacagattgcggtaaaaacaagggaaaagtgggtcgatgatgtaaaagtaatcgcctgtatattggttgtggtggggcatttttttcagagcatggtgaaggcgagtattctgcctgaaaatgatttgtacaaatggtttaacacaacgatttactacttccatgtgccgctgtttttcgtttgtagcggatacctgtatcagaagtgcagtaaagtaaacaacatgaaaagttggcgcaaaaatgcagtgaaaaaggcattggcacttggcataccctatgtgacttttacgactgctacatggatgctaaaaaagatgttctcaagcagtgttaatgatctgattggaaatctcggtgatacattattttttcacccgactgctccgtattggtacttatatgcgttgttctttatcttcctagtcacgccgacttttagcggcatgaaagctaccgcagggggattgatagttgcactagctgcaaaagccttgattttgtcggggggggagtacagcgtttacgttgtatcagcggttctttcaaacgaaatctggtttgtactcggtatgagtatttgtgcgtttaatgtgcaactgaagggtagcaaggtacaaggaacgatattcggcttgctatttataattttgagcattgtggtatatacagcgaaaatcagtggcagtgtgatttctttcgcaatgggattgctggcttgtgtagccgttatcctgatggcggcgggaggtgaaggaagacttggcaaaggcgtggattttcttgcaaaatacacaatgccaatttttctgatgcatacgttgtttgcggcaccaatgagatctgccttactgaaattaggcatcggaagttctgcgattcatgtggtgctgggactaggaattagttttataggtccgatcattgcggcttggattatgaagaaaacgaagtggttggagttctttctgtatccgaataaatttgtgaagataagaaattatcaaaaagtgtgatagaggctgacagtgacttgaaaaatctacaacaaggaaaagaggataatatgcgtattatcgagataaataaatttttattcagaaacggtggcagcgagacgtacatatttaagttgggtgaggcgttggaacagcatggacacgaggttcagtacttcggaatggagcacgaaggccgctgcgtgggcaaccgtgtcaatgcttacacaagtgacatggacttccacggtggcagcaaactgagtaagctgacttacctgatcaagaccatctatagcaaggaagcaagagaaaaattaagactagtactagatgacttccagccggatgtctgtcacctgaacaattttaactaccagctgacaccttccattattttggaaatcgtgaagtggcgcaaggagaccggaaggcagtgtaagattatcttcacggcacatgactaccagctggtctgcccgaatcatcaattaaagaaccctatcacacatgaaaactgtgagaagtgtctcggcggtcatttcatgaattgtgtaaagggaaaatgtgttcatggttctactgcaaaatctgtcgttggcatgatggaagcggagttctggaaagggaatggagtatacaagtatattgacaagattatttgctgctcggagttcctgaagaccaagatggacacgaatccgctgtttgcaaccaagacaattgcaatgcacaacttcgtggagaaagtagagcctaaagacgtggaaaagaaagaatatgtcctttacttcggccgtttctctgaagaaaagggcattggcacactcattaaggtctgcaaggaactgccggatgttcagttcattttcgccggcgctggtccgctggacgagacagtaaatggtattaaaaacatcaaaaacgttggcttccagaagggcgagaggttggaaaagctcatccgtgaggcgcggttctccatttacccgtctgagtggtacgaaaattgtccgttctctgtgatggaatcccagatgtacggcgcaccggtactgggtgcgaacattggtggtatcccagaactgattcaggttggcaagaccggtgaactgtttgagagcggcaatgctaaagatctgaagcagaagatcgagaagctctggggtgataagaagttgtgcgaagaatatagcaagaactgtaagaacatcagcttcgataccattgatgagtattgtgaaaaaattataacggtgtatcaataaggctggtatgcggggaggaaacttgtggctacaaaagtggagcgatacgagggaatagatggtttgaaggcatattctattataggcattgttctgatgcatgtccttgtaaatggagaatatgggataggaggatttgtgtttgagcggcttattccgtctttcacaaacctcgttttcctttttatgatggtcagtggttttggtatgtgctgcggctattatcagagaattattgaccagcaaattagtgtagaggatttctacaagaaacggtacatcaaaatctggccgtattttgcattgctttgcacgttggattttgtaatttcgccgagtaaggaatctttgtttgaagtttttgcaaacataactttgtgtcagggacttttaccgaatgcaaatatttcggttatcggtgtgagttggacattagctgttatatttgtgttctatatgttatttccatttttttgttttctaattggaaacaaaaagcgagcgtggagcgtggcagtagtagcactggtatttaattgggtatgcagtagttatttttttgatgcaaatcatgtaattaagtttagcgcaagaacaaatattatttatgatgcaatctattttatcgttggaggtttatgttatctctatcgaaaggagttgggtaattttgtactgaagcataaagtggtcgttggtgtaactatgttctttgctatagctgcttattttgcgataggtgcgtctacacttacgatattgttcttttgttttgtgagtttggtgtatactctcggatgtaatacagggggggtattggtcaatccggttgcaaaattcctcggtggtatctgtttcgagatttacctgtgccatatggtaatttatcgtgtacttgagaagttacaccttgttcatctatttggaaatggtctgttggcatatatcttcacggctgttgcagttatctgcggttcggttgtgttctcggtatgtgccaagtggttcttaaataaaatcgaaatattcttaaaagagagagttaggagagttaatcgtgtctgaagaaaagaagttaaatggtacggtcatcgttacttatcgttgtaatgcgcggtgctctatgtgtaaccgctataaagcgccttccaagccggaagaggaaattagtattgaaactatcaaaaagctacctaagatgtatttcacaaatattactggtggggaaccatttattcgcgcggatctaaaggacattgtacgtgaattgtacaagaagtcggataggattgttatttcaactaatggattttttacggatcgcattgtcgatttatgtaaagagtttccgcagattggaattcgcatttctattgaggggctggagcagactaacaatgaaattcgcggtctgcagaatggctatcaacgtggttatagtacgttaaaaaaattgcgtgagatggggatgaaggatgtaggatttgggatgacggtacaggacaagaatgcgccagatttagttccgttatacaagatttctgatgagatggggatggaatttgcaactgcttctttacataatagtttctattttgttgaggcaaagaacatcatatatgatcgtccaatggttgctaagaattttgaatgtttagttaatgaattacttcggagcaatagccctaaaaaatggtttcgtgcctattttaaccacggtttaatcaactacatttatgggcaaaaacgtttgttgccttgcgacatgagttttgatacattctttatcgatccgtacggcgatgtcatgccgtgtaatggaacgaaagataaagaagttatgggaaatttgaatacacaaagttgggatgaattatggcatagtgaacaagcggagagggttcgaaaaaaagttcgttgttgtgatcgagattgttggatgattggttccgcttctcctgctatgcacaaatacatctggaagcctgccgcatgggtattgatacataagtttaaagctttgtttacaaaatatccatatagtatgtatgaacttgaaatttgtcgagattatcgtgatggtaaagtcacaaaagaggaattagataaatgtagcacatgcgatttgaattgtgttgttaataatggactgagtgaagccagtaaagagcagttaaagtataaaactggcgaagaaattgtaaatgcagacattgaactgcaaatgaaggagtaaaggatgcttttaactatattaacccctacatataatcgtgcggggatgttgccgcaactgtacgactcactgaaaaagcaagcatgcaaagattttgaatgggtaattgtagatgacgggagtacggataatacacaagaagttgtgaaagcttggctattaggttctgattttccaattcgatatttttacaaagaaaacggtggtaaacatactgcgttgaattatgcggttcagaaaattgaagctgaattgacttttattgtggattcagatgatgcactgacgattgatgctgtggaaactattttaaggtatcatagaaaatatgaaaatcgaagcaatatttgtgggtatgcctttttgcgatcttatccaaatggaaagataaacgggaaaaagtttgttccggatgaaagaattgcatcatacatagatgctaggattaattctgatgatacccaagcggataaggctgaagtatttaaaacggagtgccttcgtgagttcccatttccagaatatcaagatgaaaaatttcttggagaagatattgtttggatcagaatggcgagaaagtatatgatggttcatattaataaagtagtttatgtgggaagttaccaagtagatgggcttacaaaaaataggagatttaataatattaaatctccagttggttgcatgaatagggcaattgagtttatgcaaccggaacttaaatggaaatatcgcataaaaggtgcaattcagtatattgtgtacggaaaatttgctggatatacgacaaaatttttgtatagtaatattaaaactaagctgcttgtgtctatatcctttttacctggaatattgatatataatgtatggaaaagaaaatgtgattttatcgagaaataagggggactaatgaagctatcttttattgtgccaatctataatacggaaccttttatattagagagatgttttgagtctataaattgtattgaaaaactagagtacgaatgtatattgatagacgatggatcaaaaggagaaattggagagttttgtgcagactattcaaacaatcataaaaggtttaaatactttagaaagaaaaatggtggcgttagttctgcaagaaatgaaggtattagaaaagcaaaaggagaatatatttatttcgttgattccgatgatacaattattacagatgtgtttgaccaatttgttcacggttatgaaaacgcggatttagtctttacagatttgatattggttgatggtcaacataaatgcagatggggaaatatgttaggaacaacatatgatatggttctcaaaaggttaataatggatggaaaaatcaatggaccatacgctaaattttggaaaaaagattttttagaaagaaatggacttctttttgatgaaacaatggtaagtggggaagatgcgttgtttttgttatcttttttatgctgtaatcccaagatgatgtatgccaatgtggatacttatttatattataaagagtcaaaaagtggtgataacaggataagtatgtatccatatatatgtatacaggattgcgaaaaaaaatataagaaaattttagagtgtattgaatgtggaaactatgaaaaaaaagagaaagttgaattaatgattcaagagactgaacaattaattcatgaattgtttggtcttgaaatgagtatgataagtgtaaatgtatgggattcgaaagctaattctaaatttacagagattatagaaaatataaatggcgatttatgtgaaaaggttaataagattagtaaattaaaacttgggataatgaaaagtgaacaagttaaaatgaaacaaatattttcggattttcgaagaatttatctaaaaataaaaggattaagataaataaaaagtccggaatttattatgacagttattataaaggaacgataatgaaaattaagataaatagaagcgattggttatatttaggtgtaatcattatggcgataagatattttttatctatgttacaattagaatttagtccaattgttacaaatagtatggttgtaataggtattgtttgcatgattgctaaaatttcatgtacgaaatacggaaaaaatgagtggatagtttttatgatttcgtttgttttttcacttctgcttttatatgcaaaagaagatgaaacatttcttgttattaccatttttataatggctatgaggaaaagcaatgttagaattttggtaaaatgttggacatattgtaatatcatacttttcattttaacaattatttcttccattatagagggacagaacatctatgttataggaagatatgaaggtattcacatgatagatgttgagcgatattcgtttggcttctcgcatcctaatggtgtgttagcagctttttttagaataatatgtggcattatttacttagatgaaaataagagtactaagaaaatagtgacgtttgaattaatagcaattcttctgtattattatacgaaatctagaacaggattggtgtgtattactttgtttttgtttgtatgtttttggattcaaaaaacaaaaggaaagtcttctgaatcattaatacctaaagcgttattatttttagagatgggtgccattctattcgatttgattgcagtgtatacatatggaaaaagcaaggctcttgttgcgctcgattatgtcttaacgggaagatttagtttggcatatagaatgtttgattatgttgattggtccttatttggaacaaatatacaagcagagcaattaccattttctttggataatagtttatggtatgtaattttaatgcaagggattattttatttctgctgcttacaattttgtattgttggagcatgtggaaatttggaatagaaaaaaggtatttggaggctaatattatctttgcttttacactatattctatatgcgaaaatatgtatagcgctttatttttgaatttgggattaatattagcttgttattatttaaataatgaggtaaagcaatatgggtaatataggcgaaaaaaataagttaagcattattgtccctgtgtataatgttgagagattgaagaacttcagatggttaaggtacgtatattgatagagggatagctgtaccaagaaatagatttggaaaatgaaggaaataatagtagcgtatggtttatttgagcaatgaggaaaccaagcagcagttattactaatgctgaaggaaacgatagattttttagatgcaaatgatattagatatagcattacatccggaacgatgcttggtgcagtacggcatcaagggtttattccatgggatgatgatatcgatatcggcattctaagaccagattacgatagaatggttgagattctcaaagagaagaagcagattggtcagttagaagcaatcggattcgaacttggtaatagtttgtttccattcgtgaaaatagttaacccggatatctacgttaaggaagaagggacgcgtgatacacagcgcctatggatcgatattttcccatttgacggcatgggtaaaagcgtatttaggattaaactgctgaatactacggtacggccgattctaaaaaaattgctttggtttgcaaattcagaatattacacgagccatcctagaaattgtcgacatataatatggaattacttttggtatggaatttccaaactgtgttcaccagagttttttatccgactgcttattagaaattgttccgggattaaggtgtcagattccatatacgttgaggatagtacgtgggggacgaaagcagttccgaaggaagtatttgacgaaatgcgagagtatcggtttgaaacgatgactgttaaaggatttaaagattacgatacatatctcaaatgcatttatggcgattatatgacacttccaccagaggaaaaacgtgttaatcacggaattaaaccatggagagtgaacaattatgagaaataaagcaaccctgatcaatatgatttcgggattaatattacagatgtttacgattctcagcggttttatattgcctaagatcattctcacgagctttggatcagaagtaaatgggctagtatcgtcattgaaccagtttctgagctatatttcgttagtagagggtggtattacaggtgtcgtcatggcaaacttgtataaaccgattgtagaaaaggatgagcagaaaatatcggcggtcatggtaaccgcaaatcgtttttttaagaagatcggtatcctgtttgtagcgtactccgtaggactatcaatcgtttatccgcttctttttaaaacagagtttaatttcgcctatgtatgctcccttacgctgattttatcgattacggtgctggttcagtatatgttttcgattacgctaaagacgctgctggatgcggataagagggtatatgttgttaattttacgcagacgctgattgtcatctgcaatgtgatatttgcacagatttccgtatgggtttatccgagtattcatatactcaagttgatcagcggtatcctattcatacttcagccagtcatttttgggtatatcgtaaaaagagactataggattgactggagtgcagctccggagtattcattaataaaatcgagatggagtggatttgcaatcaatctggcagcgtttattcatggcagcacggacatcaccatcttgaccattcttacgaaccttaaaacggtttctgtatatagtgtgtatgggcttgtaagtaatgggataaaagcacttgtgcaggcatgtctttctggtctttcacaaacggtaggacaggcttatgcaaaaaaggactggaaagagttaaatcagaagctggatctatatgagtatgtagtgtttgttctggtgtttttcatcttcacggtgacggcattactgattaatccctttatccagttatacacaagagacgtgacagatgcaaactacaatcaaccgatatttggcattcttcttatcatttcagaaggactctatctagtgaagtttccgcacctgaatctcgcatatgctgcaaataaatttaaggagattacggtacctgcgtatatagaagcactgctgaacatagtgatttcagtaattttggtgcataaattcgggctggttggtgtggcggtaggaaccatcgtggggatgacttaccggatgatgtttcatgtgtattacacgagtaaaatcgttccgggtcgagtacagagcattttctataagaagttttgcctgttcgcgataagtgttgccatcggatttatgatttgcagtctggtcataccgcttcgcgtagtgacagttatgaattgggtaattcatgcaattttgtattgtgcagtggttggcggctgcatcttattaacaagtgttttattctttaaaaaagagctaactttttttgccaaatatttaaagagataaggaagtgagagtagaaaaaattgaaagaacgaaattatttatttgataattgggaatttttattgattgtattggttgtgtttggacattctttagaagaaatcagtttggcacaggattacgcgattattagagcgtggatttattcgttccatatgccggcattcgtattcatatcaggctatttttcaaaaagtgtacgacggggcgaaggtgcgagaaaaacaattattaattgtgcaataccgtactttatatttaacaccatttttgcgttatgtactgagaaaacgttagttattaatattcttacacctaaatatattttttggtatttatttagtttgttgatttggcgcttgctgattgatgatttgaagcgaataaagggaatatttattttagcgatgttacttggtttatatgttggtggaattcatgaagcggatcgttttttggcgatttctagaacaattgtatttttcccatacttcttgttaggggtatttgctgatgaagcaatgatagagaaagttcgaaaaatgccgaaacgttattctataattatgtcagtaatattgtcaataagtgtaattatattacacatcaaaaatatgattccggttaaggcatatgaaaatattcaatgttatcaagaatctggtatgaataacttacaagggatggcgatacgcttattttcttatggggtaggaatcgcagccattttctgtatcgttaatttagtttcgaatgagaagaaatggtatacagtctatggaagtaggacagcgtgtatttacatagcgtcagctttttcagtaaagattttgtataaatttattgactatatttggaatactgattttttgttaagtcatatcgaggttggaatcttatggtcgttatgcgttacgataataactatttttacgtttggaagtaaaaaaatttcagatacatatttgaatgtaaacaaaaaacttggagatgtgttagtaaaaagtggagaataagtttatgtacgattatttaattgttggagccggtttatttggttaggtatttgccagacaggcaacggatgccggtaagaaagtgcttgtgatcgacaagctgtatattccgttccctatgtcaccggaatatacaaattctaaaaaagaacaaagaaagattcttaaactaatgcatgaggtcaagaaggatgaatcaatgatattagtagcaacaggttccctggtaggagaaggtttcgattttccaagactggatacactttttatggcaacacccatatcattccgtgggatagttgaacagtatgcaggacgattgaatcgtgattatgcaggtaaagaaaatgtaataatatatgattatgtggataatcgtatcccgatgtttgataatatgtatatgaagcggctgaaggcatataaacagattggctacgagctttctagtggcttgaaagccgataaacagatagttaatgcaatatatgggggagataattatagagaaactttccataaggatctacttgatgccaataaaaatataatcatttccagcccagccatcagcggacaaaaagtttatgaattaatcagcatgctaaaggaaaaacaggaggcaggagttcagattacaatagttacatggatgccggattcatatggatttggtgatgcagcatattggatgcagctacatgaagatatgcgtaaagctggcttttatataaaaacagtagaagaatattgtgaccgttttgctgttattgaccaggaagtagtatggtatgggaatattaatctgctggcgaaggataagatagataatagtattatgagagtcatgagcaaagatatagcaggtgaattgatggagatcacatttggcgataatgatagagaagtaaggtgtaatgtaaatgactgaacaagaatttaaagaaatattacataaagaggaaacagatacagttgaatttaagtcttgggttaatgcaagaaatatgaaggaaattatatcgcttgcggttgatgaattgatagcatttgcaaatagcaagggtggaactgtttattttggagtagaagataatccggttgtggttacaggatgtgatagaaactatgatgggcaacgaattatagaggggatttatgatagaaccattccaccactattcaccgaaatatcagattttgagtatgagggaaagctcgttattgcaatatcagttaaagcagatggaaagacatatacaactacggatggtagatgcctgaaacgattggggagaaattcaaagccagcatatcctgatgaattaagtgctgtatattcttctgttcagaatccggatttttcaggaagaattattggagagagtactctggatgatgtaaataaactggaagtgtacagcttaaaggaaaagctgagagtcagagattctaaatctacattgccggatttggaggatattgagtttttaagagatttacaacttgtaaaatatgatggagatgtagaaagactgacgattgctgggttactgttcgttggaaaagaagcatctattcaaagattgttaccgcaggcggaagttatatacctacattattcagctgataatttggaggaatatgatgcaaggctagatttgaagttgccgttgataagcgttatcgacaagttgacagagcgggtacaggcatacagtaagatcgaaaatattcaggtaggattattcagacttgaagttgaggatttccctgaaagagtatttcaggaagcattgcttaatgcgttgtctcatagagactaccagagtaatgctgcggtttatgtaaaacaatacccagatcgaatagttattgaaaatccgggaggatttcttgatggaattacagaggataatattataactcatccatcgattcccaggaataaactaatagcggagacacttcaaaatttgaagtatgtccagaggacaggtcagggagtagatattatttataaggacatggtttcaatgggcaagccatatccaagatatagatcatttaatgatgcagtttcgcttacaatatttagtgcaatagataatactgaatttgttaagtttattacagaagtacaagataaaaatagtaaaattatgtctttggctgagatgatgatattaagagatcttttagataacagaagggaacagttatcagagttgtcgagaaaagtccaaaaatctctggatgaaacgaaaaaatcatgtaatgaactgattagtagtggattaatagagattgttggaaaggaatacatgctgacagctaaggtttatgaagcattaaagtcagatgtggaatatacaagagataaaacagtccagtatatcaaggctaaaaatatgattttagagtatttacagacgaatgaccagataacatctgctaaaatacaggaaatgtgtggatttactaaacaacaggcaagaagtgttattgacaagatgagaagtgagaagttaattaacttaaatggcaaaggaccggcggctagatatgttatatttgatggattgagtgataattgagtttggagtaaaataaaactcaatagaaaactcaattacttttaatggcaagtactggagtaatgaatacgctgaaaatatgattgagtggagtctttttaaaaactcaattaaaactcgttgatgtgcgaaaaaatcacattggcgggagtattggaaatccatgtagaaccggaacatgtgaaagtatatacagtttatcggaatgataaaattaatcatactgcaaatccgttaaaacttcactatggaatgaatgcaagggagcacaacgtagaacctatggagaagacagaatggaatgcaaaacaagtagagatttcttttgtgaatacaattcagtgatcgggatggaggtccgatattatctacagggttataaaggtacgctgattaccgatggctaccagataagttctcaattgtgagtaccacaacataagatccaatgatttatcgtatcctgaaaaatccaagtgactatacagagtttttattaaacagtaatattaattttgacaggtgcatggtataggaaaaaaggatgagataaaaccagcgtctaggctcgacacataaagaaaggagaacgaaaacgatgaaagcattaaaaaaacaacaaattacggtcattttggtactgtctgtcatactcagcacatttgcagctgttacacctgtaagtgcggcgacgctgtctgcacagcagtatttggaaaagatggatatagcggtgcgaaacttaaaatcatatgattttacgcagacaaccgatcagaagatgacaatggaagggcagatcattcaaaataagacggtggtaaagcaaagcgtatacaacagtcctctgaaggtaaaaagcgtaacagatacaaccacagtacttgcaggaatgagttctaagaaccaggcggttgcctatctgacaaaagatgcggatggattgctgtgggagtacatttcttccaatggttccggatatcagaaaacagggattttaaactataccaatcagatcaaaggtatggatatttccatgtattcggacgcaaaaattgtgaaaaagaaaataaaagtcaaccggatcaataccgttcagatttcggcgcaggtaaagggctccgatgtggtgaaatttttggaccagatgggaatgggcaaagagatcaatgcggtagctgctgtggattacaatacgttgccggcaatcaaagtgacctgttggatcgataaaaaaacctgtcgtccagtcagaaccacggcggatatgaaagcgtttatgaacgggtatatgtcggcgctgtatcagaagctgggacaggatctgaaacttgtttattcgcaggcaaaagcaacggtaacctataaaaattttaataaggctgcaacatttaccataccgaaggaatgcagataaagattgtagtgatttatcccattacaaccctgggacgtgttatggcaatcagataactgttttcctggtgctgagggaggatttgtcgattcttccccagaaggataccatattgcggatgaacgatattatggtcatccgggaggaaaataaaaaataacagaataggaaaaaggtacgcgttccgtcaacttttcttggaaattttgtacaaaaatattttacgaaaattatcgaaaacttatattgcgaaaagagggctgtttcgttagaataattttgtaaaaagtaatggccatactttttgtcaactgggaaaaggatataatggaaaagatggagggaactatgaaaaagagattgtatcaggctcttcttggacttgtactgtctgcatcggtagcagccgggggattttttgctgcagtaccgcagactgcttatgcgcagaatgttgcgacagatttggagtccggatatcatcttgcagataatgtgcaggatggtgtgattttgcattgttttgactggacataccagcagatcatcgatgaattgccggatattgcaaaagccggattttcatcggtacagacatctccggcgcagctggccgtgaagggaaacagtatctggtattatctgtaccagccgaattgttttgctgtgggagattccggactgggatcggaggcagatctgaagagactttgtacagaggcggacaaatacggaattaaagtgattgtggatgtggttgcaaatcatttggcaggagatcacagcaatattgattctgatttgaaaggttctgagtactggcatcatgcaggcagtaatattaattataagaaccgctggcagatcacgcatggagatatcggtatgccggatctgaattcggaaaactggctggtgcagcagaaagtttcgaattatgtgcagcagctgaagaacgatggtgtggacggtatccggtgggatgctgcaaaacacatttccctgccgtcggaaggctgtgggttctggagtacggtcattgacaagagcatgtacaattatggagaaattcttgttggggcaattgatgaaaatgaagtggatcagcgtaccgcaagcaacatcaattggatgaaagaatatacctcttatatgtcggtaaccgacagtaattatggaaacgatgtgatcaacgcatttaacagcggacgtgttccgagcggatttggttcctgggttgtttccggactgagcgaagatacccttgtttactgggcagaaagtcatgacacttatgcaaatgatggcggatcaacaaaatatgtcgatcagaacaaaatcgatcgtgcatatgcaattgtaggaagccgcgatggtgcatcggcactgtatttctcacgacctgcgcagacagacaaagaaaaaattatggtcggacagaaaggaagcacgcattttgagagcgcagaggtggctgcggtcaatcatctgcacaatgcatgcatcgatgaggaagattattatacaacaacgagtgatctttctgcagcagcggtagtcagagagagcggtgcatgtgtggttcttggaagtggcggtaaccgcgaggttacgattgcaaacggcggactgcgcaaagatggaagctataccagaacaactccgggagtttactatgacgagattacgggaaataaatttaccgttacacaggataccatttcaggagaagtgggctccaccggaattgccgtattttataaggatgataatgggcagggaggcggatctggcggatccggcggatcagagaccagtgaaacccgtgatatttatctggatgttacaaactgttcttggtttggcagtgattcagcggtagcagcaataaaaacagataaagatactacattttcaaagatgacaacaacagttactacggatacaaataaaacagtatatacggcaaaggttccgaaagacgctacatctgcaaccattgtgcgtatgcttccgagtggaaaatactacaatgaaaaaaccattacactgaaccagagttataaccggtatacttcagatggaaactggttctcacttactaccgatctgtataacacacagggaggcagcggagagacacagacaggcatcaacgtatattttaccaataattataattggagtaatgtgtatgcatatacctggggaggagacggaaagcaggtgcagtggccgggtgaaaaaatgacttatgtggggcagaatgagtaccagcagtcggtatacatgcttcagatttcagcggattgtaagggactgatttttacaaacggttccggtgcgcagaccgtggatatcacaagcgggataaaggaaaatggcggatattatatttccggaaatgcttccggtaagtattcggttggaacatacacctatcaaaaataaatgtttctgagaagagagaatagctgtttgcgaaaacggctattctttttttatctaaaatggcatatttcttgtcagaagcaattgaaattataattcaaatatgataggataaagtaggctgtctagtgtagaaaagacacataaggcagagttggtgatatatgtaatgtcagagaatgatagttactacatataaaattataaaactacggaggaagaaacatgaagaacaaagattatttaacagtaagacaggaagaattaatgaattttctgtggaaggtcaatgagccgttgactgccaacgagatggcagagcgcctggcagaagacggatggaacaatgttacattgtttaagaccgttcagtctctgacaacggatggctatctggaggttgtaggacttgagaaaaccgtcaagacttatgcacgtaaactcgctccgtctatgtcaaaagacgattattatgcatctgtattgattaagcgtggaattgacagcagttctattgcgaacattacagctgctctgatcggagcaaaagataagcaggcaaaagaaaaaaatgcagaggttattgcaaagttagaggagattattgataccctgaaaaatgatgaggaataagaatgcaaataacgatattttcggtttggatgacgttcgtttggtgtagcatttttattgtactgtgctacattctcagaaaacgatcggttctgctgaatttatccagtatgacaggaatcatcattttatatttgttttgtctgatcaggcttgccgtcccggtggaattgccatggacgaaagtggtatccggaggcagcctgtataatttcctgtatcagatattcgggtgtgaaataacctgtgtggcagggcacgaaatctatgtctatcatatatttgtggtggcatggggagtggtcatggcagttcttttgacgcggtatctgatacagtatcacagagttgtgtcgtatttttcagagatggaaaaaacggaagatacagaattaaataatattttagatgaaatttgtacggataaagaaaagcggaacattaagatcgtacagacagcagcggtagaagtaccgtgttgtattgggatttttgagaaacggatattgattccggacaaaaaatattcgcgtgaagaattgcattatattattctacatgaatatacacatttggataataaggatatactgacgatacagatgatcaacattctgtgtatcgtgttctggtggaacccgtttgtgtatattttaaaaggagatatgtatcagagtattgagatccgttgtgaccagacggttacaaagaaactcaaatcggcagagtggggtaactatctggcggtgatattaaaagagtataaggcaagtgtgcaggaaaaagaatttcgaaaacctgcaggagccatgccgttgtttgaagatcattcggatcatctgatcgaacgatttcgtctggtcgcggagggaaagcaaagtagttcgcgtattggaagaattctcgttccggtgattgcggttgcactgctggtgctttcgtattcacttatccttcagccgaggtatgaggaaccagagaattcgtatgatctgccaaatgatagttgtaaagaaataaatgggcagaattcatatctgtatgaaatagatggaaagtattatcttcattatgaaaggggagatgtcccaattgataagaagagtatggagctttttaaaaaggcgggtttaaaatttgaaggaggaaactagcatgaaaaagaagtttttaattgctgtagcgatttgtgcatcattatttgttgttgcgcctactgtaagtgtaagtgcggcagaagttgaaccagaagtacaggttcagagtgaaaagagcaatataggtgttgcaccatgtgcggatgagatcgtgatgaaattccgcattatcaatgggaaaaagttacagtatcgacgttggaaccagaccagaggatactgggtggataagaaatggattgatatgaattaaccaaagaatttgccggtgcagctgcaccggcattttttttataaatgattctttcgcaaattataattcttccggcagttcccacgcctgtgcctgttgttcatattccgaagcacgggagagaagatccccggcagagcatggatcacagggttcattttctgccagcgtacggtaacattctgccagttgaagcaatgctttttttcctgaaatttcaatatccagaacaggctgtgtctcaaatgcagcattataaaaccacagagaagcttcctggggattctgccgttcctggtagtattgtccgagctcataacagatttcggagcaggaagaactgcacatatctttcagacagatcgaaaagaaatcatccacagaattttggatacgggcagcgtgtgccagaatacacgcggattctgcatcagcgtgtgcttcatagtgtaacgaaaaataatccgccgcgcgtagaaaatcttcctcatccccacatttataaagttctcttgcatacatgcgcgtgattttctccgagaggacatgattttcacgaaatgctttttcaaacatggcaaaatcccgcttggcatgcatggtatgtgggtggtgcagaatatcaatatcactgtcatagatgacgggatcaatgcggatcgtttcgtgaaccggatcgacccatgaaaacgtgcgcaggcgtttaaaaagttttggacgtggctcttttttacagttctgcacggtgttgaaatccggtggggtgatatagttcatctgaacaatttcaatttccggaagaagagcacattttaaccggagaaaacgtctttgattttccagatcaaggtattcgtccgcatccggacagtagatgtaatccatggttgcaagcgaaaacgcataatttcttgcggcggagaaatcatcaccccaggtaaaatcatagatccggctggtgtattgtgcggcgatttctttggtgcgatctgtggagccggtatcaacgatgatgatttcgtccatcatggaagcaacggaatccaggcatcttgccagaaccggttcttcatttttgacaatcatacataaacttattgtgatcataataacagatggtccttccgaggttttcttttatattacactatcctgcaacagttttacatagaaataaagaaatatacttgtatcttttttgaaccatggctataataaaatttatgtggtgtgaaattataaaacaaattttggcagatatgcgccagccacttcaatatgtgccatgggcactgattattgtggtacttgggctggttgtaacaatcgtgctttctgaaaaaaaggatggaaaaaaagcatccgtccggttttttcgtatactttttgcgatttatatacttgtggtgatacagattacttttttttccagagaacccggttccagaaatgggtgcatgaatctggatctgttttccacgtggggatacagcgtggttacccatgcattttttattgaaaatattcttatgacagtgcctttcggaattctggcaccactttgttttcgccggctgcggccgatgtggaaatgtgttgtactcggaggtgtctgttcggttctgacggaactgagccagtacgtgacgaaacgcgggtattgtgaagtagatgatatgctgaccaacaccataggtgttttatgtggttgcattttgttatggctgattgaactgataataaaacaaaggagaaagaaatgaagtatgattatctggtggtaggagcaggattatatggctccgtatttgctcacgaggcagcaacaagggggaaaagagttctggttgtcgataaacgtccgaatattgccggaaatgtttatacggaggacattgagggaatccatgtgcacaagtatggtgcacatattttccataccaacaataaaaaggtgtgggattacattacaaaatttgcggaatttaaccgctttacgaattcaccggtagcaaattacaaaggggaactatactcgcttccgtttaatatgtacacctttaataagatgtggggtgtggtgacaccggaggaggcagcggcgaaaattgaggagcagaaaaaagccgcaggcattacagaaccgaaaaatctcgaggaacaggcgatcagtcttgtgggaaccgatatttacgagaaactgatcaaaggatatacacagaaacagtgggggcgtaagtgtacggatctgccggcttttattatcaagcgccttccggtgcgcctgacgtttgataacaattattttaatgcgctgtatcagggaattccgatgggcggttacacaaagatggttgagcatctgctggagggaatcgaagtccggcttgggattgattatctgaagcagaaagaggaactgaaggctctggctgagaaaacggtatatacgggagcgatagatgcgtattttgattattcgctcggcgcgttggaatatcgttccgtgcggtttgaaacagaacttctggatactccgaatttccagggaaatgcagcagtcaattatacggatgcccagacgccgtggacacgtatcattgaacacaaatggtttgaattcggcaaggatgatgagggacatgatttaccgaagactgtaatatcgcgggagtacagttcggagtggaaaccgggggatgaaccgtactatccggtaaacgatgaaaagaacggagctctttatcagaaatataaagaacttgcggaaaaggaaaaaaatgtaattttcgggggaagactcggagagtataagtattatgatatggacgctgtgatcgcttctgcactggaaatgtgcgaaaaagaactgggataggcttctagaaagatacaaaaaagagcattcgctgtatggttacagctggaatgctctttttgttatacatatttgtccagcatcattccggagtagatggatgtgatgtatggggttgcaaagttgtgaccgggatttttataggccacaacgatcttgttgacatagttcatcggattgatggagatattttccgcttcttttccgatggaatcccgaaattgggataaagtttcaaaggtattctgatcacgttccggaacaactgcttcacggagtgcttctttatcaatagagatggagccgttctcgtttgtgaccagaccgatgtcctgtaaagaactccggctcgaaccggatatggaaagaatctctgtctgaagtttgtttccggcactggcattggtgtctgcatacacggctgcggtggaaagtatggaattataggcatccaccagagactggatattgtccgcaattgcatccgcatctgttttaaatccaatgtttactttctcaccatcggttggctgatttaaggtcagttcaaatacctgattgatggaaaatgtgttggtcagggaagagtggcttgtgccattcagtgtaaaggcggaactctgtgcaggggaagtgatgcggtcaattcccagctgatccatgatttccgtggaacccgtgctggcatccggtgcaatggaaaaaagttcggtttcgttatctgccagaccggtctgtatggaagtcagtttcagcgcactcgaaccgtttccatcggacagtatttcggcggtaattccaagactggaggagttgacaagcctgaccagcttgtccagcacatccagattggtttcgtcggaattgatattatattgaaattcatatgcagcaccgggcgtattcagatcaaaagaatatgcgccgggacgcatcgacagtgtattgtcttttaaaaaacgtccctgattgatctggggtgtggcaagccgctgcacttcaatgtcaaagttattggttttactttcttcacttccgtcgccgatataggtcacactgactttttcgtcatcggaagacatggcaactttcttcttaaaagaatcctcaaatgaaccgtactggtcggaaagagatgccacaacgttctgaatggagcgcgcgttttccttgatgtctatggcatattttttcgcatcggtgagattcggaattttataaagaggcgaatctttatttattttgacaatttcattataaactttgcgcagttcacttttcttgtgtgaatcataacgtgaaaccgttttcttggcatacgtcgagatataataagcgtaagcattatcaatccttgccattgagattcccctcctttcttccctgaattgaggattgagagcaggacagtaacagacctgttctcctgtgaggtgcatatcctttgcaccaaaaagattctacttgaatagtatatcggcatcataccgcattttccatacccttgtatatggtaaaattttactaaaaattcacaatttggcgtaaaagctgcaaaaaatcataaaaaccattgtaaaagatgttgacggacatggaaaatcatgatatagtatgaaagcttggaagtaggtcttttttttatgcctttttttaggcgggacaaaacacgaaaattaaaacggaggtggaagttgtgcgtacaaagattacattagcctgcacagaatgtcagcgtcgtaattacaacatgacaaaggacaagaagactcatccggacagaatggaaaccaagaagtactgtagattctgcaagactcatacagttcataaggaaaccaaatagtccgtacagagcaaaggagttatgaaatgggacagacagaaaacgttgaaaaggctccaaagacaagctggtttgacggtgtaaaggcagagttcaaaaaaatcatctggccggaacagaaatcagttgtcagacagaccattgcagtgattgttacatccgttgtagtcggtcttattattgcactgctggattgggcaattcagcacggtgtgaatttccttgttggtttgaaattttaacggaggcatagtgatttatggcagaggcgaactggtatgtagttcatacctattcaggttatgagaacaaagtcaaagcgaatattgacaagacaattgagaacagacatctggaagaccagattttggaggttcgtgttcctcttgaggaagtgacggaagttaaaaacggagtgaaaaaacaggtttccaagaaaatgttcccgggctatgtgctgattcatatgattatgaatgacgatacatggtatgttgtccgcaatacccgtggtgtgacagggttcgttggaccgggaagcaaaccggtgccactcacagatgctgaaatgagaccgctcggaatcaaggctgaaaacgttgtggtggatttcgcggaaggcgacatgattgttgttatcggcggtgtctggaaagatacctgcggtgtgattacagcgatgaaccataacaaacagacggttacgatcaatgtggatctgttcggtcgcgaaacaccggtagaagtaagtttcgcagatgtaaagaagatgaattaaggaggcaattccaatggcaaagaaagttgaaggatacattaagctgcagattcctgctggaaaggcaacacctgctcctccagtcggaccggcacttggacagcacggtgtaaacatcgttgagtttacaaagcagtttaatgcaaagacagccgatcagggcgacttaattatccctgtagttattacagtatatgcagacagaagctttagctttattactaaaactcctcctgcaccagtactgatcaagaaagcctgcaagatcaagtctggttccggtgaaccaaacaagacaaaggttgcaaagattacaaaggcacaggttcaggaaatcgctgagctgaagatgcctgacttaaacgctgcaaatatcgaagctgccatgagcatgatcgctggtacagcaagatctatgggtgttgaagtagtagactaatctaagtttaagaagaaatgtgggagggtaattgatttcccacccgatattaccaccaggaggtttatatttcatgaaaagaggaaagaaatatcaggacgctgtaaaggcatacgatagaagtgctcagtacgatgttgctgaagcaatcgacctcgtaaagaagaatgccacagcgaaatttgatgagacaatcgaacttcatcttagaacgggctgtgatggacgtcacgcagagcagcagatccgtggtgcggttgtactgccacacggaacaggtaagaccgttaaggtattggttttcgcaaagggaaccaaggtagacgaggcacaggcagcgggagctgacttcgttggaggagaggaattaattccgaagatccagaacgagggatggttagacttcgatgttgtagttgctacaccggatatgatgggtgttgtaggacgtctgggacgtgtccttggaccgaagggcttaatgccaaacccaaaagctggtacagttaccatggatgttaccaaagctgttaatgacatcaaagccggtaagattgagtatcgtttggacaagacaaatattatccacgtgccagttggaaaagcttcatttacaagtgagcagttgaacgacaacttccagtctcttatgggcgcaatcaacaaggctaagccttcaagcttaaagggtcagtacattaagagtgctgtattaacttctacaatgggacctggcgtaaagcttaacgttgtaaagattgctcagtaataaaaaaatcagaagtcgggaaccggaaacggttcctgatgaaatgataaaatgtatgatcagacttacacaagcaaaatgcggaaaacacttgacatccgcataagaacatattataatagcaaagcatattgccgaagacagtaaggtgctatcgcatattgcgacagcgtaaagggaaatccacctaccgagggaatttttgatgataatcgtcataaagaatgatacccctctgctgtaaggcggagggtttttattatacctcacgctatatgcaagaaataaaataaggaggtaaatgaatcgtggcaaaggtagaattaaagcagccgatcgttcaggagatttctgaaacaattaaggacgcacagtcacttgtagtagttgactaccgtggacttacagttgctgaggatacacagcttcgtaaaaatttaagagaagctggcgtaacttacaaagtatacaaaaatactttagtaaaccgcgcaatcgagggaacagagttcgagagcttaaaggatgtcctggaaggacctaacgcatttgcagtatctacagaagatgctacagctccagccagagttctggcagagttcgcaaagaaggctccaagccttgagatcaaggccggcgttgtagaaggaacatactatgacgcagagggaatgaagcagatcgcaagtgtaccaagcagagaagtacttctttccaaattacttggaagcttacagtcacctattacaaatcttgctcgcgttcttaatcagatcgcagagaagggtggcgcagcagatgcagcagcagacgcagcaccggctgaggaagcaccagcagcagaataattattaaaaataaaattataacggaggaaataatcatggcaaagttaacaacagcagagtttatcgatgctatcaaagagttaagcgtattagagttaaatgaccttgtaaaggcatgtgaagaagagttcggcgtatctgcagcagcaggcgttgtagtagcagcagcaggcggagacgcagcagcagctgaagagaagactgagttcgacgtagagttaacagaagttggaccaaacaaggttaaggttatcaaggttgttcgtgagatcacaggtcttggactgaaggaagctaaggacgctgttgatggcgcacctaaggtaatcaaggagcaggctgacaaggcatctgctgaagacgctaaggctaaacttgaggctgaaggagcaaaggttacattaaagtagtctgtgcgtaagcgacgagaaaccaataataacccggcagagatgcttgcatttctgttgggttattttatttagctgtatcccctctctctatctgaaaaagttctcaaaataattcttgcaattcccttgattttattgtatagtataagttgcactattgtggtgcactaggcatttccatgctcttttttaggaaaaactagattgaaataaaaacgagaggtgaaacgtcaatggagaaaaacagaatacgtccagtcaaggctggaaaaggcttgcgtatgagttactcaagacagaaagaggttttgcagatgccaaacctgatcgaagtccagaagaattcttatcagtggttcctggatgaaggtttaaaagaagcatttgcagatatctccccgatcacggattacagtggtcatctgagtttggatttcgtcgattttacactgtgcgaagacgatgtgaaatatacaatcccggaatgcaaagagagagatgcgacatatgcagcacctttgaaagtcaaggttagacttcataacaaagagacagatgagattaacgaacatgaaattttcatgggtgatcttcctcttatgacagagacaggtacgttcgttatcaacggtgcagaacgtgtaatcgtcagccagttggttcgttcccctggtatctattacggaattgctcatgataaagtgggtaaaactctttattcatgtactgttatcccgaaccgtggtgcatggctcgagtatgagactgactccaatgacgttttcagtgtaagagtagatagaacccgtaaagtgccgattaccgtattgcttcgtgcacttggtgtaggtaccaaccagcagatcattgacatgttcggcgaggagccaaagattctggcatccctgcagaaggacccggcgatcacagagcgtgagccacagggaagttttgaggctggtttattagagttatataaaaagatccgtccgggtgagccgctttccgtagaaagtgcggagagtctgatcactgccatgttcttcgatccgagaagatatgacctggcaaaagtaggacgttacaaatttaataagaagcttgctttaaagaaccgtatcaacggacaggttctggcagaggatgtactggatccttctaccggagaagtaattgcagaggcaggtacaactgttgaccgtgatctggcagatcagattcagaatgctgcagttccggcgctctggattcagacagagacacgtaacgtaaaagttctttcttctatgatggtagatatcagaagctggattcctgaaattgaggacccgaaggctattggtgttacagaactggtatattatccggctctgcagcagattatggaagaaaacgagacattggaagagcgtatcgctgcaattaagagagatattgcagacctgattccaaagcatattacaaaagaggatatcttcgcatccatcaactataatatgcatctggagtggggcatcggaacagatgacgatattgaccacttaggaaaccgtcgtatccgtgctgtcggtgaattgttacagaaccagtatcgtatcggtctttcccgtctggaaagagtggttcgtgagcgtatgacaactcaggatcttgagggaatttccccacagagtctgatcaacatcaaaccggttacggctgcggtaaaagagttcttcggatcttcccagctgtcacagtttatggatcagaacaacccactgggtgagctgacacataagagacgtctttctgcattgggacctggcggtttgtccagagaccgtgccggattcgaagtacgagatgtccattattcccattatggacgtatgtgcccgattgagacgcctgaaggaccaaacatcggtctgatcaactctctggcatgctacgcaagaattaacgagtacggatttgttgaggctccgtaccgtaagattgataaatcagataaagacaatcctcgtgttacagacgaagttgtatacatgactgcggatgaggaagataattaccatgtagcgcaggcgaacgaaaaactggatgaggatggacattttgttcgtaattccgtatccggtcgttaccgtgaagaaacgcaggagtacgataagactgcattcgattacatggacgtatctccaaagatggtgttctccgttgctacagcactgattccgttcctgcagaacgatgatgcaaaccgagcactgatgggatctaacatgcagcgtcaggcagtgccgcttcttaccaccgaggcacctgtagtaggaaccggtatggagacaaagacagcggtcgattccggtgtctgtgtacttgcaaaagaagcaggtatcgtggagagttctgagtctaatcgtatcgtagtacgtgaggaggacggaaatcgcagagaatatattctgacaaagtttgcacgaagcaaccagtccaactgctacaaccagagaccaatcgtgttcaagggacagaaagtagcaaagggtgaggtgatcgctgatggaccatctacatccaatggtgagctggcacttggaaagaacccgctgatcggcttcatgacatgggaaggttataactacgaggatgccgttcttttgagtgagcgtctggtagagtatgatgtatatacttctgtccatattgaggaatacgaagtagagtctcgtgatacaaagctcggaccggaagagattacaagagatgtaccgggtgtcggtgatgatgcattaaaggatcttgacgagcgcggaatcatccgtgtcggtgccgaagtccgtgccggagacattctggtaggaaaggttacaccaaagggagagacagagcttaccgcagaagagagactgcttcgcgcaatcttcggtgaaaaagcgcgtgaggttcgtgacacttccctgaaagtgccgcacggtgcatatggtattgttgtagatgccaaagtatttaccagagaagatggcgatgagttatctcctggtgtaaatgagtctgttcgtatttacattgcccagaaacgtaagatttctgttggtgataagatggccggacgtcatggtaacaagggtgtcgtttcccgtgtattacc

SEQ ID NO: 699 - DNA, 17945 bp, unidentified
  source 1..17945: mol_type = unassigned DNA
ttttcgatattgttcaattttcaaggtcctgtagcgcctcagccaagcggctgacagcttaattattttaccacagaagcggttttttgtcaagcacttttttgaagattttttgaagttcttgggagaaccaatcgaccttcgtgcttttctgtcgctcatttcaaaggcgtttctgtcagacgtccgcctgacgtttatatattttagcacaggatttcccaaaaagcaagtcttttttacacttttttcgaattatttttcggttcgtctttttgcccagttttttctcccggatttgaccattctgtcttgtcattcatccagcagcctgtcccgcatcaccttcaatatcttgcgctcccgccgggagatctgcacctgcgtcgtatgcagcagctttgcagtgtcgctctgggtctttcctccatagaaacgaagctggatgatgcgcctgtcttcttccggcaggcctttcagcacctctgccagaccgatcttatcggcaagctcttcctccggcgattctaccggaatgtccatctgtcggtcgctctcctcccggttctccggcgtcagactcaccgcaggctgggccgcctgaatggccagcgtgatgttctccacactctcccccagctcctccgccaactgcgacagggtcggctccactccgcagagcttgcagtgatgctcccgtgccgcattgatgcgcaggctcagctctttgagcgaccggctcaccttcacggtgccgccatcccggaacagctttttgatctcccccagaatgactggcacggcataggtagaaaagcagacgccccgcgactcgtcaaagccgtcataggccttgaccagccccatgcaccccgcgctgtagaggtcatcgtactcgatgcccctgccccggaaccgcccggcgcaggaatgcaccagccccagattctgctcgatgaatgcactccgccgggtcttgtccgttaccattgcaacgccctcttttcttttattatgtagagcgctcatccagccgcttggtcagcaccacccgcgtccccttaccggactgggaggacaccttgaccttatccataaagctctgcatcaccgcaaagcccagaccggagcgctcctccgggttaccggtggtgaagagcggctccatcgcccgcccgatgtccgggattccgacacctttatccatcaccgtgatcttgaccagccgttccgggtagactgcgatgcacagcgtcaccgggccgatgcggtcggggtaggcgtggacgatgcagttggtcactgcctcggacactgctgtcttgatgtcggccagctggggcacggtggggtcgtaccgggccagaaacgctgccgccgcgccccgggcaaaggcctcgttggcactcagggagtcaaactggatcttcacactgttttccgctttcatttcatatccctcctgatatttccccgcccggctcggtgcagggaatgcctgcaagttgtaagacccgccggagctgttccggcgcgtgctggatgcgcaggctgccgcccagcgtccgggcacagcgctgccgtcctaagatcagcccgatgcccgacgaatccatgaatcctactccgccgagatccatgaccagaatgcgggggctgcgggtcagcagggcatcgtccagctggatgcgcagcccctgcgccgcatcgtggtcgatctcaccggccagataggcgtagagcacatcgtctgccgcgctgaaagtcacggttgccatatcctcatctcctttgcttgtccttttttctggataaagaaaagacctgtgcaccttttcagtgtacaggtctttcgggttattttttagagaacggtgtcgctcaacagtttctcagcctcgagggcgatggcctcactgccgcagaccagcaggccgcggcggctgttggctttcgcctgcttgacggcgtcggccagcgacggacagagcacggcgtcgaagtgataccgtgccttttcggtcaggcgctcggccagcgcagcttccgtccccgccggggcaacgagaaagactttatcgaaggggttctcgctcatgccgggcatcgtccccttgtccttcttctgttcctcaggggtcagaccgctttccagcacggaaaagaaggcctctgcgccctcctccccggtcaggccgatgactgcgctcatgtggcgcaccttggccatattgaggacgcgcagaagggctgcggcctgctggggggtacggcaggcgtcgaggatgatgaggggcttctgggacaggacgcggatgctgctgcggttctccacagcggcaaggcccgccagaatggcctcatcggggatctcgaagcccttccgccagagggccagcgccagctcgactgcgacggcggcattgcccgccgcgtgacggccaaggaaggccagcggcgcggtgtatccgccgtagtccacccggctggtgaatttttccgcctcaaggaaggtgatgtcctcggcgtcgggcaccacaagctcgcactccgccttggctgcggccaccaccagctcgctcaggacagccttcggctgctccggcgcggtgacgcagaccgcacctttccgcatgacgcccgccgccagcgcggccagacgctccaccgaacggctcacgccgtcggggccgatggctgtgacggcgcagaccggcatactgggcagggcagccgccagacctgcatccggcagctccaccacagccagcttacagtctgccgcaccgaagcagcaggccgcagccgccagctctgccgctgcgcggggcagaggctttgcggcgctgagggcctctgcggcctgacagaacagcaccgggtccaccgacacgccaccgatggcgatgcgggccgacagcggctcgcatccggcacggtagaagccggtgtggaacgctgcctcccgcaggatcgccgccagcagaccggcggcagcggtcttgcccgccgtaccggccacgccgacgaactgcaccttccgggcatccgccgtcagggcagcgctcagctcctccgccggggcaaagccctcgggcagagaggaaaaatattcgtttgcctgttcgatggtcattgcgtcaatcctcatttcgatgtttgtagagcagatagcacatcctgcacagggccagacagaacatccccaccagaatgccggtcagcacgccggaaaaatccagccagacatcggtgatctggctgctccggccatcgctgaacatctggatggtctcgtcggtcagggccgtgagcagaccgcccagaataggccacgagatgtggcggacgaaccgccgggtgtagacccgcaggcagagcgtcagcaggaagccttccagcatatactcgcagaaatgcgccatcttgcgcacgatgtggtcggtcaggcggctggcgatgccgggcatccccagccgggtgaacacctttcgcatcagggtcagcgccctgccgctggccacagatgagacgtcggcgatctgcatggagttcgagaagatgaacacgatgcaggcgatgagcgcgaaggtaaagaggactcgcgtcgcaatgagccaaggagaggtcttttgcatattggactccgtgggtaactcctttccccgcatcagcccagagtcttgatgctctgctcaatgttggcgagcttatcctgactcttggcgtgcttggcgcggatgtcctccaccagtgcggcaggggcgcgctcgacgaacttggggttgttgagctggttctcgaacatggccagctccttctcggccttggccttttccttgttcagacgggccagctccttgtcgcggtcgatcagctccatcatggggatgaagccgcgggcggcgtgggtggacacctgcaccatgccgtcggtgctgccctcatacttggcggtaaaggtcacatcggtggcaaacgcgaactttgccagatagacttcggcgctctggaagggggccgggtcggccgtctcgatgatcatactggtcttcttggcggggtggacgttcatctcggtgcgcatggtacgcacagccttgatgtagtccatcaccttctcgaaggcttcctcttcctctgcccagttgtggctctcgtccacggtgggccattcctgcgtcataatggtctcggcagagccgggcagggcctgatacagctcctcggtgataaagggcatgaaagggtgcagcagcttgagggccttgtccagcacatacaccagcacgcggcgggcggtgtcggcctgctcggcgtcgccggagttcaggcggggctttgcgatctcgatgaaccagtcgcagtagacgtcccagatgaagctgttgatcttcgccgcagccagacccatctcgtagtggtcgaggttgtcgctcatggcaccggccacctgattcagcttggtcagcacccacttgtcactcatgtccagcttgtcctcactgggcaggccgggctggaagtcctcgggcaggttcatcagcacgaagcgggtggcgttccacagcttgtttgcaaagttgcgggcagcctccaccttcttctcgctgtagcgcatatcgttgcccggggtggagccgtccaccagcatgaagcgcagggcgtccgcgccgtactgggcgatgacctccagcgggtcgatgccgttgccaaggctcttggacatcttgcggccctgactgtcgcggacgatgccgtggatgcagacggtgtcgaagggggccttaccagtgtaggcaagaccggagaagatcatgcggctgacccagaagccgatgatgtcgtaaccggtgacgagggtgttggtggggtagaaatacttgaggtcttcgctctcctcattgggccagcccagcgtgctgaagggccacagcgcggaggagaaccaggtgtcgagggtgtcggggtcctgcgtcagctttgcgctgccgcacttggggcaggtgcagggtgcactcttggcgaccacagtctcgccgcagtcgtcgcagtaccatgccgggatctggtggccccaccacagctggcggctgatgcaccagtcacgggtgttcttcatccagttcatatagttcttggtgaagcgctcgggcacgaacttgatgtcacccttctccacgctctcgatggcaggctctgccagaggctccatcttgacgaaccactgcttggacaccatcggctcaatggtggagtggcagcggtagcaggtgccgacctcatgcttcagcggctcgatctccttcaggaagccgccttccttcaggtcggcaaggatggccttgcgggcctcgagggtggtcatgccggcgtacttgccgcagtccagaacatgaggctcgttgacggtgttcttcccggcagcaaacagggcgtcggccgcagccttgtcggcggcaccggtcatgtggccgtcgtaggtgaagacgcggacgatgggcaggtcatggcgcaggccgacctcgaagtcgttggggtcgtgggccggcgtgatcttgacgacgccggtgcccttggtcatgtcggcgtgctcgtcgcagacgatggggatctccttgttcagcaggggcaggacgacatggcagccgtgcaggtgggcatagcgggggtcctcgccgttgatggcgacggcggtatcgcccagcatggtctcgggacgggtggtggccagctccagcatctcgccggtctccttgaccgggtagagcagatgccagaaattgccgtccttctcctcatactccacctcagcgtcggagatggaggtgttgcagtgggggcaccagttgaccatgcggttgccgcggtagatgaggcccttgtcgtacaggcggacaaagacctccttaacggcctcagagcagccctcgtccatggtgaagcgctcacgctcccagtcgcagctgctgcccagcttcttgagctggctgacgatgcggttgccgtatttggtcttccaagcccatgcacgctcgaggaagccgtcgcggcccaccatctccttggtcaggccctccgcacgcatggcctccacgaccttggcctcggtggcgatggaggcgtggtcggtgccgggcacccacagggcagcgtagccctgcatccgcttggtgcggatgaggatgtcctgcatggtgttatccaccgcatggcccatgtgcagctggccggtgacgttcggtggcggcatcacgatggtatagggcttcttgtcggggtcggccttcgtgtggaagtagccgccatccagccagaactggtagatgcggtcttccacctggctcggatcatactgctttgcgagttctttcatagagaatcctcccggatgattgattggtgggacgaaaaaagccgccccacggagcgttccatgggacggctgaatataaccgcggtaccacccaaattgcacacagcactttgccgtgtgccccttgatgccccgataacgtggggcagacccggaggcgactactccctttccccgcctctgctcaaaagcgacagcacgccgcaccgccataccgggttttcagcagccccccggctctctggatggcagtttcaaaacagcgcacactctttttccttgcatttataaaaagaatatagcgttttttgtgcgttttgtcaatctctttttgctctggataaaatttttcacagccgtctgtgggttcctctgaccccccgaattttcagggccaagcggtaaagtgcgggcgacaggcggaacagcgccacctttgccttttcggtgcggcatcccggcaccctcagcagctggtcgatgagacggtcggcccgttctgtcacctgcgcgagagcctgccgctcctccggcgtgctgccctttgcaaatgcgatgcagcccagcgcaccgttgcaggcggcgaacgcaaggatgtacatctcgtgctcccgcgcaaaatcagcccgttccatcattccgttcgccccatccacccgattgcggacagactcggtgtgcataatgctgccactccgctggacgtagtagtacattccctttttgaccatcgcgatccgctcgcactgccaatagaacaggtgggccgtgaattcatcttcatggagcctgccttccgggaaacggatgtcctcaaaaaggctcctgcggtacagacggttcatcacagtcacatagtaccagttctgagggccgctcagccgctgcaaagcttccctccccgtcaggacctcgtcctttgtgatgggagaggtgcggggaagaggcgtcccgtccggcgtcacataggcgaggctgcacacggccatctgagcgtcgtgctctgttgccgcccggtaaagtgtctcatacatctccggggccgcgtagtcgtcggagtccataaatccgatccactcgccccgggccagctccagcccggcgttccgggccgcgctcagaccgccgttcttctgccgacggagccggatgcggctgtcccgggccgcatagtcctgcatgatgtcccagctgccgtccggtgagccgtcgttcaccacgatgatctcaaggttccgccacgtctgggctaaaaggctgtccagacattttggcaggtacttctccacgtcatagactggcacgatgacagagatcaagggttcatttttctccattctgtatctccttttacgttctcttctgtatccgtttggccagcttccacatccgccgggccgcatagtcctgcatgatgtcccagctgccgtccggtgagccgtcgtccaccacgatgatctcaagattccgccacgtctgggccaaaaggctgtccagacatttcgacaggtactttcccacgtcgtagactggcacgatgacagagatcaagggtccatttttctccattttattttccgcctctcttcaagatagccagcgctctgcccttaagctgggcgaaggccggcgtcttccggcagaacagcaccatgaccaccgcgaacagcagagtgtagaggatgccgtccagcaggaaccagaggatattttttgccgggcagaacttcacccagccgtaggacaccgccgccagcgccgtcaccatggccgcacgctgggcgtaccgcacaaaataatcccgcagcttcttctgccactcgtcccggatgccgtagcgcatcagaatataaggctccacccagacgcaggtgcacacactgctgatgaccgtgccgccgaggatgcccgccacgccgaacttctgcaccagcagcagcgaggtcgtcaggtttatgaccgactcgaacagcggcttataccggtcgtaccagaacaatcctttcgcctcccggaacatcaggttgaccttccgctggcccgaaatatagaattccatcacgaggacggccaccgtcgccaccgagaagcagtagtccgggccgaagcagatggtgatgaaggagttgaacagtgcaaaaaaacccgccgtccagtaggcatagatgacaaagaagagcagatccagctcctgatagatgccgtagacccgcgtttcgtcctcgatggcgcccaagttgcccagactgccggtaaaggcattggagaatttgtccatcaggttgttgatgccggacaaaacgagcttataattcgagtagatacccaccgacagcaggcccacgaagctggacatcaaaaggctgtcggtgttccgcacgatgaccgtgcccagcttgtggaagctcatcgcgccaatgttccgcaggatgccgaagaactcctcccgctcaggcagctccttgcactccttcaggtaggggtactccttgtctgccttacaggacacgatgatgttcgggatgaactgcagcacgaactgcaccagcaagtagaggataaagttccgggtcaggacgatgatgacgatttggaggacggtcttgattgcgtcgcagagcaccgcccagaggtttttcacataggccttctggtaggccagaaagatggagtttttgtagctcagcagataggagcacaccgagtttgccacatacatcaggtagatgagctttaaattctcgatgccgccgctgtccttgatgaagaagcccaagaaaggcatcaacgcaaggcccaccagcaaaacgatcaccgcgacgacgcggtatagtatcttataaaggttcatcagctgggccagcttgcgcttatcgtccttagccgcaggttcatacaggctgaagatcatggccgtgccaatgcccagttctgcaaggttcagcatccccagcacatcggtgaacaggccgttgacgcccagataggccgccgacagatagtggatgaacaccatccgcccaatgaaccccagtacttgattgagcagctgtccgccgatgttgaccaccatgttgatgagggtgtaacgtgtccgcatttttcttttggttccttcccggagttttttcttttatgataccattttacagcggcgctttcaatgatctctcacccctccgcgtccagaagctcggtccggagccgagcgatgagccgctccatcagagccacccggttgaagggggtcatgaggtagaagccgtcggcgtagggcagggcctcccgagccatctgcatcgacacctcaaggcccagcgcctcgccctgctcccggtcgaggcccgcaaagcgctggatgatgtcctcctccacatggatgccgttgatctcattttccatgaagatggcgttccgctggctgaccaccggcatgatgccggccaggatcttcgcccgttcgcccagcgtctggcgggccttgcggagattttccactgcctgtgccgagagcaccggctgggtcaggaatcccgccatcccgttttccagcttttccacggcccggcggagttccacgtcgaaattccgggcgttgaggttcaatgcgccgaacaccgtcataggcgagggcatctcccggccctccccggccagagagacgatgtactgggccagcttgcgggagttgaactggtagacattctttacctcgtcccgctctgcggtggggatggggtcgccggtgatggccagcacctcccgcacgccctcggcgtagaggcccagcagaagggctttcgtggcgttcagattgcggtcgcggcaggtcatgtgaggcagggcacacattcccagctcccgatgcacccggcaggccacgagggaggaatccatccgggcctgtgcgatggggcagtcggcgatggtcagcaggtcggcacctgcggcctgcaatctccgtgcgccgtccagatagccgctcaggtcggccacccggggagagtccagctcaatggcgatgactttttcgcctttgtccagcttccgcaggaaggcgtcgtctttttccacctccggcgcggcgacggtggaaagttttgcggccggggcggctccagtctgccggggcagagcatccagctctgcccgcagggctgcaatgtgggcaggggtcgtgccgcagcagccgcccagaatgcggacaccggcggcagcgatctggcccatctcccgggcaaaatactccggcttgccctgatacagcacccgcgcccgggtgacgaccggatagcccgcgttgggcatcaccgacaggggcagccgcgtctcgcccagcccctgcaccagcttcttcatcgcgcccggagccgaaacgcagttcaggcccacggcatccaccacgccgctgccctccatccggtgcagcaggtcgcggaacagcaggccctcgcgggtgtagccgtccggcagcaccgcgaaagacaccataatgaaggcgtccggcacagctacccggagggccttcacagcctccaccacgcccacatccgagctgagcgtctcaaaaagaaaattctttgcccccagcgccgcgaactgctgggctgcaaggccgtaggcactgctggccggggcggcctctgtgtccagagccgggccgaggtccgcaaagacggcagcgtccttctcggcggcggcgtcgcaggccagcttccagcccgcctcggccagctcttcccagcccggcatctgggccgctgccatccggggcaggccgaaggtgttggtcttgatggcctgtgcgcccgccgccagatactcggcgtggacccgcttcaccccttcagggtcggtgaggttcgccagctcgcattctacgcccggcgcggctttataataggtacccatgccgccgtcgaacagcagcggcttatgggcaagatactctcggatgtccgtcatcataaggttctccttttccttcgtttttccctctatttttcccggctcccccgggacggagcttttgtgcagtcatcttcagtttaatgaagtttgcgcacttgtcaagcatttttgtctctcaatggcccatttttgcttgcaccggagccgcttttgtgctattctatgcatatttatagcagtttggaggaatgtatcatgcgccacgccggcacacaggagatcgaaacgccgcggctgcttctgcgccgccttctgccgtccgatgccccgatgatgtacgccaactgggccagcgacccggaggtcacccgctggctgcgctggacgccgcataaagatgtggccgagacgcgggagctgctggccgcatgggcgctgctctaccccaacgaggactactaccagtgggccatcgtggaaaaggcctccgggcaggtgttcggctccatcagcatctacaacagccttgcgggcgagccgcagcagaaggccgagtggcccgggcgggatatttccgagggcatctgggagccgggctactgcatcggcagaggctggtggaacaagggctataccaccgaggcgctggacgctttagtagaatactggttcaagaatacggacagtaattggctcgcctgctgccatgccgccgaaaatcccgccagcggcagggtcatgaccaaagcaggcttcgtttacgaccatgacgcagagtaccacaaattcgacggctcccccgtcccctgcagatgctatgcagtgacaagagagcattatctggaacgaaaggaatcattttgagcgaactttacgatattttagtggaaacacccccgacgaaggtaattttgctggccctcgatcagggcctgtgggactgcgagcgcagcctcgccgagctggccgcgctgtgtgaggccaaccacatggaggccgtggccgaagtcacccagaagcgccagacccccgagaccggcatcgtgctgggcagcggcaagctggaagaagccgccgctgccgccgcagagctgggggccgtgtgcgccgtctttgacggcgagctgaccggcagccagatccgcaacatctccactgcgctgggaggcctcgaggtcatcgaccgcaccatgctcatcctcgagatcttccgcagccgcgctgtgaccaacgagggcaagcttcagaccgagctggccctgctgcgctaccgcctgccccgcttacagggcatgggcgagagcctgagccgtcagggcggcggtggcggcggcggcggcggtgcacgccgcggtgccggtgagaccaagctggagctggaccgccgccacgtccacgcccgcattgacgcgctggccgagaagctggccgagatggaaaagcgccggggcgagagccggaaggcccgcgccaagaccgggatgccggtggtcagcctcgtgggctacaccaatgtcggcaaatccagcctgatgaacgccctctgcggccccagcgtcgccgaggcagatatgctcttcgccaccctcgaccccaccagccggaagctcgtcctgcccagcgggatggcggtgctgctggtggacaccgtcggcttcgtctcccgcctgccccacaatctggtggaggccttcaagtccacgctggaagaggccgcatggtcggacgtcatcgtccgggtggccgacgcaggcgacgagcagcgggaagagcagctggccgtcaccgacgaggtgctggacggcctcgactgcgccgacatcccccgcctgaccgtctacaacaagtgcgacaagcccggtgcactgagctttgaccccgacatcctgctcaccagtgccaagaccggctacggactcgataagctgctgcaaaagctggacgagaccctcagcgaccgcgtccacaccatccgcgtcctgctgccctacgacaagctgggcctcgccgcccccatgcgggagcgcggcagcgtccagctggaggagtaccgcgaagacggcctctaccttgagggcatcgtaaagaccgaggacctccactgcttcgagggctacctcgtctgacatcctgcacccaaaaagagccagactcagcctgagtctggctcttttgctgtcttggcaggcggtcagcccgcagccgggggcatttccgccatcagctggtcgtaccgtccggtaaagacccgttccggcagggccgcagtcagggcgagggcagcggtcagccgctcctcgtcggtcagctctgcttccaccggcgggaagtgggcaagcacctcgtccagctgctttctgacctcccgggccacaaagatgccccggtcggtgaggtagatcttgccgtaatattccttgacgatcattccccgctccatcagcagattcatcacccgcactaccgagggcttggtcacgcccagcttctcggcaatgctgcgggagctgatgtccagatgggtctgcgagacctcatagatggccagcaggtagcgcaggtgtgccggcgtcagttccatctcgtatcactctcttttcgttctgttacactaactctcgattttcaaaaggggcgcgggccaaagctctgacccgcgcccccttctcttccattattgctcagtggcagccgcccttgcagctgctgcagcttccgccgcagtcacagccgccgctgcatccactgcagccgccgtgcttatgagagtgccatgtgatccagcccacaccgccaaacacgatggctccgacgatgatcgtcggcagattgaaattcgcagccagaaactccatcataaaaatgcactcctttcagcgcgttttgagaaatttttacttgatcttggaaacgtcgatcttgacttcgttgtcgttcacatacttgttgggacggaacatcagatacaggaaggcagcgacgatgaccacggccacgacggtgaagaagttgaagccgacttcaccggtgatgaggccgcccagctggtacacgaccagagcagagcagtaggccagtgcgcacatatagccaatggcgaatgccgtccacttgccgttgttcatctcacgcttgatcgcacccatagcagcgaagcagggagcgcacagcaggttgaagatcatgaatgcataagcgctcagagcggtgtaatctgccgcaacgaggctccagatctcatcgccgttctcagacagctcctcgccgccgaagtgatacagaacgccgaaggtaccgacgacattctcctttgcgatcaggccggagacagaagcgaccgttgccttccagttgccgaagcccagaggagcgaagatccaagcgactttggtggcgatcgctgccagcacagagttgtcctgatcctccaccatgccgaaggcgccattctcgaagccgaagccctgcaggaaccacaggacgacggtagcagccagaatgacggagcctgcacgcttgatgaaggaccagccgcgctcccaagtagcgcggaagacattgccccaagcggggatatggtatgcgggcagctccatgacaaagggagcagggtcgcctgcaaaggccttggtcttcttcaggatgatgccggagcagatgatggcagccatgccgatgaagtaagcggagacagccaccagagaagaaccgccgaataccgcacctgcgatgaggccgatgatgggcatctttgcgccgcaggggatgaagcaggtggtcatgatggtcatgcggcggtcgcgctcattctcgatggtacgggaagccatgacgcccgggacgccgcagcccgtgccgaccagcacggggataaagctcttgccggacaggccgaacttgcggaagatacggtccatgatgaaggcgacacgggacatatagccgacatcctccagaatggacagcaggaagaacaggaccagcatctggggaacgaagcccagaactgcgccgacaccggcgacgatgccgtccatgatcaggccgtacagccagcccgccacgccgatgctctcgaggaaaccgcccagcgcgttggggacgatctcaccgaacaggacgtcgttggtccagtcggtcgcaaacgtgccgatggcccagccgccgtcggcgatggaagtacccacagacagggagtacatcaggtacatgatgactgcgaagatgggcagggccagaacacggttggtgacgatctggtcgatcttatcagaaacggtcaggtgctcgacgcgggccttcttcttgacagccttatcgacgacaccgttgatgtaggcgtaacgctggttggtgatgatgctctcggcatcatcgtccatctcagtctcgcagtccttgatgtgctggtcgatgtgcgcggtcaggtcggaggacagcttcagctcatccatgaccttgtcgtcgcgctcgaacagcttgacggcgtaccagcgcaggaagcggtcatcgaccttgccctgaatggactcctcgatgtgcgcgatggcgtgctcgacgctgccggtaaagacgtggggcagctcgccggccttgcctgcctttgcagcagccatagcagcctttgcagcggcctcggtgccctcgcccttcagggcgctgatctcgactgcctgacagcccagctcggcgctcagcttcttcaggtcgatcttgtcgccgttcttgcggacgaggtcgatcatgttgactgccatgaccacggggatgcccagctcgatgagctgggtggtcaggtacaggttgcgctcgatgttggtgccatcgatgatgttcaggatggcgtcgggcttctccttgaccagataagtacgggagacgacctcctccagagtgtacggagacagggagtagatgccgggcagatcctgaatgatgacatccttctcgcccttcagcttgccttccttcttctcgacggtaacaccgggccagttgccgacgtactggttcgagccggtcagattgttgaacagggtagtcttaccgcagttcgggttgccggccagtgcaattttgatactcattgcagctcctttcctctcgttgcgatcaaacgacttcgatcatttcagcgtcggccttgcgcacgctcagttcgtagttgcgcacggtcagctccatcgggtcgcccagaggggcgaccttgcggacataaatttcaacgcccttggtgatgcccatgtccatgatgcggcgcttcaccgggccttcgccgtgcaggcgcgccacggtggcagtctcgccgaccttaacgtctttcagagtcttcataaaaatcctcctctgcttgtcttctttctattcagagactatcccagtttcggagcgtctcccaaacagcggtctcgccgctgctcagccgatcataatgcggttcgccatcgtcttgtcgagggccagacggctctccttgacctgaacgatgaggttgcctgcgatctcattgacgatcgtcacctgactgtccactacgaaacccagttcggccagatgcaaccgcacctcatccttcccggtgatcttgcggatggtgacggtctcgcccgcttttgccatagtcaaaggcatcataattgttccactcccattcgtgctccccattctgcggggagcgtttcggttcgcttttttcgtcctcggggatggccgcaccagccagacgccgcaacgcgctcgctcatgtccgcgtccccctccgaaaagctacggcagttagtcagtcgcaactatcagcatagatagtttacacttactaacccattctgtcaatcatttttccgtaaaaaaagttagtttgtatgaactaacaaattttatcctcgcttttcagaaaaatttaacaatttccacatatgacacagccgcccggtgcagggggtattctgcaacgggcggccgcgtgtcaaaaggaggatttcttcccatcatcgtctattttaagcagactccgacgggcgccaggataaaaagagagtatttggaagtgaatgtcagaatttcaggagcgtcaggctgcgacggccagacgctggatgggggtgccgctgtggaacaggcggagatacaccgccgtgcacttgttcagctgggcgaagtgctgccgggcagcggcagggtcgccgtaggctttccagcagccgcagcaggtgaagttgcggccctcattttcgataaagcccaccacatcggggagggggtagcccagaaatacgccgatctcatggggaaaatcagcctcacagcagagcctccgggacagctgccgcagcagcggcgcatcgtcgtccggctgctgaggaaggtcgtacccctcgccgcgcaggaagtcccgcacctgcggctgggccagtaggacgcgcagcctgctctcgcggtagacgtacacgagatactggtgcgtccgcatacagcccttgaggacgcggacgcagaggcctttttcgtccagctgctcattccagctgcggacgcggcgggcaaggtctgcgcagtctctggtctcatagcggaagagtcccgcaggcttcaggccagccagcaccggggcgcattgctcgatcatcacagtctcaaagttgcgttccatttcccggcc

SEQ ID NO: 700 - DNA, 9513 bp, unidentified
  source 1..9513: mol_type = unassigned DNA
ttatttctgtgcaaaaaagtctttgaccacctgcaccacggctgcgcggtcggcttcggtcagaccatagtacagcggcaggcgggtcaggcggttgctttccttggtagtgtactcatccacaccggaaaagcggccgtattggatgcccgccggggcgctgtgcagcggcacataatggaaagacgatgccacaccgtgggctttcaaataggcaatgaacgcggtgcgctgttccaggtcccgcagcttgacatagaacaaatgcccgttatgcacacagccttccggcacggtgggcagctccaataggcctgcttcagccagcggtgccagctcctgtgcgtaataatcccagctgtgggtacggtctgtattgatggtatcggcctgttccagctgtgcccacaggtaagcggcattcagatcactgggcaggtagctggagccataagaaacccaggtatatttatctacctggccgcgcagaaaactggcacggttggtacccttttcccgcaggatttcggccttggtcacggtttcggggtcgttgatgaccagcgcgcccccctcccccattgagaagttcttcgtctcatggaaagagtagcagccaaaatcaccgatggtgcccagtgccttgcctttataactggccatcacgccctgggcggcgtcttccaccaccttcaggttatggcggcgcgcaatctgcatgatggtatccatatcgcaagccacaccggcatagtgcatcacgcagatgactttggttttttcggtaatggcgggttcaatttttgcttcatcaatgttcatggtgtccgggcggatatccacaaacaccagcttggccccagctaaaacaaaggccgttgccgtggaagaaaatgtgtagctgggcaggatcacctcatcaccgggctggatgccgcacagcagggcagccatttccagcgcggtggtaccgctggtggtcagcagcaccttgcccgcatggaaccgctgttccatccattcatcacagcggtgggtaaaagggccatcaccgcagatcttattgttggccatggcctggcgcatatagtccagctctgtaccaacctgcgggggaatattaaaaggaatcattgttttactgtcaactcgcaatctattataaccactcggtcttactgggcgcgggtagtatcactttccggcgtttcgggttcaaaattcagccgcttttcttccaccaccagggggcggtccataatacgggcgttcattgccatgatgtactcgcccaaaaatcccagaaaggtcagctgcacgccgcccacaaagaacacagcaatgatcattggggcataacccgcagcaaaggtattccagtggatcagctttgccaccaggaacacaagccccaggataaagctgaccgccgcgcagaaaaagccgaagaactccgccatccgcatcccaatcttggtgtagctggtaaagctgagcatggcggcatcaaacaggctgtaccagttgttgtgggtcttgcctgcccggcgcctgggctgggtgtattcaatctccttgcgctcggggccaagctccgccacaatcccgcgcaaaaacggggtggggtcgtgcaaatcacgcagggtctggataaagcttttatcgtacaggccaaacccggtaaactgctcgatcatttccacattgctcatctttttgatggttttgtagtaacagtcccgcaaaaagtacatgacagggttttcctggctggtggtctttttgccgattacaattttgtagcctttttcccattcagccacaaactttggaatcatctccaccgggtcctggaagtccgcgcagatggtaatggtgcagtcccctgtggtatggatcataccgtaataggggctgttgaactgaccaaagttcttgctgttaaaaatggctttgaccttggggtcctgcgcgcagatgtccgtaatgatccggcgggtacgatcctggcttttattatcaataaaaaggatctcatagtcataatccgggcagtccttccgaatctcatcccgcaccgcctcatagatggggcgggcgttctcctcctcgttataggtagggatcataacagagatgacttttttcttctcgctcatgcagatttcattcctttaagtttagtctttggcccactgccgcaatagccgggcagacccttatcactatacactattttgcaaaataggtaaagaacaatttattttcgcagttttgcgtttcaaagttcaggcttacagggcggtccgccagggtgtagggctcctcgttttccaggcagaaagtcccctctttggcaatgtggcagatgccgcggtaaatttccatggccggggtgcaggcaccgatcagcagcgttgccgccagcagaatggtcacggcatgctgtgcaagcgtaccgtcccgccatttggtgcccaccaaggcgataaagtaccgggcacagagggtcatcaggataaagatagccgggatggacacccgcatgcagaaatcgcacccctgtcccaccttaaagaacggaatgatgaagagcgacacggcgcaggtataaaacagccagctgcggcggttctgccgccagagcagcagcagatagatgccggcatccagcaggtaaaataccagcatgcctttttgcaggctggtcagaacgttttggccaaaagtctgctgcgctgcctggttcccggcgacagtttcgcccagaacgctgtagccaaaggcgttattggccaaaaaataactggccgtaatgctgagcaccacaaccagcaccagcacattggccggggagaacgccgattgcagcacgcctttttggcgctgtgccagcagaacaatgccgcgcaccaccataaaaataaccagccccacaaatgggaaggggccgcacatcaggcaggccgtgcccagcagcaggtagttgcggcagtctttctcctgcaaaaagcagacggttgccagccatgcccccactgtctggttgaacacccagaacaggcaggtcgtcagggagctgaactggaaatcattcgtccaccattccaggtgcatagcgtcataggccagcaggtccggcagtcggctgctgtacagcgcgcccagaatatccatgccgctgaagaaaatcaaaaacagcaggccgatcccctgctttttgccggtatcggcacgcaggtagaccaacaaattcagcgccgccagataggtgcccagcgccgtccacccccaaagggccatacgggcgaacatccaggcggcatccagcccaaacagggcgtataccggtttggtcagcgccgccgggaccagccagtgcccgatataatacaccagcgccgtatccttttgcgggtaatacaccggccagctgtttgtgatcagatcccggtaaatggcgttgcggtaaccccagtccgagttctggtaaaaaaagcccgtctgaccgcccaggtagccccacaacagcatcagggcaaacagcagcaccagctttggcaccgaaagcgtaatgccctgctcttcttgccccacttgcttaacctgcggcgttttgcacacggcataccaccaggcaaaggccagcacggccaggcccgcaacggcaaacggcgcgcggagataccccgcaaaaaacaccgccagcggcgcggtgagataggataaggcaaacggctttaacttttggtaggtcaactgcataaatactgtctggctcctgttcgtccatgcgggtcctgcccgcacggacggggttattccttattggcttaattggtttgcttttgcgtttttgcccacgcaatggtggcgcggatgccatcggcaaaggcggtgcgcggcgcaaagccggtatccgccgcaagctgggtgatatccgcctgcaaaaacatgacctgctgcggcccgtaagggattttgcccaggccaagcggcagggccaggtcgatggcatcacgcagggtctcaatatattcccgcagggggcgggcggtgccgctgcccaccgggtacacggcaccgctgcggccatggcaggccatgcggtacagtgcatccgcagcatcggcggagtaaagataatcccacttctgctcccctgccgtcaggtccgggcactgcccggccagcagtttttggatggtggcggagatcatcgtgttggggccgtcatgcgggccgtaaaccgaaaggatacgcgcccacacatggtccatgcccagggcggcggcctcggtacggctcatctggcctgcacacagcttggccatgccgtacccgttttcggggtttgtgggggtatcggcccgcagaacaccgtccacacggccatactctgcctggctgccagtaccaacaaacacacggcagcccattgccgccgcggtgcgcacggcatcaatggtatagcggatattctcaatctgagccggcacatcattgcgacccgcgccaatggtgtgcgcccacgccaggtggaaaaaggcatccgcctgcacgggcagcccggctgcggccatgcactgcggcaaatccgccaggttggcggcatcgcaggcaactacatacaggtttgcatccttgggcagcgctacggcccgcgggctgccggggcggcagaccgccaccacggtacacccggcctgcagcagccggctgcacaatgctgtgcccacggccccggtggggccggttacgattacggttttaatgttacgttctatcatcattcactgctccggcaccagggggataaacatctgcttttccagctcttcccgcggcaggaacggtgccaggtcctccagcggcgggctgaccagtgtgccgtccggcaggcgcttggtggcgctcttcggctcccagacctgctgggtatcggtaaagatctcgcagaaagtcgggccttctgcggcaagggcggcatccaccacctgtttcatctcagcgttggaatgtgcgcaggaatacgggtagccgaacgcttcggcaattttgcggaactccgggaaggacagatccccgctctccggcccaatgccgatcttgcaatggtctttgaacaggttgttctgggtcaggcggatggagtggtagccgttattgttgatgaggaaaatcttgatcggcagcttatttgtcaggatggtctgcaattcctgcaggttcatcatgatagagccatcatcaacaacacgccgcagacgccgaccgtggacgctctggagcagaaagcaaaggcgggcgaggttatctcccttgttgaccttgccgacgctatcaaagccgacaaggaacagggaaagacagcaaagccggaaaagaagccctctatccgggcgcaactcaaagcagataaggaaaaggcacagaagaaaccacaaaaaagcaagtcgcaggacttagaaaggagctgaccgattgggtaaattaagtaagtttgagaatgtggacgttatcgcttcccttgaagcgattatgaaacagaataccgctttctatcagagtgattttgagatagacaaacggattttgcgagaagcagcgtcaagacccgctgctgaagaaaaacggctgctatggttttcccgcccgtcggggacgtgctgcttccgggaacgcgacgttttcctaaaggacacaaggcagcataacacatggcggttttatggggagcagacccgcgataaaatccttgcctatgcggtggagctgaccgggaaagaaaatgggataatcaaaggcaatctctatgagcttgactatccgcagcacttccgggaagtagtcgaaaaatctctgcccgccgataattacacgctgctctatgagcatggggaacgggtgcagcccgccggaatgtattttgacggcaaccccgacccgcagcttgggaagtttgaacgctttgaagcgcagcctaatgacccggaagcattgcattttctcatgcgggaggaaaagcacagctatgaccgcttaaagccgggggatttcaaggcgcatattaccgcgttgcatgacagccggattgaagccgaagcacagcgcattgtagcggaaatgaagcggcaggacagccctaacagccccaacaaaacacatttcatggtggagctttcgccttactttatgcagttagcttctacaaaggacaccgaccgtctgtttgctatgctgccatacaaaacactttctttttctaagattgagggcaggcatggcacttttgcatttttagacaaaagcgaggacagaagccggaatatccgaaaagcgcgcccctctgtccgggcgcagcttaccgcagacaagaaaacaaccgccccgaaaaaggcagcggcaaaaagaaaaaatcacgatttggaggtatgagcatgaatagatttactgttgaggaaacaaaccttttgagcatttaccatgagggaagcaaggcgcagcttatagagaacatgaccgctgcgctgccttacatggacgcgggattacgggagcttgcaaagcgcaccctttccaaagtgaacgcgctgaccgacgccgagtacaaagaactttccgtttatcctgctgatgaagtatgaccgggattaagcggctgtcgccgcgacaaagccgcaaggtaaacacccttgtgaaaaaggagtgctgcaactgcgagaatggcaactgtattttactggacgacggggacacttgcgtatgcccgcagctcatttcctattccctgctctgtaagtggtttcggattgccgtacttcctcttgataagctgctctatgcggaactctatcagaccgaggacagaaagaaatgtaccgtgtgcggcgcgttctttgcgtccacctctaacagcgtcaaatactgcccggactgtcggaagcggattacccgcagacaggcagccgagcgcatgagaaaacggcgcgctcttgttacgcggtaagggcgaaaaaagccttgttttacaggcttctgacaaccgtttcctcatagggcaagggctttataccttttcccttaaaaacggcgttctactgcgtaacatttcagaactgcacccataagaaaaccggggcgcggatagtctttactgactgtctgcgtcccggtttttcctttgctatttttccatgttgatttgaggggttgcgcccttatctgtggtaagtaaacggtatatcgtaagggggatataccatgcagccacgacgagccgccatatcaaaatgaccccaccgataatgccgcccaaaatgaagttgagggcaatgatacccaccgttccggctatgtcatacccatgcggtacaagccatacgaacatacggcgaataccaaagggaataccgcagcacagccacacataaaagtaattggtctgcccgtcctctgtaaagacgttcttaaacatgaagaataaaaacaatgcgataacggcgggcaaaacggttctcttaaaaaagtctttccaaatttccccgcgtgtcatggtatcactccttttctattgggaattgtgggatagcttctaacagtttcagtatgagcgtttgccgtaaatcgtcgtcgatttcctcttttacgcttccgtccggctgacgcttttttaccattgcaaggcggttgatttcgtcaccgtaacaagcaagcactttttccaacgcccatttttcgctcacaacggcggcgcgtatcgtttcatagtccggcatttcctgttccattctctgacacttcctttgctgaaaatgtatcactttggtatgtaactactgtttttgataggaactattatatcatacaagtatgaacaaagctactccccacgttcttttcctttttcccgttccggttctcttggctgccgtaaaatgctgtctatgttctgtttgataacgtcgtactctttgacctgttttttcagtctgccatagtcggcgtaaagggcttctttctgttcctggagcttttcatattccgattgcagcgcggtgaggttcgggagcttggaaacgcccgccgcctttaatgcctttgccgctgcttcatgcaagatgatttcgcgctcatgggctgcccggtaactgtccttatttcttgctttgcggtatgcgtcataggcgggttttgtcttttggaacgtggaaacattcttgataagcaccgccatatctgcaagccgtttttccgcgctctttaatgcgtctgccgcctgttcgctctctgtctgtatctctgcgatttttgcggtcaagtcggtgtattgttcaatcttgtgttccgtaataaaattcatggtcttagctgcctgtttcagattgtggattttcgcccattgttcataaccccggctctgcgccgccttgatactgttttcaatatcaatgagcagggacacgccgcgttctgtcttgggagctttggcggtgcgggtacgcttgccctctatccgttcccggattgcttcctctgtataatctgcgccgagggttttcaaacgggtaaaccgttcctgtcccggaaccaaacaggacacatattttccccgtttgattgtgaagccttctgcctgtaaccgcgcgagcaattcttcaaagtcggacacttgggggataagggtatcgacggcaagtttcaattttgctttggcggttttctctttcttatacaccgcataattctttcccttgccgccttcctccggcacaaggacggacaagccgttttcccggcacagcctgtcgctgatgttgcgtattccgtaataggtgcgcttgttggaaacatacttgtggtagtctacaaagtttaccgcacaaaaaatgatgtggttatggatatgccctttatctatgtgagtggtaaggacgtattcatattgcccctttgttaccgcgtcggcaagctgttttccgatttcatgggctttctcataatcgacttcccccggctcaaaagattgtatcaaatggtgtgcgaggttgtttcctctgtcaagagcttgcgacaatgtaaatccgaactcaatatctgccgtttcatagctgcacccgaacgaggacaccagcattttcccgtccgtcttgtccgggttttggatatagtcaagggctttttttaacgtgcttttaataggcttaatctttgtaaccgccatatctccgcaagcacctccttgatttcttctatatcctcttggtagacgctgcccgtcgcattgacgcgctttgcaatctgattgacattgaccccgattttctgtatctccgctgtcatagcttttatgtcggcatggtctatctgaatgatatacccgtcgattgccattttccgcaagtaggcttccatgttccgggtagggacgagctgcattttctgttcaatgaacgcccgttcttcctctgttactctgaatttaatttgtactgtccgtttcctgccgttcat

SEQ ID NO: 701 - DNA, 21937 bp, unidentified
  source 1..21937: mol_type = unassigned DNA
agctgttcggcggttacggctacacccgtgactaccccatcgagcgcatgatgcgcgatgccaagatcaccgagatctacgaaggcaccagcgaagtgcagatgatggtcatctccggcgcgctgctgaagtaaggaggcaagacgtacaatgaaagctattgtttgtgtcaaacaggttcccgatacacagggcaaggttgctgtcaaggctgacggcaccatggaccgtgctgcgatggcaaccatcaccaaccccgacgacctgaacgccgttgaggctgccctgcagctgaaagatgagaccggctgcgaagttgttgttgttaccatgggcccgccgccggcagaaggcatgcttcgtgagctgattgcccgcggtgctgaccgcggcgtgctggtatctgcccgtgagttcggcggttccgatacctttgcaacttcccagatcctggcagctgccgttaacaagatcggcgttggcccggaggatatcgttttctgcggccgtcaggctatcgacggcgacactgcacaggttggcccgcagattgctgaaaagctgcacctgccccaggtcacctatgttaccgacatcaagaaggacggcaactccctgatcgtcaagcgccagcttgaagatggctatatggagctgaaggtgaacaccccctgcctgctgacctgcatcaaggagctgaacaccccgcgttacatgagcgtttccggcatttttgagtgctatgacaagcccgttgaagtgttcgactacaatgctctgaaggatgatcccctcattgagaccgacaccatcggcctgaagggctctccgacgaacgtttacaagtcttttgctcccccggtcaagggcgccggcatgatggttgaggatgctgcccagctggttggcatcctgaacgacaagcacctgatttgagagaggagagaagtacaatggctgaattcaatgcaatggacaccgccgccttcaagggcgtgtgggtattctgcgaacagcgcgaaggccaggtacaggccatcagctatcagctgctgagtgaaggccgcaagctggccaatgaccttggcgttgagctgtgcggcgttgtgatgggcagcgaggtcaacgaggactacctcaaggctctcggcggctacggcgcagaccgcgtttactatatcgacagccccctgctgaaggactacaccaccgatggctatgccaaggttctgtgtgacctcatcatggagaaaaagccggaaattatgctgattggcgctaccaacctgggccgtgaccttggcccccgctgcgcagcccgcctgcacaccggcctgactgctgactgcacccacttggatgtggatgtcgccaagtataaggacttcctgcgcaccacctccaccattgatgtggacaacaccaagtttgaagagaacaccaacctgaagatgacccgtcccgcattcggcggccacctgatggccaccatcatctgcccgcgcttccgcccgcagatgtccaccgtgcgccccggcgttatgcagacccagccgttcgacgaagctggtgctgccaaggttgttgttgagaaggttacccccgctctgactgctgacgatatccatgttgagatcctggacatcaagaagagcgctaagaagctggttgacctgatcggtgctgatgtggttgtttccgttggccgtggtatcagctctgaccccgaaaaaggcattgctctggctgaagagctggctggtgccctgggcggcgttgtcggtgcttcccgtgccgttaccgatgaaggctggctgtctgctgaccatcaggtcggccagaccggcaagaccgtgcatccccgcatctatgttgctctgggcatctccggtgccatccagcacgttgccggcatgcaggattccgagaccatcatcgccatcaacaagaatgagaatgcccccatcttcggcattgcttcctatggcatcgttggcgacctgtacaaggtcgttcccgagctgatcaaggagatcaaagccgccaaggcataatttctgctgctcatttaagggccgtacccgcaggggtgcggccctttttgctgcccggcggcagggcggggaagaacggcagataaatgttttgacgcagaattgcaattgttttcacaaataccgtttacaaatgcaaaggaataggcaagaataaaaatgttacgtcgtttgcggaaacctgcggcgcggcgggcatgcctgctaaaaaatcccgctgtgcgggcgcttttggtgtgccccggaaataacgtttttaaaacggaggtacatcatggaaaaattcttccacctgaaagagaaccacacggatgtaaaaaccgaagtcatggccggtatcacgacctttatgacgatggcttacattcttgcggtcaaccccaacattctgtctgcagccggtatggatgcaaaggcagttctgattgccacttctctggcagcatttgtcggcaccatgctcatggcgttcctggcaaactacccctttgcactggcacccggcatgggcctgaacgcctactttgcctacaccgttgtgctctccatgggctacagctggcagatggctctgctggccgtctttgttgaaggcatcgtcttcatcgtgctgtccctgaccaatgtgcgcgaggccatcttcaacgccatccccctgacgctgaaatccgctgtcagcgtgggcattggcctgtttgttgcctttgtcggcctgcagaacgccaagctcatcgtcaacagcgattctactctgctgacctaccagcacttcaagggcgaaaccttccacagcgttggcatcggtgctctgctgactctgatcggcgtgctgctgatcgccgttatgctcatcaagaacgtcaagggcgctatcctgtacggcattatcctgacctgggtgctgggcatcatctgcgaactgaccggcatctatgtgctggatgcagaagctggcatgtactctgtcatccccaccgcattcgtcagctttgacttcagctccctgggcaataccttcggccaggtgttcaacctggatttcaccaactttaatattggcaacttcatcgttgttatgttcgctttcctctttgtcgacctgttcgataccctgggcaccctgattggtgttgcttccaaggccgatatgctggacgaagagggcaagttgccccgcatcaagggcgccctgctggctgacgctatcgcaaccagcgccggtgctgtgctgggtacttccaccaccaccacctatgttgaaagtgcttccggcgttaccgagggcggccgcaccggtctgaccgcagctaccaccgctgtgctgttcctgctggccagcattttcagccccctgttcctgaccatcccttcctttgcaactgctccggccctgatcgttgttggtttctacatgatgggcgctgttgccaagatcaacttcgacgatatgacggatgccatcccggctttcctgaccatcctggtcatgccgctggcttacagcatctccgaaggcattgcaatcggcgttgtttcctggacgctgattaacctgctgtccggtaaggccaaggaaaagaagatcaccccgctgatgtatgttctgaccgtgctgttcatcctaaagtacatcttcctgtaattataagttacagcattgccaataaaatgcgcctgtgcttgctttgagcacaggcgcattttttatgcaaatttttgaaagagcggtaaaaaatcagccaacaaccgcgggggtagccagcagttcatccggaagttcgccgtaatcttcagcggattccttgctcatattgtaaccaaaagtcacaccaagggcgttggcggcatccgtcatcagggcgtctacatccaccagttcgctgtcagccataacgaacagaaccttgtcgtcaaaagtggcaacgctggccttgtcggccgccacgcagacccacttgtgcatgtcaatgccgtccagcatggcttcggcaatctcatcaccattggctttgtctttcaggcgcaccagtaccatgcagtaagcctggctaccgacacctggctcgctggttacagcggcatccaccttggtgatctgctcttcgttcaggccggtctggtaggggtaccactcggcgttggtcaggtccacggcggtcgtttccaccatcatcaggtcaaccgggtgtgcggcatagatctggtccacaatgccgctcagctcggcatccggttccggctggagcgcagcactgctgtcctccgggtcaacaccgaaaccgggatcgatctccatgtccgggtccggcttggtagccggggcgttcaggatgtcatccgggatggccgttggctccggcgctgtggaggaagacgcgccggaatttccgcacgcagcaaagctggcagccagcagggcagcagccagaaataatgtcagctttttcataaaaaatctcctttatcttgcgcggccctgtatgatgcagggctgcgtaggttgtgttgttggaatgcgcagcgggggcaagcagggggggggcagggtgcggcaaatgctccactgtttttattttaccccattttccgtcaatatttcaccgggggtaaagggaacatcccattcgtccgtgggcagcgcgggaaagaccagtgcctccgggcagagcaaaagtttggggccggtctgcccaaagcgggtaaggaaccggtcataatacccggctccgcggccaaggcgcaccccctgcttgtccacagcaaggcagggaatcaaggccagtgcgcccggctccaatgcggcgatggtgcggccgccgcagggctccagaatcccgtaccgccccggctgcaggtcgttcaggctggtgatttccacaagctccatccgcccgtcattgcctggcaggcagcgcggcacgcacaggcgcttgccgctgaccagggcctgctgcaaaatagcggtggtgtccggttcgtcccgcatggaaacaaagcagaacaccgtgcccgcctgccgccatgccggcagggcaaacagttgctgggtcatggcagcgccgatggcgtgcaggtccagatttttgcgcattgccttggcctgcgcgcgtgcctcagtttttgtcatcacgttcacctcgcatccattgtagcataaatttgcgggataggggagggccggccgcaatgtcattttctgttttacggtgccctcttacccaaataaacggatttttccgcccatttgttacagcaaggcgaccatttattcagggcaacactgcacaattcccgccttgcggcttaagcaccgctccggcagctgcggcacggcattggcttggcatctgccgcacctcgctcgccgtatcggcacttagaattatgcgatattgcctcaggaagtcttgcgcaaaaaccggaaacagaatataatgtatctgtattattatgttattctgtgggcaaagcccgaacgataaaaggagaatatgaaaaaatgagtaagtttaattttattgaaaccgaaatccccggcgttgttgtgatcgaaccgaccgtgtttggcgatgaccgcggttattttatggagacgtatcagatcgacgatttcgccgccgccgggattgacaagccctttgtacaggataaccagagccgctccaccaagggcgtgctgcgcggcctgcatttccagaagaaccatacccagggcaagctggtgcgtgtgaccatgggcgaagtgtacgacgttgccgtggactgccgccccaacagcaaaacctttggcaagtgggtgggtgtgaccctttccgccgagaacaaaaagatgttctatatcccggaaggctttgcccatggctttctggtgctgtctgatgtggcggaattctgctataagtgtaccgacgtatatgatccgaccgcagagggcggcatcccctatgatgacccgaccgtcaacgttcagtggccggactgcggctgcgagcataagaccagcgccaaggacaaagagcacacgccctttgccgagcagaagtttgaatactttgaaaaatactgattcaggggaaccgatgtgcagaatttaaaaaactcgtttgcaagtttctggaaataccgctacctgctgcaaaacctcatcacgcgggattttaagctcaagtaccgccgcagcgtgctgggcgttgcctggagcgtgctcaacccgctgctgacctgccttgtcatgtgggctgtgttcggcgcgctgttcaaccagcgcggggatggcattgaggatttcccgctgtttttgatcattggccagttgatgttcaacttcttccgtgaatccaccagcatggcgatggaaagcgtgctgaaaaatggcccgctgctgcgcaaggtctatatccccaagtacatttttccactggaaaaatgctgctttgcgctggtcaacttctttttcagcctggtggcgctcttctttgtagcgctggttacctggtcccatatttcgctgcgcacggtgctgctggcggtgtatcccattgttatgctgttcgttttcagcctgggcgttgggctgatcctgtccacgatgtatgtctttgtgcgcgatatcatgcacatctgggaggtcttctgcaccctgctggtatacggcagtgccattttctatgaccccagtcagatggcatcctggatgcaggctgtcatcaacctgaaccccatctactggtacatcacggcggtgcgttcctgcgtgatgtggggcaccggcctgaccctgaacatggtgctgattcctttcctgtgttctgcgctcagtctggggatcggtgtgtatgtattcaaaaagaaccaggacaaatttgtcctgtatatgtaagggggctgcaagatgagcgaacaaaagcaacagcccattatttccatcgaccatgtttcgatgcgttttaacctggcaaaagaaaagcacgaaagcctgaaagaatattttgtggcccttttgcacggcggtgtgcgatttgatgaattcttcgccctttcggatgttagctttgacattatgccgggggatttttacggcttgatcggcctgaacggctccggcaaaagtacgctgctgaaagtgatttccggcgtctacaagcccagcgccggtaaagtgacggtgaacggcaccattgcgccgctgatcgaactgggtgccggttttgacatggatttgaccgcgcgggaaaacatctacctgaacggcacggtcctgggctatacccccaagtatattgattccaagtttgacgatattgtggagttcagcgagctgcaggaatttttggatgtgccgctgaaaaactattcctccggcatggtggcgcgcctggcctttgccgtggcaaccatgaccaagccggatatcctgattgcggatgagatcctttcggtcggtgatttcctgttccaggaaaagtgtgagaagcgcatggcggagctgctttccggcggcacgaccgtgattctggtcagccattccattgagcagattgagcgcatgtgcaataaggtggcctggctggaccacggccacctgcgccgccttggccccaccaaagaagtgacggcggaataccgcaagtttgaaaagaaggacgccatgaaggcagacaaagtggagggataaggcgcatggcacaggacacgaaccagaaccgcccggcggatgtggcccaggcggacagtgtgggcggcatggccaaacgcctgctgaaccccgcccatttgtcagaccttgcccgccgcagcgccgccaccctgaaagagcagggtgccgagcagctgtggcgcgatgtgaccttccgcgtggggctggcgttccaccatgattcctggcagcaccgggcagacctgcccctgcgccgggagctgaaagcccagcgcgccgagtacgcagacggcaagccgggaccggtggtaagcgttgtagtgccactgtacaacacgccggaaaagttctttggccagatgctggccagcgtgcaaaagcagacctacccccactggcagctggtgctggtggatgcttcagacgcagcccatgccgcgttcagcacccatgccagcaaggccgcggcaaaggatccgcgcatcctgtataagaaagtggaaaacggcggcattgcggccaacaccacggcaggctttgcgctggcaacgggaacgtatatcgccttgctggaccatgacgatgtgctgtaccccaacgcgctgtatgagagcgtgaaaaccctgcaaagccagggagccgagctggtgtacagcgatgagatcgtgctttcggcggatttgaaacagctgggcggctaccactttaagccggactttgcgccggactatctgcgcggggtcaacttcatcacccatctggcggtgttctctcgcgcattgctggaccgtgccggtgcatatgaatccagtgagtacgatggtgcacaggaccatgacctgatgctgcgcctgaccgaacagaccacgcgggataaaattgcccatatcaaaaaggtgctctatatctggcgcggccatgcgggttccaccgcggcgggcatggaggcgaagccctatgccctggcggccggtgtgcgcgcgattgatgcccagctccagcggctgaacctgcccggcaaagccatggaagtgaagggtgcgcccggtgcgttccaggtgcggtacgagctgaccggccacccgttggtcagcgttatgatccccaacaaagaccatattgacgatttggaccgctgcctgaaaagcctgtatgccaacgcaggctatgataactttgaagtcctggtcattgaaaataactctgaacagcaggaaacattcgcctactacaaaaccatgccggagcgttaccccaacagccgggtggtgacctatgtggggccgtttaacttttctgccgtcaacaaccttggtgcgcgctttgccaagggtgagcatctgctgctgctgaacaacgatatcgaggtactcagccatgattttctgcgggagctgctgagctattcccagcggccggatgtgggtgctgtgggcgcaaagctctattacccagatgataccatccagcatgcgggcgtgattatgggcatcaacggcagtgcaggccacagccacaagagctacccgcgcaaggctgtgggcgatttgtaccgccttgtcaccacgcaggactatatggccgtgacgggtgcctgcctgatgaccaaaacggagctgtaccgcgcggcgggcggcctagacgaagccaagttcgccgtggcctataacgatgtggattactgcttgaagctgtggcagaagggcctgctgaatgtgtataccccccgcgccgaagcctaccattacgagagcaagagccgcgggctggacaccaccccggaaaacgccgcccgctatgcccgcgaaaaggcaaacttttacacgaagtatcacgaatatattgatcattatgacccgtactataacccgcatttcaacaacctgtttgaaaactttgggctgaaataaggcagggcagagtgcatttattttggaaagaacccacccgattgcggcagaattcccaggccgtaggggcgcgcattgcgcgcccgtcaccttgcccggaactctctgcgatagggaatgtggttgaacaggctattttgcaaatccctgataaatatccgacggtgcatctggaaaaatacgcggttatgcccaaccatgtgcatttgctgcttttgatccagggcgacgggcgcgcaatgcgcgcccctacggtttccaacatcgtccaacaatgaaagagctgcgtaaccaaacacctccatcaccccatctggcaaaaatccttccatgaccacgttatccgtacccagacagattatgaaaccatctggctgtacatcgattccaacccccaaacatggcagacggactgcctgaacccgaaccggaacaaaccccaacaatctgacacccgaaaggacgtaacgttatgaaccagcaggccaagcgcatcaaagaactatttggctatgcccgtaccttgacgaaggaacagggcattggcaccatgtgcgtgcgcgcggcgggctttttcaaacggcgctttttcggcaagcgggcgcggtactggccgtccaacatggcgctggaagcccagcgcagcgaccccgcggcggaaaccttccccatcatttctattttaacgccgttgtacaatacgccgcaaaactttttaacagaatttctcgatagtgtggaaaaccagaccgcccacaactggcagctctgcctggcggatgcttcggacgatgcccacacctatgtgggggagctggtgcaaaagcacgtggcggccaacccgcgcattcgctatgtgaaaattgaaaacaagggcattgcggccaacaccaacgcggcggcccggctggcacagggggaatatctggctctggcagaccatgatgacatcctggccccgcacgctatctactgcatgggcaaagaactgcaaaaaacgggggccgatttcgcctacagcgatgaagcccttttccgcaaaagccccaaaaccgcccatgtggcccactttaagccggactatgcgccggaatacctgatggcctgcaactacatctgccacctggccgtgttccgcaaaagtctgtttgataccatcggcggggagcgcccggagtgtgacggcgcacaggatcatgatctgttcctgcggctgatcgacgccatgcaggcgaaagacgccaacgccgcaccgctgcatatcccgcaggtgctgtattactggcgggttcatgcggcgtccacatccggcggcaccgaggccaagccctatgtggtaaaagccgcgcagaaagccgtggcggaccacctggcggcaaccggccgcagcggcagggtagaggagggcatcttccccggtacctgccatgtgcagtgggaactgccggagccggaaccgctggtgtccatcctgatccccaacaaggaccatgtggacgacctggaaaaatgtctgttcagcctgtactccaaaacgctgtacgaagcgtttgaagtgatcgtcatcgaaaataactccaccgaccccgccacaaaggcttattatgaaaagctgccggaccgctatgccaactgccgcgtggtggcttacagcggcgggttcaatttcagccgcatcaataactttggccgcaagtttgccaacggcaagttcttactgctgcttaacaacgatattgaaatcatcagcggaaactggctgacccagatggtggccgaagccagccagcccggcgtggcggcctgcggcgccatgctgtattacccggacgataccatccagcacgcgggcattatcaccggtttgggtgggtatgcgggccacagccacaagtaccacaagcgcggcggtagcgggtacatgttccgcctggccaccgtgcaggattattccgcctgcactgcggcctgcctgctggtgcgcacatcggcttatgatgccgttggcgggttggatgaagcctttactgttgcattcaacgatgtggatttctgcctgcgcctgcgggaaaaaggctggcgtattgtgtggaccccctatgcggagctgtaccaccacgaaagcaaatcccgcggttcggacgaggaagaccccgccaaaaaggcccgctttgccaaggagcaggcccgcctgtatgaggtacacggtaagcagaatatcctgcatgacccctactacaacccgaacctgagcctggattatgaggatttccgcgaaagcggggatctgcgcaatctgaagaacgtgaccctgtgaccccctgccggaaaagcagggcaaaatctgtgcagtttttttgctgttacggcttgccacgctatgccggatatgctataatctaaatgttaccgcggcccggctttgggtgtatgccctgcatcagggagccttgattgccttttgctgcgccgtaggcaaatattataaagcgaggtattactactatgagccagaagtctgctatcgaaaaacagcccatcattgcaaaagccgccatccatgagggtgacaccggttctccggaagttcaggttgcgctgctgaccgcacgcatcaaccacctgactgagcacctgaagaccaacaagaacgacaaccacagccgtcgtggtctgttcaagatggtcggccgccgccgtaacctgctggcctatctgcagaagaaggacatcaaccgttaccgtgctctgatcgctgaactgggtctgcgcaagtaattcgcaaaacgggcagggcgctgtatgtgcgccctgcccattttctatatttcagcaggtgttccggcattcatttttattatgctctgccgctggcctgtaataatattgaataaagttaggactccgagagggaagaacggtactttggcactccggccaccgttgccagtccattatattccactgccttttacaatgtaatgtgcggtacctttggtcagtgctgtaactcctaactcctccctcctacctcctaacttaatgtttttggccgcccgcatggtttgtgcagtaaatcgaacgccggagcaaaacaaccgttccgccgctggatttattgctcaaagcatggggctgcctgaaccgcatattcccaccaggtatcaaaaattatatcagaaggagaattactatggcactggaatttgcatcccgtaaggcaaccttccccaactaccgcaagtttgaaacaacttttgccggccgcccgtttgtggtggaaaccggcaagctctgcggccttgccaatggcagcgcaatgatccgctatggcgaaacctgcgtgctgtgcaatgttaccatgagcgaaaagccgcgtgaaggggtggatttcttccccctgagcgtggaatttgaagaaaagctgtacgccgccggccgcattcccggctcctttatgcgccgcgaaggccgccccggtgaacacgccatcctgtcctcccgcgtggttgaccgccccatccgcccgctgttccccaaggatatgcgcaacgatgtctgcgtgaccatgactgtgatgagccttgacccggactgctcccctgagattgccggtatgaacggcgcgtctctcgccattgccatgtcggatatcccctggaatggccccatcggcggcgtggcagtcggctatgtggacggcgagatcgtgctgaaccccaccaaggagcagcgcgagcgctctgacctggccctgaccctggctgccagcatggaaaagatcgtcatgattgaagccggcgccaacgaagtgaccgaagaggtcatgatggacgccatcaaggctggccatgaggaaatcaaaaagctgctcacctttatgaacggcattgttgcagagatcggcaagccgaagaagagctttaccccggtggaactggaccacgctctgttggcggatgtgtacgccaagcacctggaagatgtcaaggctgccatgaacaccgacgacaaaaacgtccgcgatgccgccatgctgcccatcatggatgctattgcccaggaacaccccgaactgaatgccgccgacctggatctgatcagctataagctgcagaagaaggttgtgcgcacctggctgctggaagaaggcaagcgtgttgacggccgcggcatcaatgagatccgcccgctggccgccgaagtcggtgtgctgccccgtgtgcacggctccggcctgttcacccgcggccagacccaggccctgaccatctgcaccttgggctccaccaaagatgcccagatgatggacgacctgtccgacaccccgatcaagcgctacatccatcactataacatgccgccgtactccaccggcgaagcacgcgcaccccgcagccccggccgccgcgagatcggccacggcaacctggcggagcgtgccctgatccccgtgctgcccagcatggaagagttcccgtacaccatccgtaccgtttctgaaatcatgagctccaacggctccacctctcaggcttctatttgcgcttccaccctggccctgatggatgctggtgtgcccatcaaggcaccggttgccggtatttcctgcggcctgatcaccgatggcgacccgctgcacggcggccgctggatgaccatgctggatatccagggcgtggaggacttccacggcgatatggactttaaggttggcggcacccgccgcggtattaccgctatccagatggatattaaggtggacggcctgacttatgatattgtggccgaagcactggaaaagtgccgcaagggccgcctgttcatcctggacgagatcatcaagccctgcattgccgagccgcgcgcagagctttccaagtatgcacccaagatgttcagcatgcaaatccccgttgacaagatcaaggacgtcatcggtaagggcggcaaggtcattcaggaaatgtgcgccaacttcaactgcaagatcgacattgaggaggacggccacgtctttatctccgctgtggatcaggacgacgccaagcgcgcgatttccaccatcaagaccattgtggaagatcccgaagtgggcgctatctacaagggccgcgtgacccgcctgatgaactttggtgcatttgttgagattgccccgggcaaggaaggtctggttcacatctccaagctggatgaccaccgtgtagagcatgtggaagatgttgttgccgtaggcgatcccatcatcgttatggtaaccgacatcgaccagcagggtcgcatcaacctgtcccgcaaggatgccctggccgccatcgccaaaaagcgcgcggaacagcaacagtaaagttacgggagttttgttccttctttgaaaagaagggaaccgaagaaactttaatagaataaaaacaggcagtgccgctcccggaaaggggagaaggacactgcctgttttggtattgggtaaaaaagaaagtgggtacttaagcagaaaaacagcgcagaatctttcgattctgcgctgtttttatatggagcgggtgaagggagtcgaaccctcgtccccagcttggaaggctgatgtactagccgttgtacgacacccgcattgaatacttaattattttaccgcacgggtgccggtttgtcaatagcggattgccggttttcagctgttccggcctgatccggcgtgttttcactcagcgtttttaccgccgagccaaaagaaccaggaattccctcaaaactctttgcgctgataaatttgtacgctcaaggcccagctgccaaggtagagcagcagcacggccgcgcagggcagcaacaaaagcaccggctgcgcggtgagggcattgcccaaagcgtccagctgggaaatgacggaagaacgctgcagatagggcagatgctccatggcaaaaattatgaggaaaacaccaaagaatgtgaccaggtacacccaggtgccggcacgcaccgcgccgaatttgtaggaaaacggcatgttgacggcaaacagcagcagggaaaacgcggcaatgaccagaatcgagaatgccgcttccaacacatctgtgtattggccggcaaggaaaatccccaccgcggcgcaaacgctgccaaacagggtgagcagcagccccaacaggtacttgcagccaacaatctgccccggtgtgaccggcagggtgcgggcataggtatcccagtgggcgtaatcatcaaaattcatggtgctggatgcgtaaacgccgcacacggcaaccagcgcataacacaggtaatccatatgcaggcagaccgccatgccaagataaagcacaaccataataaggaaatttttcttgtagctgttcaccaaaatggcccagtctttgcacaaaagacctttcatggttaaccctccttgctggtcaggcgcataatgtcatcaatgctggcggcatcgcataccacaccgggcaatgcgcgcaggacgctgacccgcgggtgtaccaggctttcgcagccggcggcggtgcggcaggtggcggcgatccactccggcggcaggcggtcaaggtcctgctggctgcaccgcagaatgccgtattcttccatcaggtcatccttgtttttggcaaacagcagctgcccgtggtgcaggtaggcaatggtatcggcgatctgttccaggtcggtggtaatgtggctgctcaacagcacgctgtggcgctcatcctggataaaatcaagcaggatatccaaaatctcgctgcgggcggcggggtccagcccggaggtggcttcgtccagcaccagcagccccggccggtgggccaaagcgctggcaaggttcagcttcatccgcatgccgcggctgagttctttgatgctctttttcggcggcaggtggaactgctccagcagagcggcgaaataaccggcatcccacgctgggccaaatatgccgcgcaggctggtaccaacctgtgcgggggtcagcgattcataaaaataggcatcctcaaacacaacgccaattttcgcgcgcacggcggcatcatctggggtggcgctcagcagctccacggtgccggcatccgggcggtttacaccggtcagcagtttgagcagggtggttttgcccgcgccgttttcaccaatcaggccaacaatgctcccggcgggaatttccaggttcagcgggccaagggtaaaaccgtggtaatgttttgccacaccatacagtgcggcggccaaaggttcagccatcatgattcctcccacaaaaggtcaagggtttcgcgcacttcgtctttggtaatgccgccgcgccgcgcggcatcaatggcgtgctgcaggtgctcttccatctgttttaagctttcctcccggtgtagggccgggttttgcggcgcaacaaagctgccgcgccccggcatggtggtaataaaaccatcggcctccaggtcctcatacgcgcgcttggtggtgatcacgctgatgcgcagctccttcgccaacaagcggatgctgggcagtgcatcgccctgctgcaattcgccgttcaaaattttggctttgatctgccgggtgatctgcgcgtaaatgggttcctggccggaattggagatatacagctccatgccgtgttcctccttgcaatctgaactgttcatatgctatatatacagtatatacgcgatatacacagctgtcaacaggtaaaataaaaaaatccctgcccatattcaggacagggatgggaaaaggcgggaacaggcagtcaggtttccgccgccggttcttcctccggttcgctcaccggcaggccgcggtgctccaccggggtggaaaacacgatctgcgtgcgggtacggccaaactgctgcagatggttgataaaggtatccaactcctgcgtggtgccaaacagcacttcaatcagcatgctgtaatcgccagtcacgcagttgcactccacaacattgccgcagctttggatgtaggggtaaaactccggcttgagcttggggtccatatccaggttgatgaacgccttgaccagctgccccagcttgagcggggcaacctgcgcctgatagccggtcagtacgccgtctttttccagtttggcaatgcgggccgaaaccgcaggggaggacaaaaacacccggtcggcaatttctttcagcggggcgcgtgcgtttgtttgcagaatatcaatgattttgcggtcaatacggtccataccatccacctccattataagtaaaaaaagggaacaatgcagccgccaacaagggcggacgacattgtccccataaagtacttaaaattctaacacaaaaaacggaaaaggtaaagtggattgcaaaattttataagaatgtaaagcagtgctataaagtagggaacagcagctgcgcgctgaaccgcccgccgggaccaaacatttcaaagtggcagtggcagccgaaagaatacccggtatcccccacatagccaattatttggccctgttgcaccacatcgccctgcttgacggcaaaagcgctcatgtgggcatacaaggttcggtagccatccccgtggtccagaatgacatagttgccatagctgaaaacgctgttgtggtaggtggccgttaccaccgtgccgctggctgaggcaatgatgggggtgccgcgcggcgcggcaatatccgcgcccttgtggttgtcgctgccgcccatccagcggcttacatgcttgtactgcggcaccggccagatgaaggtgtgcccgtccagctccgctgtcatgcccggcgcaagatgagtgccgcgggcagtgatctccggcactgcgggggtcaatatatcaatatgtaccacctcggcggcagtttgcacaccgttcacataggtgatctcctcggtcagctgctgggtgccgtcaacaccctgctggatggtttccaccacgccaaagccaaggtcgctgcgttccaccatctgctggtcatagggaatcggttcctgatacacgcgggtgtacacagttttgacctgcagcagatcgcggctttgcagctgctgaacgatctcgccataaggctgcaccgaacccgccagatagatgccatccaccagccggagctcgtgcagaaatgcggtgcgcacattgctttgcctgggggcgcgccagggccgctgcagctggttgaaaaagcagcgcaggtggtcgccctctaccgtaacaaaagcaaggctgccatccagatacactgcggtgccctccacaatggagctgccgctggcgcgcagaatagcatccgtcagctgcaattccgtcatgggggtaccgccgatgtgcagggtataggttggctccagcaccggcagggcggcggtatcggaatccgccagctgccgtgcggcggcaaggcgggcctggaggtctgcgcgggcggtatcaaagttctgctcggtggcaacgctgccaaccacggtgccgtttacttccacctgcagggtaaagtgcaggttcagcccatgggcaaccacagcccaaagtatcaccccggcggcgcagggggcaagccatggcaccagctgccgcagcgggtgcggcccggccagcgcggtgcagaatgcctgccccagctccaacaccggggcaagcagcagccagataagataaagcgcagcatcccgcgcagcgtgcgccgcggcggcagccttgcggcccaggcagatgagccaatattctgttaaaaagccgacggcataaaaaatctcgccagttctgtgccagccgggcagccggcgcaggttggtgcggcggggtttgcgcggtgttttgtgttgcagttcagccatagtgtgtttgttttgtacgttagccggtcaatcgacattctccgttcagtgcgggatgtattgcagcgggtcggtgcgggtgccgttgatgcgcagctccaaatgcaggtggtagccgccgttggcaccgcgcacatccccggtgttgcccacatagccgatcacatcgcccttatgcaccgtctgccccgcgctgacgcaaaagctggacatgtgcgcatacagggtggcatagctgctgccgtcatccgcggtgccgtggtcgatctgcacacagttgccataactgggccgggcggatgccgcgctgaccacgccatccgccacggcgtaaatgagggtgccgctggcggcgggcatgtcggcccctgtgtgcggcttgttgtatacagcatccggctccccaaagtaggtgctgatgcgccccacgctgggcaggggacaggtgaaatccaaactgcaatggcgggcgggatcctggtatttctggctctgcgcttttaagtaggcatccagcgcggcggtggcctgttcataggccttgcgtttttcttcggtcacggcggcctgggcttcggcggctgcctgctggctgtccagttccgtgctggcctgctgcaaggcctgttccagctggatctgcgtctgggtcagttcatcctggcgcgcctgcagggcttgggcggcctgttcggcctgcgttgcagcggcttcggcctgctggcgttgggtgtccagagcctgagcttccgcatccaactcgtccagcagctgtttattgtgctcggtcaaatcgttcagcacctgccaaaaggtcagcagttcgtataaatcatccgcctgcatcaacaggctgatttccccgccttcgttcagcagctgcatggcggtcagctgctgcttgcaactgtcatatcgggcgctgaacgcagcctgcttttcttccagcgccttggccgcagcggttgcttggttctgggcttcggccagctcggtgcggctttgctccagctgggccacaatgctgcccagttggccgcgcagtgcgtcggtttggctttgcaggtcgttgacctgctggcgggtgtcactggcttgctgctgcatgctgtccagtgtgctggcggcgctttcatattcgcgctgcgccgcgctcacctggccctgtaaggcagcggaatccgctgcatgggcggggaatgggtacaaaaaaagcagggctgccgccgcagctgcagcagcccgtacatagaatgttttcagtttcatttggtttctcttattgcggcagcatggccagcgggtcaacgggggtgccgtttaccagcagctggaagtgcaggtggttgccggtggaactgcctgtgctgcccacatagccgatcacatccccctgcgcgacccgctgccccacctgcacggcgggcttgctttgcaggtgtgcatagctggtggcatagttggcagggtaagtgccgtcatcgttggcagcggcgtttgcaccgtggtagatggttacatagtaaccgtggtcatcatcccagcctgcctgggtcacaacgccgctctgtgcagcctgtaccggtgtgccgcccgcagcggcaaaatccacgccaaggtggggcggtgtgtcggaatcatcggtgcggaagggggcagaaattgccgtgtagctttccaacgggcagataaaatccagcgtggtggtcaaatgcaggtccggggaggtggtgttatcgtaaggaatcatcgtgcgggtatcggtcaaggctccatccacaaacagctccaggtgcaggaggttgccggttgatgcgccggtggaacccaccgtgccaagctgctggcccttggttacagtgtcgccagctgccacgctcaaggtatccaggtgggcatacagcgtgcggtaactgtggccgtccggcagggtgccgtggtcgatgaccacatgattgccgtaactggggtggttgtagttggcaaccgccactgtgccgccgtacaccgccaacaccggcgtgcccttggtggcgctgtaatccgccccgcggtgatagtctgatacaaagcgggcaatgtaatggaaatccgccaccggccagccaaaaaccagcggctctgccgtggcctggggctgctccggctgtgcggtgggttccgcggcgctgttggtcagcgtatcatcagcaggagtggcaggttccggcgtgggttctgccgcagtggaaacgggttcggcctgcggtgttatggtttccgcctggggccgcagggcgcaggcaccgcagcccagcgcaaccagcacacagccaagggctaacagcagcggggcgggtttgcggtatttcagcaagtgggccacccgcttggccacctggccctgcccaaaagcgagggcaccgggcatctggcgcaccgtggcaaagcgcagaatgctttcgcagtaatcagcgcgttcgg

SEQ ID NO: 702 - DNA, 17585 bp, unidentified
  source 1..17585: mol_type = unassigned DNA
ccagctggcctgctgtggataccaaatcacacaggaaaacgccgtccttgttttttacgccctcgctggccgcaatgatgacattgtggcggtctttttccagctgggctactttttccaggaacacattctcgtcaaaggggcgctccggcagcagagtgatgtccggaccgttgcagtcagccccggcagccaggctggcggcaccggccagccagccggtatggcggcccatgatctcggccaccgttacgctgcggatgttatacacgctggaatcacagatgacctctttcaggatggtggcaatgtacttggcggcactgccgtaaccgggggtgtggtcggtgtacatcaggtcgttgtcaatggttttgggcacgccgataaagcggatctcgctgcccttggcagccccgtaagcggaaagcttggcaatggtgtccatcgaatcattgccgccaatgtagaacacagccccaatgcagtacttggcaaacagctcaaacagctgcacaaaggggcgttcgtccgtggcggggttgggcagcttgaaccggcagctgcccaggtaactggacggcgtgcgcttgagcagctcaatttccatcttgtcgtcaaggcggtcatccaggtccacaatcttgccctgcaaaagcccttgaatgccatactccatgccgtatacatgggcggcgcccagagctttggcagcttcatacacaccggccaggctggaattgattacagcagtcggcccgccggactggccgaccagtacatttgttccccaagacataagaaagccctccttatttttgcagccatcatgctatcttaatatgatacaccctagtgtacacgaaagtacgacttaaagcaagtactttgcgcaccggaggttttacagcttcacgcccattttttccagcgcaaacagcgctgcgcccaggctgccgcacagttggctgtactcgctgacctccaccggggctttcagggcggtttccagctctttcacaacgccgcggttgcgggctacaccgcctgtcatcataaagggggccacgccgccggtgcggcgggccagggcagcggttttgcccgcaacagatttgttcaggccatggatgatatccgccggtgcggtgctgcgggcaatcaggctgacgacctcactttccgcaaacacggtacacatgctggaaatggtcacatcgttgtgccagtccaggccaagctcgctcatctccggcagcttcatctgcagggtgcgggccatcatctccaaaaaacggccggtaccggcggcgcatttgtcgttcatcgcaaaggtttcaacagcgccgctttcgctcaggcggatcaccttggaatcctgcccgccaatgtcgatcacggtgcgcacggcggggtccagatgatgagccccgcgggcatggcaggtgatctcggtcacggctgcgccgtcatcgcccaggaactcgcgcccgtagccggtgtataccttggaacccaggtcgctttcggcaatgcctgccatcgtcagggcctgttccagtgcctggcgggcgcccgttgcagccccggcgccggtgggcacaatggcccagccgcagatctttccgctgcgatccaggatcacggcatcggtgctggcagagccgctgtcgatgccggcggcatattgtgcgttggtgttcatggcgggggcctccttgttttcggtatcgggaacggcgttcaggctttcggcaaatgcgcccaggcgggtgctcagctgcccgccgccgctggtaaaggtctggcgggaacagtcggtttcaatttttaataccggcagatggaactgctccggcgcggtcaggccgggggcgtaataatcacagaactgcacggtgtggtacacaatgccaacggtctggccgtccaccagggcggcgcgctcactgaccggggcatccatccgcatgcagggcatctggcccagcagggcggcggcgtaaccgggcaaaaagtcctccagtgcggcgggggcaacatcggcaagctcacggttgccggtgcaggtagcatccaccacgggcagggcaaaggctttctgcacggtatcatacagcacgctgccgccatgggcacccagcagggtcaaatgcggaccctcggcgtcgggggtgtgcacaaaaaaggcgtgggcgcgctgggcgtcgaattcctgcccggtgtaccgctgcagggcatccgccagcctgcgcaggtcccgcgcaaagcgggcgcgggtggccggggtgctctggtgggggacgggcagcagctgcaaaaattccatcttaccactggcagccagcacatcgtaaacgcgcagcatggcatcgcagcagttggtcagcaccaaagcccggatgccggattgctccacctgttccagcacagccttggcgtaaccgcacaggttggcgtgggcgcagcgctccgcgcaggaaaaactttccgccagcggatccagcgccgagaaggtggccccatacccggcaaacagctccagcggggcgtatttgcaggcataataaatcgttttgctcataccagcgcctcctgtttgctgtgcagcatctccaggaaagcatccagccgggtggcggtctggccgtccatcgtgttggcgcggtcgcagccatcgccgtccagcagcagcaccgggtagccctcggcttccagtgcgctcttgaacagctgtgcggcccccatcgtctgcttgcagccccattggcagaagtagaccaccccgtcgatctgctgcatgcggcacagctccagcgcgcgctggatgcggtgctgggcgctgccgttaaagatgttgttcaccagccgcgcggccatgctctcaaacggtttgtccgggtccatgtagcagcctaaggtatcggcgttcatatcgcaggtaataagctggttttctgccgagaaattcagccgctcccgcacgggcgcctgataaaacggcacggcgtgcgcccacagcagccgggtgccgccacccatggggctggcctcgatatccgccagcagcttgcgggcgtactgttcagcctgcggggtgcccagcatggtgtgggtcacaaacacttcgtaaaattcggaggtgacatcgttgtgcaggttccgcccggccttggcggcctgtgcctgctgcaatagttccagcgtgcggccgctgtgggcgactgcctgctgcagggccgcttcgtccagcttttggtgggtcgcatcctccaaaaaggcggcgaactctcgcaggcggtcggaaacttcggccacagcgtactcgtcgtggtcatagggcacatccagataaaagtgggggatgccgtaatgctgcgccagccgccggaaggtcaggttgttggcatcgcaggcaatggaggtgcaggcagtgaacagcggcttgcccgccgtgccggaaagccccatgcccagcaaagccttgtgatagctgcacagcgtggggctgatgcctgcgctctcggcataatggataaagccgcgctcggctgcggcaccgttcaggtaacaggcggtggcttcggcaaacatcggcagcaggtggaaggcgtgcagcagttcacagggcataaagatattgaccagcgccgcccgctgcgggtgggccaggggcgcaatcatggcgtccatggcgatctgtgccgcatactgccgcgcgggggtgagctctttttccggggcaagcagcagctgcacatccttggcgcggtagcccaacagcagcagccggcgggcaagctccggcttggaaatggcgtcatccaccagctggccaaagcggtcaacgatatttggcatagggggttatcctttcagcacataggtttcaatggccttggcaacgccgtcatggttgttgtcgtccgttacatagcgggcggcggccagaacatccggtgtggcgtttcccatcgcaatgccgtacccggcggcctggatcatggcaaggtcgttgccggaatcgccgcaggccatcacctggttcatcgccaggcccagggtatcggccagcgtttttaatccgctgcccttggtcacgccgggggcgttgatctccatgttgttgggaatgctggaagtaatctcaacattaaaccggctggcaacagcctgccaggcagcatcgcgggcggcattgtcccgataggtgatgctgaacttttccacctcgtgcgggtgggcggcgaacactgcgtgcatgtcatccaccacaatgcggctgtcgcgcaggtagcggcgcagggcagggggcatcagggcaaggccgtcattggcaccaaaataatcggtgtaggctttgccgccgataaaaatgcccatggcaccgcccgttgcggccacgatatcataaatgtcgctggcaagggcagcatcaaacggcaggttgaccagcggtttgccggtggaaagctccaccacgctggccccgttggaagtcagggcataccgcacgccgggaatgcgcaaaaacgcttccggcacacccgatgccacacgccccgttgcggggatgacatcaacccctttggcaatggcagcgcggatggcctccagcgtgcggggtgtgatctctttttcatcattgaatacggtgccgtccagatccaatgcaacaagacggatatcgggcataacggacccctcctttgttatatttcaccaaagattttagcgcattttcggtcattttgcaagggcaccttgcatttgctatgccaagtatggtaaagtgacatcagccctttgcatattggcacagggcagggaaggggaacgcgatgcaaaccgatcacggcggcctgcgcggtggtgctgaccgtggcaaccgccgttgccatgccggaggaagtcatctggttcggcgtgctgcacctgctgggctgtgcggccctgctgacctgtctgctgcaccccgcgctggaaaagctgcccccgctggcaggggttacgggcagcgcggtgctgtttgccctgctgaaccagctgccgcagggctggctggggtttgagggaacgcacctggcggccctacccgccgcctggtacaagccgaatcttttctggctgggtctgccagatctgacggtgttttcctcatcggattatttcccgcttttgccgtgggtgtttttgtattgggtggggtacttttttgcgcggtggttccgcgcccgctgcaccgcgcagcccggcctgccgcccaaagccctgcgccccctgtgcgccgtgggcagccgcacgctgctgatttatatgctgcaccagccggtgatttacggcgctttgctggggctgcacgcattggggttggcataaagtttgggtaaagaaaaaagaagaaagaataatgaataatggatgtgtgccgcccacggcgtcacattttaaccaagtcagttgctccggcaaaaagcattccagccagagcagccaacctattttatttgcgccgctgcgggcggcgcaccagcattattctttattcattattatttattattttgtataaactattgcccagaccccgtgtatgagggcaaaaaactgaactttttatgaaatttcaaaaagtgggccagaacgtgtaaaatcgtggttgacaggagcctataaagtatagtataatttcagttactggttgattgtaattttgattgaccggcaaactcctgtctcagaccaagggagggaaaaagatgtcggagatccgtgtcaaagagggcgaatcccttgagagcgccctgcgccgtttcaagcgcagcactgcccgcagcggtgttcttgctgaggtgcgcaagcgcgaggcttatgagaagccgtctgtgcgtcgcaagaagaagtccgaagccgcccgcaagcgcaagtttaagtaatccggagccatcgcagcggctatgccgccgttttcgataaccgtgtttacccaaaggaacggcagaacaggttcgcagagatgcgggcctgttctttctttatatctaaaaaccgggatatctaaaaaccggggtggcgcttgcccgctgccccgcgcttataataaggtagtttgtctatgcttcttacccctgaatatattttccgtgccattgaggccatcacgccggagttcctgcgccagcacggtatcaccgccctggtgctggatgtggataataccttgacgggggatggcagccagcagctggatgccaccgtgcagcaatggctgaatactatgcgtgccgcgggtgtgcggttgacgattgtttccaacaataccgccgcccgcgtgcgcccctttgcggaccgtgtgggcctggcttgggtgccgctggcctgcaagccgctgccggtcggcctggccgttgcccgccgccgccttggcgttcgcaaaaatcagatggccatggtgggcgaccagatctttacggaccgccttgccgcggggctgtacggcatcccctgcctgtataccatgccgcgtggggtcgaccaccagcgcggtgtgcagttcaagcgcaggtttgaaccctactggctggaccggtattaccaaaaagggggccgcctgtatgagtgaagcaccgcgctttggcacggctgggctttcggacagctaccgtgtccgcagctttgacccgcaggccatggcggagtatacggcttcctttgggctgacggcgtttgaataccagtgtgggcgcggtgtacgcctggggctggataaagccgccgccttaaaagaagcgtttgatgcaaaaggcatcactttctcggtccatgcgccgtactacatcagcatgagcagcctggaggaggacaagcggctgaacagcgtgaactacctgctgcaaagctgcgcactggtcaaggcactgggcggccgcagggtcatcttccacgcgggcagctgcggcaagcagagccgggaagccgcactggaaaaggcgctggacaccatgcgccgcgccgttcaggccgtggatgaagccggttatggcgactgtatcctttgccctgaaacgatgggcaaggtgaaccagctgggcacgctggatgaagtgctggccctttgcagtgtggatgaacgcatgattccctgcgtggattttggtcacctgtatgcccgcagccagggcaccgagctgaacgatgagaccgccccggcagattacgccgccatcctggatgccattgccgcagccttgccgggggagcgggccaaaaagttccacgcgcatttttcccgcattgcctacaccaagggtggggaaaaatgccacctgacttttgcggataccgagtttggcccgccgcctgccccgctgatgcagctgctgaaaactcgtggcctggcgcccaccattatctgtgaatccgccggaacccaggccgaggatgcggcggcgctgaaaaaactgtatgaacaaggctgagaaagcccaaaaacagccaacaaaagccgaaaaaaaccaaaatatcacccgaaaatcccgctaacctcttgcaatactggcgcttttcgggtaaaatacttacaggtatgacaatgcaatggcattgcttgatgggcggcggggccgctttttcaaacaggcccgattctaaaattatggaggagttcctatatgatctctgcaggcgaatttcgtaacggtgtaacttttgagcaggacggccaggtccttcaggtcgttgagttccagcatgttaagcccggcaagggcgctgcttttgtgcgcactaagaccaagaatgtgattaccggttccgttgttgaaaccagctacaacccgaccgctaagttcccccaggctttcattgagcgccgtgaggttacctactcttacgaggatggcgacctgtactacttcatggataatgaaacctatgagcagatccccgttgccgctgccgatgtgccggaaaacttcaagttctgcaaagaaaacgaaatctgcaaactgctgtcctacaagggcaaggttttcagcgttgaaatccccaacttcatcgagctggaagttaccgagactgagcctggcttcaagggcaacaccgctaccaacaccctgaagcccgctaaggttgagactggtgccgagatccgcgtgcccctgttcatcaacgagggcgacaagatccgcatcgatacccgcaccggcgagtatatggagcgcgtctgatcttaaaacaaatggccgggccgtggtttttgccgcgtcccggcttttttggaaaattgcaaaaacaaacaccctgtttacagtgcgtgaaggaggttttcccttatggctatggatctgaatgcaaaggccgcttacatccgcggtatgatgaaagggatggagtttgaccccaccacccaggaaggcaagatcattgttgcaatgatggacctgctggaagagatggccgatgttgtgagcgagcatgacgatgccctggatcaggcttttgacgagctggacgccattgatgaagatatggatgatctggtggacagcatcttcggcgatgacgatgaggacgaagatgaggacgaggatgacgacggcgcatttgaaaccagctatgaagtcacctgccccaactgcggtaccgtcaacattgtggatgaggacaccctgatggacagcgataagatcgtctgcgcagagtgcggcgcagctttcgatgtggaagttctgcccgacgatgccgagatgcccgccgatgcagaagccgaaagtaccgatgtgaccatcgagtaagcggttaagtgcacaaaatagaataacagatagaaaatcacccctgtggccggattatttctggccgcaggggtgattttttgattattggggaagaaagtaatttgcagcgaggttgcaaacgctgccataaacctgtagacgatgtgtaggggacgatgcttgaccgttccgaaaccgtaagacaatatatcattataaaatttgtgatgctcaatgatgtaaaagctccggcgtggtcaggcagcaacgccctgcggcacagggataaagtacaacaaaaacagcccggtccaaacggaccgggcattgtgggttcctgtttactttttctcgttcttcagctggttgcgcagcatgatatcgccaaaggtcagggcgttgaacaaaccgccggccttgttggcctggcgcacaatgcgcgccggcagaggcttgctttcatcggtggaaagcaatacaatgtgaaccttatcggccacgtcggcattgccttcctttttggtggtcagcacctgcaggtacacaacatagggatcatgcatagaaccatagtaaatatcgttgccgcagcgcaccagcgggcggcccttataggtcagactgggggtaaaagccatctcttacaaccttctttcgctgttgttgtatccgaaaagccgaaaatatagcctgtttctacaaacacagccggattttgcgttaaaagtccttggaatccacaaaggattccgccggcttttgccttaaatccgtcttgcgtttgcgaaatatgcgtcattttctttgttttcagctacaccttaatcaataaaaaatattataccatacaagataggggattacaaatctaatttttcgcgttcgatcttttcttcgttcaaggcaacgcgctgggtcaaaatgcgcaccttgctgtccagctgactgagccggatggacataaaaaactgtttggccagcagcaaaaagatgatgacgatataaacaaaattgatggggctctggaacccaagcagatacgccgcccagtaggcaatgccgggaaagatggccaaaatcagcagaatggcgctgaacagaagccagaaaatggtatcttcgatctgcaccttagccaaacgcacgcggcgcagaatataggttgcggtgatcaggctgcccaacacaaggcatacacggataattggctgatcaaacatggcttacaggctcctttccgggtaaggcgtttcggtgtcccgcttgcggaaccactgaatcagcaaaatggagatggacattttgaccatatattcaatgctgcgccaaaaggtcaggtagctttgaccggcctcgcgctcgcccatcgtaacttgtacttcgcgtaccacagcgccgtttttgatcaggtaactgatggtatccggctccgggccatagttcaaattttgggcaaattcttccaccatggcgcggttgaacagccgcatgccgctggtggggtcgcagattgcacggccggtggtcagccggatggaccagctgatgatgtaactgcccagcatgcgcaggcttttgggcttttttaccgtcaaaaagcggctgccaatcacgatgtcggccccgctttccagctcttccagcatggcagcgatatattccggtcggtgctggccgtcagcatccagctgcatggcgcagtcatacccgttttcggcggcatagcgcagcccggtctggaatgcacctgccagccccaggttgaccggcagatcgatcaagcggaacccatgttcccggcagatggccgcggttttatcacggctgccatcgttgactacaacatagtcatactgcgggtagttcttgacaatgccgttgacgaccttgacaatattggcttcctcattatatgcaggaataacaatcagcaattttgacataacaaatgttccttatccacttgcccggcaaacaccgggcagatgtcagctttggtttatgatccccatcattttatcaaatacggcatcccatgtaaagtgcgcgtacacattgcggtacgccgcctcggcacaggcatgggcgcgggcgggatcatccagcagggtctgcagcccggtgcggatggtttccaccgtggcgtcctgtggctggccgggcagcacaatgccgtgggtatcgtccggcagtagctcctcggttccggcggtacgggtgcacacgatagggcagcggcaggccgcggcttccagcaaggtggtgggaaagccctcggcataccgggtgggcagacagtatacatctgcctgccgcagcagctgaaccaccgcatcatgcggcagggcaccgggggtaacggccccaaggtctgccagttcctgctgctgcggaccgctgccagccgccaccagaacaacgcccggcagctgggccacggcctgggctaataatccggcacccttttcgggaatcaggcggcccacaaacagcacgatcttacggtcgccaaggttcagcttggcgcgccagtctggcgcgtgggcggcttcctgttccaaagcagcggggtcaatggcgttgggcatggttcctgcagccgtaatgccaaaggtgtgcagccagcggcaggcagcggcggaaacgccatagaacggcgcgccggtgccgcgcaccaggcggcaggcaacctgctcatacagccgcccgcaggcccccagcaggccgttgcccatcggcatgtatccggtggaatggtcaatgaccagcatggggataccgcggcgcttggccgcgcgggcagcccagacgctttgggtgtacatgcgggtctgcaccacgcagaaatcgagcttttgcgcccagatttgcgcggtcagcgcgtgaaagcgcgcccccggcttgatgacaggaaagcgcccgttcatgacaggccagacgggcaggcggtaaatttcaatgccatccccgtcaatttcgtgctccggcaggttgggcagagcactggtaaccacaatggcgcggtgcccggcggcaacagtgcggcgggcaaggttccaggtgtagcgctccacaccacccaccgtgggcaggtactgcgcagaaaaataacaaatcgtcatcgggcaatcaccgcaagcatggcgttcagcaataccccggcgttgactacgcacaggcagcagaccagggtgcaggcggactgtttgccgctggcaacctggacccggcggggcaggcaggtaagcaggagcaacggcagcacgggcagaagataccgcccctggaagccgtaaacggtctggtaataggtcggggtccacacaaggcagccggcaaaggccaacgcggcgcacagcagcgcggccagcgcacaccacacccggtagcgcccctggggcagccccggcacgggaacatcctgcgccggaacggcggcataccacagcagcaggtagagcgccaacacccagaaccaggccaggtccagcgagctgtagcttaagctgccgcccacaaggccgcgcacccagttgtcggcatcctgcaccacgctgcgtaccagcagcatagccacggcgggaagattgtgcagaatgtaaccgggggtaaaggtggtctggtcctcctcgctgggggtgctctggctgtcccgcacggtacggacagcttcgatctctttgatcagcacattgcggtccaacgggtagcggtcatcctccacgccggggtagatctggcaggcggaaagcagctctgcacattcatcactgctgaacatggacttgaaaaagtctcggcggtcagcagtggccagccgttcccggcacatttcggcgtcggtggtcatcaggtcgcggtccagataaaccagggaagccgcactcatgaattcatcatcggtcaggctggaatgctccacttcctccgggctgaagaaaaagctctggcccagaacggcggcggtcacatcgccctcctgcaaggcctgcacccagaattcaagctccttctgcgggatctcggtcacgccctccacgcagtaatacaggcggcgcacaaagttggaagccgtgttttcgcggtactcggcaggcatgttggcaaaccggttggaggttttgccgtcacccgcggcaggggcggcatgcagggtacgattgtcagctgcctctgttgctgtataagaaaccgcggcagccggggtagaaccctgtgcggaggtggtttccgtctgagtagtctgattttcaaacccggcagaaccggccaccgaggtgaccagcacagcgcggttgatgctgagtgccagcagcacgcatccggccagataagcggcttttttggttgcggcgctctggccaaagcggctgttgggaatcagcaggaacaacgctgccagcggcaggtaaaccagtttggccggtgccagcaggatgccgaacaccgccagcggcagccacagccgcaccggcagcaccgtgccgtccttgcagccaaaaatcgcctgcatacacagcgcagtaaaggcaaacgccagccccagcagcagggaatcccggctgaaagaagccgccagatgcagcgtcatgggcagcagggccgccgcagcgaatacccgcctgccaaacggcgcggctttaacggccagcgccgctaacaaagcgaacacaattaaatttgctgtgcgccccagcatcagcgccggaacaaagccaaggtgaaaaacatatgccaggaacaccgctgccgcgctgaacaggtacagcgtgggattgcggtcggtctgcagttcttccagcgccgtgtggctgtcaaagctgtcaggggtggtggtgaacagattttcgctcagttcctgccagctgaacacggtggtcttttcgttttgcagcagggggtcaaagtcgtgctcgcggcggtaggtcatatccagcggcacattgcccatccgccattcatccggcgagagcatgttggcccatttgcaggctaaagtaaaggactggttgatgtggtatttttcgtccggtgcggcatagggcggcagcacaaagctgtacagcatgccaaagcagagcaccagcacaaacaccagccggtgcagcggcatgcggccccgcatggcaaaataaatgccaaggaacaccacaacgctggccagcagcccgaccagcaaaaagaaccgggtcaaaaatccaccgatctgtttgtaagtcaccagcagcgccagcgtgccgtccacggcctcgccgtttacggtaaaggtatcgttccacagcacagcgccgttgctgcagcccacggtcaaccggccggaaccggtatactccggtttcagggtcacgcggtagcggcggcctgcgctgccggtcacgggggtatccagccccatgccggtgtactgcccggccacaatgttcgccatatcgccggtggagcgggccagcacctcgccggtgtcggcatcggcaagttccaggtgcagctcaccggtgggctggccgttgctggtgccaaacacaaaggccatggccagcaggtcattgtcggtatcaaaggtctgggcagcgccgttggcttcgtccagctcggcgctgtactggctgtaatcatcgctgatgcgctccgacaggctcttgtcattgttggggcgcaccgcggccaaccaaaccagcaccacggccagcaggcaggcagcagcggcgcacaaggcggtgcccagcgggcttttcagaaaatcctttattttgctcatacgggctcctcccggttttggtggttcagcgttcagggggtgtccaaaacaaacaccggaatatttaacgtttcagccgcacccatcaaatctttgcgccaaaggctttttttacggcggcaggcaggcggccgtcccgcagcaggatctcttccaccgtgccgcgcacagcgccctcgccgcctttttggcggcagatgaaatccgcccgccccagcacagggccggcagcatcggccgggcaggccacaaagccgcacagagccatggcggtcaaatcgttcaggtcatcgccgcaataggcaacatcctgcttggtcaggctgtgctcagccataaacctgctcaaaaaggcggctttgtcgtgtacgttctggaacagatagtcaatgtgcaggtcctgggcacggcagcgcacggcttcacattcgcgcccggtgcagatcataacctgcatccctgccgcgcgggccagcacgatcccggccccatccttgatggcaaactttttcagctcgttgccggtggaatcatagtacacgccgccgtctgtcatggtgccgtctacatccagaaccaaaagtcgaatcatgggcaaacctcgttattttgcgtattcgctgggggtgataaaggtcacatccagcccgcaggctttgatggcacctgccatggcggtgttgaacgcggcaccgcgcccggtgtgagcgtgcagcaggctgtcggcataggcgggggtaccaggcttgtagccatcggccccggccagcagcacggccttggcaccgcacagccgcagcagccgcagcagcatcagtacactgttgctgccaagggatgcgttctgcacatccggggccgccagccggtcataattgaccgccagcgccccctgcggcagcggccgcaggttggaggtgagcacaacagggcagggcagggcagcaaggtccagcttttcaaaccgcttgctgttggtaaaaaatgcataatccggctggcagaattccgggcagaaattggccgaaacaatgcagtccgccttggcagcggccacagcattgcgcccggtttcctccgccaggctggcaccgggggccagcaccagcacggtcttgccgccaaacgcggtgcgcagggtatccagcgtggcggtgtcgtcaatggcgcggttctggtattcgcggtacaggcggtcggcatagtctttatcgtatgcggtggccttgctgcggtcaaaaccggccagaatatggttgatgtcccggttggtcaaatcgcctttgtccagataatgctcggcgtaatcgcggtgcaggttgtaccgtgcgctcaggaagtaagccggggtgtaaccccaggctgtctcgcctttcagcggggcgatatggtcctggatggcgtccatcatctcgtcaatgtcataatggcagccaagggtctcgttcatatagtcggcaatcagctcaatgggcaggttgccgggaatgcgccccatgcccatcaggctgccgtccacagtggtatcgcggcccaggtgcttgtccagaaattcctgcgccaggcagaaagagagcgccatgttctcatgcaggtgcagccccacgcggatatccggggccaggttgtggtccaccaggctgacgatgcgctctaagtcacgccgccgcatgctgccgaaggtatccacaatggagaactggtacgggtgaatctcgtttacctggtctaaaatccacagcaagtctttgtcggcatagcccataatgttgatggggttgatggacagcttgtacccgcgggccttgacttcgcgggcaaaatccatgccttcgcggatatcgtaatcgtgggcggtaatgcgcagcatctcaatgccgtgcccctcataaggggacagcttggcaatatcataattggagcgcatggccatgccgctgtacatggtgctgccggtgtgggcaggcagcagtctgttcagctcttcaatggtgttgcagacggtcacatcggggttgtagccatccacattgcgcagaaagcccacttccacaatgtcagtcccggcacgggtcagcgaggcgataatatctttggctgcagcaaagccccagttccagctgttcacatagccgccgtcacgcagggtgcagtccaacagtttaatatcgggcatttattcttttcctttcaggatttcgctcacaagggcaaggtccttgggggtgtcaacgctcacagtcttgtacgggctgacgatggcatgtaccttgtggccgttttccacaaagcgcatcatatcgttctcttcggctttttccagaatggacttcggtgtttcgtggtagaacgccagcgcccggcgggagtacagctggatgccggtcaccttctcgtattcaaaatccagcgtgcctttggggtagggaatggggctgcgggagatcatcaaaatttcccgtgcggcgttggtcacgaccttctggttggaaaaatcgatcacatccgcggggtgctccatccggttggtcagcacggcgacataatacgggtcctccggcagggtatccggcagaatcaaatcaaacgcctttacgttgatcagcggctcgtcacccatgatctgcagatacaggtcggcttctaccttggtggaaacctcccagatgcgcccggtgggggtgtcatggtcggggctggtcatgcagtattccatgccgtaggtgcggcaggcttcggcaatgcgctcatcgtcggtggcgataaacacatcatcgagctttttgcactttttggcttcctggtacacccaccagatcatgggcttgccaaaaatatccgccagcggcttgcccggcatccgcgtgctggcataacgggcgggaataacgccgataagtttcatagtaagcaacctcctaaaagaagcattggctcccctttgaggggagctgtccgcgcagcggactgagggggggttccctaagaaagagttatagggcaataccgcataattctaagtgccgatacggcgagcgaggtgcggcagc

SEQ ID NO: 703 - DNA, 13514 bp, unidentified
  source 1..13514: mol_type = unassigned DNA
acgcggacattttccagcacctgcgggtagatcttcagcggctcagccagcttgctcataggcatcttcttcgccagcataacttccatcatcttcaggctggtcaggataccatcaccagtgctggcgtacttggagaagatgatatgaccgctctgctcgccaccaatgcggcagccgttctttgccatgtactcgtagacatacttgtcgcccacagcggtctttgcgtagccgatgccctgctcgtcaaatgccttgtacaggccaaagttggacatgaccgtggtgaccacggtgttgttcgccagctcgccgtattccttcatgtagcagccgtagatatacaggatatggtcgccggtgatgacattgcccttttcatccacacacaggcaacggtcagcatctccatcgaaggcaaagccgacgtccagtccgttctccaccacgaacttctgcaagccctcgatatgggtagaacctgcattgttgttgatattcagaccgttgggcttgttgttgatgacgtaggtgtctgcgcccagagcatcgaacacagacttggcgatgttccagctagcaccgttggcgcaatccagaccgaccttcacgcccttgaaggaatagatgcccagagagatcagataacccatgtagcggttgcggcctgccacatagtccacagtgcgtccgatgtgctcacgatgtgcaaaaggcagctccggccaatccttatcaaagacatggagcttgccatcgatgtagtcctccaccagcagcagggtttcctcgggcattttctcaccgtagcagtcgatcagcttgataccgttatcatagtacgggttgtggctggcagagatcatgatgccgcaatcaaagtcatccacgcgagcaatgtaagccacggaaggcgtagtagtaacgtgcaacaggtaagcgtctgctccggaggcggtcagtcctgcgaccagactgtactcgaacatataggagctgcggcgggtgtctttgccgattacaatgcgtgcaggctcgttgttgccgttgcgctcgcggagcatattgtaataccagcccaaaaagcgaccaaccttgtaggcatggtcggcagtcagatcaataccagcttcaccacggaagccatcggttccaaaatactttcccattatagtttttcctcatccaaagagtgatttgacgaatagaaatgtgcctttagccggataattatccgttgcctgctgctcaccacggagaggtagcatatatgagcagcaaagccatgtggctgaacacatggctgcaataagcattagtctctgcggaacaagtcacgtgtgtagaccttttcctgcacatcatccaagcagctatcatagcggttggcaataatggcttgactgcgattcttgaactcttcaagatcattgacgacttcactgctgaagaaggtgctgccattctccagcatcagctcatagaggatgaccgttgagcacttagcagttcaccgaactaaagaaaagcactgtaacgattgaaaatcaagggcgcggaaggacacatattgcaattacacctggaattaaagctcgcctacaagcgtgccctgttcaattcaagaacacatctaccctctcaactgaacttacatgtcaaagttggacacggctgtggtcagcaatgttgaaaatgcatcaaggaatcatcatcaaaggtgctgctattccccctaacaggaaagacgctagcgatccgtttccccagttcatattatacaaatataaggcaaagcttcctgctgcgcaaaacacaatcgcaatatctaggcaacagcactttctcttatcgaggaaaggtcgtttctcaatgctttgtgcaaacgaaataagcgagagaagcattgacatcacaaaaaatctatttccgttcgatcccaaattaaacgacattgatgcgcccacaatgaatactatgtaagacaaattccacagtctgctattttgagctatatatcctttaggaaaaacaacatatggtctagtcagtaacactccggcaaatatcatttgaagatatcttgtaaacagtgagtggaaacttgttactgcgtaacttgtatatacctgcgttgttcctatcacgctgttgcagagcatacctacaatggtgtctgttgatccaatgcgaactgtctgcacataccccgtgaataaagataatagcaccactgttgcaagcgtacatattcccttgtgtttggaaaaaaaaggcaacgcaacccaagccactattatcggaattatcgcatggtgtaaaaaaaccgctgccagaaggacgcatattgtctggatgattcctatattttttatgtaatgcctataaaatgcataccctgcaatgatgaatgcattcgcataccgaattccaattcctatatccaatattgggacaattgtcacccctattagaagagttgtaatccattgcttcatctttagacaattaagacatgcataatcgaaaatcatccatgttagcatcgtatatgcaacaaatgctcctgacgcctgaagtaattgcatattattgaatcgagccattacccaaagccacaaatcccatgtgaaaactccactttggaatgtagaatttccaaagcactgccacaagggaatatttttatatgaattcatggagataaaatgtctaaatatatcatttccagaatccggtatatagcaatacatcatcagcgccatggatgtaccgaatattatagcgctaagtctcgaaaaatgtttttgcgcaaacagcaatacagatataacaattccaataactgggcttattagaacaaacgccattacaacaaatatatacatcttctttaccttgactaaaacgattttatcatttattcatttttccagaatgactcgactttcccagaaactcacataaaatatattcatggtgaaacactataaaaagtaaaacagaaacaagtatgttcacaataaggcgggcaaccactgtcgtaaaaaaacatccaacacaatatgctattgacataataattcctacagataacagatctttcaaaagcatttttgcgtattcatcaatatccagttcgtttcgcacgcagattgtttgataaagcataacaaagtactctgctactatggtcccgacacaagcaccatacgaaccgtactttccaatcaataatgtattcagaataaggttcacaatagcaccgccaaccgtagattttacataaatacgatccattcgcatgggaatcaggtattgggtgcgaatcacatttgcccacgcagacgctaaaattgtgacgctcaatatctttatgatgctcccactctttaagaattgctcaccaaacagcacaacagatacatcatcagcaatcaaatacaggcccgtagccatcacacttgccaacagaagtgcaagcttcatggatgcataaatcgttttcttcgaatcttctgaagctttattttcaagcaggtaggccattctaggaagcataaccgtaccaagggcattaatcacagagattggaatattaatcaaacgctctgcgttttcataatatcccaattccgtgacggtagaaagcgaaccgagcatggttttatccatcacgcggtagataccgaatgccagaacagggacaaataggatcagacaaccttttaggtgcatcagtgaatcttgaagcgttgttttgactcgattgacgtacttatgaagagagaaaatcaaatataactgacttgcgaccgtggatcccgccataatatacgtataaactgccaaatctccctcagtttttacaaaacataaaattaaaaccagagaaagcactttaatgatgcagtttcgcgtgattgtgagtttgaacttctcaagtccaaaataaaaccagttaatatcgaagcctacggacacaaggtagaggaattgaattgctgcaatttccttgtatgctttgcaccaaagaagcaaatagctcaaatatccaacaatcacaactcctacaaccatgagctggagtcgatagattgaccagaacactctcgaaagttcatccctattgtcccggactttcgcaatctcacgatttccgtagttgtttattccaagcattgctgcaagcataaacatatagactatagaataggtgtatgaataaattccgacattatctacacccaaccgcctcgatatatagctgactgtaatcagcggaaaaacataagaaagcaactgatatgcaacatttagtagaaaattcttgttttcacttttcacgcttcagttatatcctcctatcaacaagtgccttttttaagtatgtatatgctctctcctgctctttctctaacaggtgttcatacttattatagttcttttccttcagatagttgaagccatcatcaaactctattggaatcattctatcctctaaatccagcaaatgcattagagtctttactctatcgtcattaccaaacattccaccgttttttacagtccagaatttttttcggtatatagtcgaaaaaactgttccatgaaaagatgttgtaataatgatttcagcattttttatcaactgtaaatatgtagatggattttcaatttccggaagtttgaatcctgaaaactgcatacctttgacataaaatgtttttgtgttaaaggcaattacaggtaaattgtatttttgagaaattctattgacgagtttatttatatcacggctataaccgggggagtaatagaaaatgtatcttggtggaagtttcaattcatgtgattcaatttcagcataatcatcccgtttcagaagaagtgttggatcaagaagaaggtcggcatctctgccggtcaaattctgtagccattccaatccattacgttcacgaatcgacagatttgcaaaatctcttaaatactccgcataccgatttggattagctgcataatccataatgttttttgctccaaacgacggcgcatatgccacttttcttgcattcttcacccacggcagaaaatatgcatcgtctccatccgcaatagtaatgttccagatttgatcgctcccagcaaccacgatatcataatccgcatccgataaatctgctgatttatgaatcggaaaattcgacaagcggaaattgttcttcttgaatctttcatacgactcatagtttctagctattcttttgaaccatggagcaaggattatattttttataacatttttcaagctgtcgttcggttgacgaacgctataaagtttttgctgtccttcgtttgagaaatcaataatttctgaatctttgcctgtaagtcgatcaaccacctgctgtaaagcaaatgcctgaagcatagagccacagttatatgagttgtggaatgttataattccaattttattattcaaatcatttcccacttcattttccccttttctttaccacttctcactcggtttctaagattaaatatttgttttgttccccaaaagcagttgtgttttgacagccaatatacaatctgtaccaccttggtgcaatccctgctgccggggtacgagttcatatattctctcattccacctctgtagatttttcgttcttgttcttttctttgagctgaatcacaaaaattggaaatcaagaacagatacaggtaaacgctatatgtcactgcataagacatgcagcgagcaatttcatggtcttcaacattattgttcttcaacaggttttctgccaaagaaaaatatctcaaatttgagtcgtaaaatttatcactgtatttttttgaggacgatcccatataaattcggtactgataatatgaggctttgcagcaaacaaaatgctctgctttcagaattgcattcaaattaaatattccgtcttccccattgataaggccaccatcaaacctgatttgatttttcagaaggaactcccttcggtacaactttgaacatggagaactcatattcgcattgcatttggaatccgggattccaaagataccgtgtatgatatttatcttttcaatgttttcttgttcatcaaaatttttaccatagtagaccacatctgctatctcatcacatccagataagacaacatttccccaaccctggctcaacctgtcgtcagcatccacaaattggatatagtcacccctggcttccagtatcccaacatttcttgtataggaaacaccatgattttcatggtggaacacgcggatattttctttcttgtatttttgaatcaactgataagatgaatcttttgagccatcatctatcagtaaaagctccatgtcattattcatttccggtaaaatcgatacaaggcactcttctatatatcgttctgcattatatataggtatcacaatagataatttcatatctgtactcacagcatccttcgttgatattttattacagtctttggtgctatagaaaacacatataactttaaccgctgctttgcgttgaatgattcccactcaggccggagccgcttccattcttcatcaactttccgtttgatttcaccattgctatcttcaataaagcgaattctgtactttgccgcacaaaggaacatcgcatattgaaaagctgccaaacggtaaaccacaggataatcttttaccagtcggatgatttgctgatacgctttcatcgcatcaaaccattttggattgtccagccggtttgaagcgctgttctcaatttgacggtaaaaatatttttgcccgcagttatagactgcttttttacaattcagcaaatagatcacattaaagagcagatcctcacaaacagcgatgctttgttccaaacgaatccctcgaacgctccaaacacctgcttcaacatctccgattcttcgtatgtagatgttactccatttgtgaacatttccggttcaaataatttgcttttggcgaccccaatcactgcaatgtctgcatctgcttcttccaaatcatgaatcatctgtgctataaaatcaggtgcgacaagatcatctgcgtcaacaaacgtcacgtactcacccgtacagtgttccagtccgaaattccgggaataagatacaccatggttttcgttgtaatacggtataattcgtgcatcctgctcggcgcgacttcttattattgaagctgtcaaatcctttgacccatcatcgactacaagaatttccaatactggataagtctgctcacaaattgaatccaggcatgcttcgatatatttttccgcattatatgcaggaacaataacactgacctttttcatattctctcactgctcctcatatcgcttctgatatcctgctgccatactctttgctgacaactctttctcctgaaatgccttaatcgcagacttatttatctttctttccctcagtgccttcagctttacctcaaaatcatccggtgagaacgtctcccccagataaacatcctgccccatctctacgacttcgcagtgcgagggaatatccgataggaacagccccagcccgcaggacaacgcttccagcaccgaaatcgaaaatccctcagatttggaggcggacacatatacatcgctaatgttcatgtatgcaatcggatcagtctgaaatcccagcatccgcacatggtcatccgcttttgccttgcactctgcttctttttcacctttgcccaaaacaagcagatactcgtcgccttcgtgatattgcacaaaattatcgattagccagacagtgttttttcgggaattcaacacacccgcatagagaaatacgcaggcatcttctggcacatcaacttcggctctggctataacggaatgagcctgcaccggcttgataccgttgcgaataaacgatgcgttcggcaggtgccgtttcatcacatcgtagacagacttcgagcagcacacacactcgtccagtttttttagcgctgccatgtgcaacgcaatgaagattcggcttttggcgtacccataagtatcaaggtagtcttcatacatattgttgtggatcgtagtgattttccttacaggagtgtttagcctcgaggaaacaatgtccgggatcagtccgtgcgtatgtaaaatgtcatagtgtccctttttcacggtgtcgtcaaactctttgcattgccccagcaaacatttcattcggctgagcgtagcgcattcatacacggaaacaccattacttttcaggtactcaatgacctccggattgtttccggaaaacagagtgattaacgacacatcatatttttccctgtcgagattattgatgatgttcagcaccacactactgggaccattttttacaatataatttatgacgtatgcaattctgatcaccgctcaatgctccttttcttacttcctcaacactttctcaaacataaacttccgtaaccagtttggagctaacgccgagccactacgaatcacacagctctttatgtactgccctttgccaataaaaccttggctcttcataaatttaaacagccttgcctgcgtcttggcatatttccaaccggctcttctcaaatacatatccgaaccagctctcatgtggagcagcggctcttgaatgttatagccctgatatccggccatcagcatccggagccaaaggtaataatcctccagcagatagaagtcctgataggaaccaactgcctcaactgcggattttttatacatcacacatgggtgattgaacggattacgcttctttgcaaactccacgatttccgcattcgtctccggtggcacacgcctcgtatctaccacctctggatctgttgtaaactcctctacaataccagagcagatgctcacttctgggtgcgtgttgaacaccttgatttgtttctcgcagcggtctggataagcaatatcatcactgtccattcgggcgaccagctcatttttacaatgcttgatgccttcattgagtgcattgccaagtccggcgttcttagcaagacgaacaacattcagtaccgtacccatttcctgttgcttttctacaatcacggcatccagctccggatttagtgggccatcgcacaccagtacgaaatcgtttgttggaaccgtctgcacctgaatgctctcgattgcctgtctcaaatattccggtttttctttgtgataaacagacattaaaacgctgtaattctgcatcacttcgtctcctgccccatcgccgtagttgcgccttccgccacgccttcggtgctttcaggcataaacaggatcttcaccgttgccagcataatttttaaatcctcgatcaggctgggatgggcaatatacatcagatccatctgcagcttatcgtagggggtagtattgtacttgccgtacacctgcgcataaccggtcaaacctgctttggcctgcagacgcagcgcaaactccggcatttcctcgcagtactgcgcagcaatctccgggcgctccggacggggaccaacaacagacaaatcacccttcaggatgttcagcaactgaggcagttcgtccagacggcaggcgcgaatgatatgaccgacctttgtaatacggtcatccttgtcgccggtggaaaggcgtgccacaccgtccttttctgcgtccacacgcatagagcggaacttcagaatctcgaactgcttgccgtccttggtcaggcgcacctgcttgtagaaggcagggccgccatcggatttgaccgcaatagctgtgatcaagaacagcggactcaggataatcagtgccaccagcgagatcacaatgtccatcgcgcgcttaacgaacaggaactccgggctagccatgtaacgaccgacccgcagcatcggcagatggaacatatgcatcggccaagcgccactcataataacgtcgccaacgcgaggaatgacgaacatattgatgccctttcccacgcaatgcttcaggataatgttgcgctcatggctgtgaacaccactgacaaaaaccgtttccatgccatccagaatactcaggtctgccaagcactccgacacactcagggtgacctgcacatcatatttctggctcagaccgtactcgttgatgagcttttccataccgtgtcgcacatcgtagacaactgcggtcttctgcggcggaaaggtcgtatagtaccatttatgtgcgcaggacgcccagatcgcagccatcaccagctgccctacaattgccgcaatacccggcaacagattgcagagctttgccgacatcaggcagatcacgatgtacaagatgccatcggttgccatcgcgccaaggatctggccgtacaccagctccgagacccgctgcatcgacatccagaacgcatcgtagattttaccgagtgcaatgtacaggataaaaaacaggcctaaaatcgcaaaatgacccttccatgccagattggcataggtctggtgcgagtagtataggaaccagcaggccgcaaacggcagctcgatcatcagaacattcagaatcttcacgacccgcaacatcacatcatgctgaaactttgacataatcctctccaataactcctttagattttctttttacgacccacattacagcaactgtttggggtcgagctattaactacacaaaccgatttcttccccagttttgtggttagccgaaacattcagattttcacttttcctcttagattcttgtgccaactccaaccggcgcggtctcgaatccgctttctcccaccgcatcccgatctcatcaagctttgcaatccgttcctctgtcagcacagcgcagcttttttcaggattctggcgggtgtaccgctgccgcttgacccaagttccgaggttgtaaccgcccggcgacacataatcagccgggacgttcaggtcgccgtgggcgtcaaaatagcgcttggcttcctgatacccttcattccactggcggtcattgcggttgccccagtacattccgatacggttcagccgctcaacctgttcgtccgtcagctttcctttcgggtatgcccattgctggcttgcgacccactgtcccagccgttcaccagccgctgtcacataggaacgtgggatattcaggttgccgttttcctcatagtaggttgcagccagcgcataagccttttcccacttggcatcgaaaatgttccacaccataccgatctcatcaagctgcgcaatgcgttcttcctttaagcgtccgttcagcttctgctgccgggtcttgatgatccactgtcccaaagggtagccgtccgggtcggtgtatttgccgggcaccatcaggtttccgtaggtgtcgtggtatttttttgcgacctcaaaaccgtgctgccatgcgatttccttccggttgccccagaccatcccgatgctgtccagccgcgcgatctgctgctcagtcaggttgccttggatctgtccctcacgcacccggcgctgggtcaccagccacaccccaaggctcagaccgccgggcgtggtgtacagtttcgggacgttcaaattgccgtgctccgcatagtagatacttgcctcagagaaatagtgctcccaaccggaagagagacttgcctgcagctgctcgaacagcacccggcagtcgtgcacttgctcgatgacctcgaaccgctcggtcacgatcttgtcactctcgccgttggcataaagccggtgaacagcctcctgcatctcgctttgcaggccggaaatgctggtcaagccctcaaagttgttgaccacatcgagaatcagcggggctgcggtatctccggcggtcagggctcgtccgatctgctgcttgtagatgatgggcgaaatcgttggtcggaacaaaatgaccccggaaatcccctccacatggacaccctcgttgagcatatcgatgcagaacagcagcttcagccggttgctggtgtctgtcttgaagtccgaaaaggctttgtcggtgttcgggtcatcggagtaggcttcgtacaccaccacgtccgggttgaccccggcgaaccactccggcacatgggacaccatctcgtccatgtgctccttgttggcgcagaacacaatgtacttgccagccttattcgtgatatgatgtgcaaagaccctatccagaccatccgcctgttccaaagcgcggcgcagcgcgtccagatatttctgattcacgtcctgaatgcccggcgcccgcaggttgtccacccgtgcctgatactttgcaagcgttttctggtactgataaactgtggtcacatatttcggggcaggcaaaatgcccctgacgactgcttcgccaagggtcatgtcactcgcaacacggctatcgaaaagttcttcggccatgtcgcggttattatccagatatcggatgtttgttgccgtcagccccagaagctttgcatccgggcataactttaataaagccaccgtgctttcgccccaacattcagcaccggcacggtggaattcatcgagtataatataggcaggcttctgcgctgctatttcgtctagctgcgcctgcgtgcagcacatcagtttggcataggtataaaagtgaacgtttgccagcggaaaatccgggtcgttccttttcaggctctccagctgggtcttaaagatatattcactgggagaaagccagatcacgaccttctccgggttgtcctcgatcagcttgaacgcaatatagctctttccggtgccggtgggatgaacaatagcagccttgccatattgctccatcatccggactgccgcatgatatgctttttcattgtgctcaaacagacataatgccaccttgttcaccccttcccgcataaaggggtatcctctacagtgataatggaggaacagcgaataaatcatgcacaactacgtcatatttggtatactcctgcccctcatggacacctgatgggagaaaattcggttcatctcccggcgctttcgggtcaggtcagagtgcacatagcgctgcaaggtgatgttggcgttggcgtgtcctaacaattcgctgagggtctttacatcgcaccccgcctgcagacaggtcgttgcaaaggtatggcgcagcgcgtgcggacgtacctgccggacagttgcctgtttcagatatgatttgatgctttttcggtagcaacggggctcggtgggcttggactcgttgccggacagaaaccatgcagcattgctgacacatccgcgcagctttttcagcataataagcagctgctttgggattggaatttcccggcgggaggtgcgggtcttgggcgtttgaatgactacctttgtatgaccgtttccacaggaaattcgacagaccgtccggttgattttcagcgttccgagtttcaggtcgaaatcgccccact

SEQ ID NO: 704 - DNA, 8744 bp, unidentified
  source 1..8744: mol_type = unassigned DNA
agccgccgaagcggtgcttaagccgctaggcgggaattgtgcggtgttgccttaaaaaggcagccactgtcggcacgctggaatacggacccgctgcgtttgaaaaaactgaccgctgaacgggaagacgctgtcccgatggcccacctgtttaatatggattattgattttggcgagattgttcttttgtaatgtcctgtacggctggcatcaatctgttcaaaaggtccaagagttaccaacagaataaccatataaacacaaaatgcgaaccacgttgtacgaagtggttcgcattttgttatcgtaatgtatattttatttcggcagctgaatttccggcatcagttcatcggatacgatctgcagcatttcttccagcttggccaggtcatcggggctgaaccgctgtttggcacgctccataaccagatgcagataagaatagctgatgttatagtaatcaatgtacttttgggtcggccgcaggcggtattcccgcttatcggtggtggattggatgcgctccacatagccttttttgaccagggagttgatcttataagctgcgttgggggtggaaagattcatcatgtggctgaactgcgcaatcgtgggttcccccagtgccatgatgacttccatgcagaaagattctaccgtcgtcagcgtggcttcacggtcttcaaaacggctgaagatctgtttataaaaatgcagcttgaattttgtgtatacctgcccaaatgtctgatccagcatggcgagaatccccctgtaggttaatgaatttattatagcacaatccaccatgcaaaaccagccctcaggcatccgtgataacaaatgtcagctcggcgttggccgcgcgcacaccatccacccaggcggtggctttgccgatgcccaccgggccatgctgctctaccagctcacattccaaagtcagcacatcgccgggcacaacctggcggcggaaacgggcattttttaccccgccaaacagggcaatctttccacggttttccggcaggctcaacgcggccaccgcgccggtttgggcaagggcttccagaatcaatacccccggcataaccggatggccggggaaatgtccctggaaaaacgactctgtgcgggtcacgcacttgattccgcgcgcccactggccgggggtatagtcaagaatcttatccactagagcaaacgggtaacggtgcggcaggatcttttcgatttccgccgccgtcagggtccggggcggttcattgggtgtatagttcatcctcatccctcccaacgcttgaacaccacacaggcgttgtggccgccgaagcccaggctgtcgctcatggcataatccacctgtaacgcgcggccctggttgggaatatagtcgagatccagttccgggtccggctcctgcaggttgacggtagcgggcaaaaaggcatcgtgcagggccaacacggtaaacacgccctctaccccgccggcgccgcctagcaggtggccggtcatcgacttggtcgaggatacggccagcttatacgcgtggctgccaaaaaccgacttgatggccgcggtctcacagctgtcattcagatgcgtggaagttccatgggcattgatgtagccaatctgttccggctccactccgccatcagccaatgccagccgcatacaggacgcgccgccggcaccgcccggtgccggggcggtaaaatggtaagcatcgcagttagcgccatagcccacaacctcggcgtaaatcttagcgccacgctctttagcggtctccagttcttccaacagcagcacaccgctgccctcgcccatcacaaaaccgctgcgctgggcatcaaaggggatcgaggcccgggccgggtcgtctgcggtgcagagggctttcatgctggcgaagccgcccacccccaacgggctgatgcagctttcgctgccgccgcagagcatacggtcctcgtatccatcgcggatacggtggaacgcatccccaatcgcattggtaccgcctgcgcaggcagtggtggggcagctgcacataccctgcaggccaaagcggatggccacctgccccgccgccatattgccgatggacatggggacaaagtaggggctgaccttttcaaagccccgctgctggccgcgggtgtgttcttcctcgatcgtgggcagaccaccgatcccgctggacaggatcacgccgaaccgtgtgtggtcgatattttccagtgcaatgccgctgtcgtggatggcttcgtcagcggcggccacggcaaactgggtaaaccgcgccattttgcgggcttcgcgccggtcaatacgttcggcagggtcaaaatctttgacttctgcggccagtttcaccttaaaatccgttgtatcaaaagccgtaatcggcccaacggcgcagcggccagctttcacggcggcccagctttccgccacggtattgccggttgggtttaccgtgccaaggccggtgataacgacccggcgtttcttttctatcttcatagctgcacctcacattcccattccgccgtcaacacaaagaacctgcccggtgatgtaaccggcctgttccccggccaggaaagccaccgccgcggcaacatcttcagcacggccgattctgcctgccgggatggccgctgcggctgcggcgcgggcagattccggcatagcggcggtcatatcggtttcaataaatccaggcgccaccgcattggcggtaatattgcgtgcggcgtactctttggcaacgcttttcgttaggccgatcagccccgccttgctggcggcatagttggcctggcccgcgttcccgtgcaggccgaccacactgctgatattgatgatacgcccataccgctggcgcatcatcaagcgggaagctgctttggtgcagaaaaacgtccccttcaggttggtaaaaagcacattgtcaaagtcggattcggtcatgcgcatcagtagtttatccgcggtgatgcccgcattgttgaccagcacatcgatccgcccaaaagcggcagcggtatcttccaccagattttggcaggcttcggggctgcgcacatccgcttgcagcgtgatggcctgcacaccaaaggcgcggcaggcagccgctgtttcctcggccgcggctgcgctgcctgcgtagttgactgcaatgttcatgccgttttcggccaatgcaaggcagacggcacgaccaatgcccttggcaccgcccgtaaccagagcggcacggcgcatgttttcggtttgcggcatggtcaggctcctttcatggtgcaaagcaactgctgcagctgtgcagcagtttccaccggatagcacgagatagcatttcccaccgtctttttcacaaatccggtcaacaccctgccggggccgatctcaatggcggtatccacccccagttccgccaaacggcggactgtggcttcccaacgtacgccgtactgcacctgtttttccagcagcgtggcgaccgtgtcattctctgccatttcatgcccaaggcagttgaacagcaccgggaactgcatcggcgcaaagtggatggattggaacttttcccgcagcgcatctccggcggggtgcatcagcagcgtatggaacgcaccgctgacgttcagcggcaggcagcgccgcgccccagcggcaagcgccaggtcggcagctttgtctacagcagctttctcgccgccgataaccagctggccgggacagttgtaattgcagatctgtacaacgccctcttcggcggctgcgctgcaacatgcctgcaaggatgtttcatccaatcccaaaacggctgtcatcccacaggtgcgcccggcagcggcagcagccatcgctttgccacggaaagccgttaaagcgaccgctgtctgcatatcgaacacccccgcacaggccaaagcggaatactcccccagggacaggcccgccgcatagtccggcataatgccctgctcccgcagcacagcggtaagaccggcggcaaaagctgtcatgcaaggctgggtgtattgcgtttccttcagtacgcccgccgcgtcggtaaagcagacttctttcaaatcaaaatccactgctgcggcagcttcgtcaaaggcggcgcggaaggcaggaaaggtttcataaaggtcctggcccataccggcatgctgactgccctgcccagcgtataaaaatgctaatttcatcagatggtctccttgtacaaccccgtgatgcaggtctttgcctcgcttaccattgcggcaaaaatctcttctaccgggcggacttcatgcagcagccccgcggcctgtccggccatcaggcttccgttttcggtgtcgccgtcaaacacagccttgcgcagactgccaagcgtaaagcgttccagcgccattttgtcggccccggctttttcctgccggacatactcgcggctcattcggtttttcaacacacgcaccggggtgccgccgatccgcccggtcacaatggtatcgctgtcgcgggctttcagcagcgctgccttgtagttttcgtggatggggcactcggtgctggccagcagacaggtgccgacctgcacgccgcaggcccccagcgccagcgctgcggccaaaccgcgcccgtcagcaatgccgcccgcggcaatgaccggcacgtggacggcatcaacgacctgcggcaccagcgccattgtggtcatttcccccacatggccgccgctctctgtcccctcagcaatgacagcgtcaatgccaagcggttccaggtgtttggctaagattgcggcagctaccaccgggataaccgtgatgccggctgctttccacattgccatgtactttcccggatttcctgccccggtggtgacgatctttacgccttcttccaccacgattttggcaaattcatctgcctgcgggtgcatcagcatgatgttgacaccaaaaggctggtcggtcagcgcacggcagtggcggatgttttccctcagggcatcggcatccataccgccggaaccgatcaggcccagcgccccggcgttagagcaggcagcggcaaattcgcccgtggcgatattggccattccaccttggataatgggatatttcgtacctaaaatttcattgagcagcttcattttctaccctcatacgtcagcagcattccgccccaggtcagcccgccgccaaaaccgatgcaggccagggtctggccggggtgcagtaaatcattttccaccatttcatgcagggcaatgggaatgctggcagcactggtatttccatggcggtccatatttttataaaattttgacggttctgcgtgcaagtgtttgatacaatggtcaataatgcggctattggcctgatggcagacgacccaatccaggtcagccaaggtcttttggctgtgctccaacacggtttgcaggcaacgcggcatggtttccaccgcaaaacgaaagaccgccttgccatccatcgtgatcggggccgtatcgcaggctgcagggccgccgacacggatggcttcgctcccccgcgcgcccaacgtgacggcaaacggcacatcttcggccagttccagaatagccgcaccagcgccatccccaaacagtacgcaggttgtgcggtcggtcgggtccaccatgcgggacagcgcttcgcagccgatgaccaacgcatagcgtccgcccagggtgttcaacagcccgtgggccgcagcaatagcataaataaaaccggaacaagctgcatttacatcaaaagcgggccggttctccggcagccccaaggccgcctgcacacggcaggcaacactgggggtagccgttggagccgaaagcgttgccgcaacgcagcaggcaatctcgcttgctgccagcccgctacgcgccagggcctggcgggcggcggcaatggccagcgtggcggcatcctcactttcggtgcagtaataccgctggcggatgccggtgcgggtcgtgatccattcatcgctggtgtccacctgtcggctcaaatcctcattcgtcactacacggccgggcagtgccccgccggtggccagcagctgtaagcctttcatgctcccctcatttctccgatacggcggtattttttgtatctctggtcggccaatgcctttccactcatcttgcacaaggcggcaaggtgcgcggcaatggcggtatccaaccggctgaaaagcagctgccgcccgcgctgtgcaccgcccagcggttcggcgatgatctcttccacaattccatccgtatacaagtcctgcgccgtcagtttcatcatggtacaggcttcgccgctgcgggaggcatctttccacaaaatgctggcaaatccttcggggctcaacaccgaatacacggcgttttccagcatcagaatatggttggcaacgccaagccccagtgcgccgccgctggagccttcgcccgtaacgatggccagtaccgggacggtcagaccgctcatctccatcaggttgcgggcgatggcctccccctggccgcgctcctcggcatccttaccggggtaagcaccgggggtatcaataaatgtgatgatgggccgcctgaatttttccgcctgcttcatcacgcgcagcgccttgcggtagccttccggtcccggcatgccaaagttgcagcgcaggttttcttccagcgtcgttcctttgcggtgccccaaaaccgtaacgggcatcccatggaatcgcgcgataccgcacaaaatggccgcgtcctccttgcattgccggtcaccgcactgctcaaaaaagtcggtaaacaggttgtcgatgatttcgccgatatgcgggcggtcagggcggcgcgccagaaaaactctgtcctccggcgtcagtgatgtgcagcgctgcaaaagcatgttttcctgcgcggaaagctctgccagctcagcggcatgggtagtcgtattcgccatttcggcatcatcgatgctgctacacaatgcatcaatctgcgcgtccagcggttccagctgctgcaaaacctctttgatcatctgcatttcctcccctgtgtatggagctgcaaaatccgcgtcaaaacctcttttaattcagtgcgcggcacaacctgatccacaaagccgtgttccagctggaactcactgcgctggaaaccatcgggcagcttttctccgatggtctgttcaatcacacgcggcccggcaaacccgatcagcgcacccggttcggccagcgtgatgtctcccaggctggcaaaactggctgtgacaccgccggtggtggggtgggtcagcacactgacatacagcccgccgctgcggctgaaccgttccagcgcggcactggtttttgccatttgcatcaggctgaaaatgccctcctgcatccgcgctccaccgctggcagaaaaaataaccagcggcagccgtttatcagcagcatattcgattgcacgggtgattttctcccccacggcagtgctcatgctgcccataaaaaatcggctgtccagcacagctgccaccgcctgcacgcccccgatcctgccggttgcggtgacggcagcttctttcaggcccgttttgaccgaagcagcggccaacttttcctgataatcgggaaaatgcagcacatcgttgggggcaaggtctggattcagttccttaaaggttccgtggtccaaaatcgtgctgagccggtaataggctccaatgggcagatgtaccccgcaattggggcatacatacaggcttttggtccagacctggcgggtggcgcggcggccgcattttttacattcaacaaattgcggctgcacccagccgggcgcagccgtaccagcatcgcggcggactttcagctggaagctgcgctcctgctggctgaccgggaacagcttttcaatggcattcatccctaataccctttaggctgcccgcgcaaccagatagttgaagatatcacccacggtcttgagcgttcccaggtcctcatcggcaatcgtgatgccaaacttgtcctcaaacgccatgttcagctccaccgcgtccaggctatccgcctgcaggtcctcggtcaggctggcttccatcgtaactttgtctgcatcgcagttcagggtatcaacaaatacttctttcagttcttcaaagctcatgatttatacctcgtaattatttatctaaaaatattgactcaattgtcaatgaggctattatatcacatttgttttgtatgtcaatattgttaggtaaaaatatttatctaattatgctgatctcttattctcgctaccagaagcgaacatcatgcaaaaattcgcacagcatcatcccctgcagcgctgccattgctgctgacaggtagacgcaatacaatactttgggtgagggcactcccccgctccgtctattgacaattccgccacctatagataaaaacgcctgcaaactcaggcgtaaatccgcctttatttgcaagcgttgaaaaaagtatttggggaatttcctcttagtgattgggatgatatttaaagtgttgactgctcttgtgccggattggcttttattgtataataatatgactaatttcaagcattggtttgctgtcgtatgcggcacagcatttgaaattgaaatttaggcaataccgcataattctaagtgccgatacggcgagcgaggtgcggcag

SEQ ID NO: 705 - DNA, 6311 bp, unidentified
  source 1..6311: mol_type = unassigned DNA
gtcgtcgtaggggatgccgccctcgctggtggggtcgtagacatcggtgcacttatagcagaactccgccacgtcgctcagcacgaggaagccgtgggcaaagccctccgggatatagaacatcttcttgttctcctcgctcagggtcacgcccacccacttgccaaaggtggcgctgtgggggcggcagtccacggcaacatcatagacctcgcccttggtcacacgcaccagcttgccctgggtgtggttcttctggaaatgcaggccgcgcagcacgccgcgggtggagcggctctggttgtcctgcacaaactccttatcaatcccggcagcagcgaactggtctttctggtaggtctccataaaataaccgcggtcatcgccaaacacctggggctcaatgaccacaacaccggggatctcagtttccgtaaacgtaaatttacccatttttcattttcctctctgttttttcgttattgtttttgacattttgttttttatttggaaaagccggaatggcttttgcgcagtgttagaaaagacgttgcgtggattgccaaagcctctcctactaggagaggtggcattgcgaagcaatgacggagaggttggacagagcaccgccttgtcccggatgtcatacaacctctcagtcgcttacgcgacagctccccttgtaggggagcccttggcaaagagggtcagtgcctcgattttttcttcgctttcgagcggagccttaccacaacaaatgcaactcccgccgccagcaccgtgcaccccagcgagatgccgatgagcaggcccgcggtcttgccggggctgcgggggccgctgcccagttggacaccggtgttccgctccaatagctcctccagtcccgtaatcgtggccggcacccggacgctggtggactcctgcttgtcctgcccgttgacggtatacacggcgtacaccgccgggctggtgcccaagacatactgttccggcagctccagcgtcacggacacatcccctgccgtcaggccgtcagccaacagcagccgggtgccggggtcggtcaccgtgaccatgcccagcggggcaccgcctcccgccaccgtcagctcccgggtcaggccctgggccgggatgtcggtatagtttgtgtagtgggcaaaggcgtaatccagcagggtacggacatcgttgtacttgtcggtcttgatgttgctctgcatggtgacgcagatgagccggacaccgttctgctccgccaggcagacatagctgtagcgggcaatgttggtgtagccgatcttggagccttgaatggccgggatgtaataccggctggaacccacccgcattttgtcctgctggtggaaataccgctctttgggctggatgtccgtgggcttcatgggatacatctcgttgcgggtaaacagcgtctcaaaccccggctgggtcagggcccagcgcaggatctgcgccatatcatagcagctggtatagtggtcggtatcgctgatgccgtgggggttggcaaagtgggtgtgcttgaggcccagttccgccacctgggcgttcatggccgccacgccgcccgcaatggtgccatccccgaaatattcggacagcaggttggcgccatcgttggcgctggccatcatggtggcatagagggcatccgtcaggggcacatgctccccctcctgcagggcaatgtggctggaatccgtccccgcaagggaatagacatcctcgtgggtcacttccaggctcacaccgtcccactggccctgggctttctcacaggcaaggcccagcgtcatcaccttggtgatggacgccgggtgcagctcttcgtccatattctgctgggccagcacaaggccggtgtccgcgtcgatgatgcagtacgcctccgtggccgacagcgccgggcccgcggcccgcgccatgggtgcaaacaccgcgcagacccagagcagcaccgtgcaaagcacggcgatctgttttttcatctggtcatttctccattggtgatttagataatccttttcacgggcttgccctctccgtcattgcttcgcaatgccacctgttccccactttgtcacctacggtgacatttctccccgcaccggggagaatctttcccaaagtgggaggccttggcagtccacgcaaagtacatctctttgccaatggctctccctttgggagagctggacgcgaagcggcctgagagggctaggacgctatcatacattatcttgttcagtataccacacttttcccttgctgaaaagacattccgtgcccggcggcggggcaaagaacgggctgcagctgccgcccctccagcgccgcgtccagtgcggcgggcagcagggcgaaccgggctttcaggctctgcggctttgcctgcgggtcatcctggccgtagggcacaaagtaatagtgcttgcgctggtacagccgggcaatgttttctcccgaggcccccagcccgtcgttggtggagacggcgatcaccaccggccgccccacccgcagcaggctcttggccgccagcgtcaccggcgtgtccgagaggcccgccgccagccgggccagcgtgctgcccgtgcagggggcgatcaccagcgcctcggccatgttttggggccccagaggctccacggcctgcaaactgtccagcaccgggtgcccggtcagggcttccagccgctgccgccagctcccggcccggccaaaccgggtatcacaccgggcggcggtattgctcatgacgggcagcagctcccagccccgggccgtcagttcctgtgcctgttccagcgcggtctccagcgtgcagaagctgccgcagaccgcaaaggcacagcgtcgtttctcgttcatcgtgctccctccctttcgcgcagcatctcgcgcaccgtccgggccacgatctccccggctgtttccggcgcgcaggcagcgggcaggctcaatgcatggatggccttgtggccgcagcgggcggcggcatcaaaatccgtcccaccggggcgggaagccagatccacgatcaggctcccgggccgcagccgggccagcaccggagccgtgagcacctgcgccgggatggtattcaccaccgtgtcaaaggccggggccagccgggccagccgggccagctctgccccctgcattcccaggctttccgcctgtgcccgctgggccgggcggcgggctgccactgtcacatgcgcccccaatgccgccagccgggtgccaaccgcctgccccacagggccaaatcccagcagcaggaccgcgctgccccacagggtgcgtttgcgctgggccagcaaaacgccgatgcacccctccgccgtggggatggcgttgcggatggccagctcctcccgggcaaagtaatccaccagctccaccccggcttccgctgcaatgacctttgcttcttccgagagcatcccgcccagcgccagcgccccggggcgtgccgcccgcagcagctccgccagcggggtgcgggccgcgtccagcggcaacggcagcaggatatagtctgccagcgcgatctcttccggcccctccaccgcataccccgcccgggccagcgcccggcctgccgccagctgccgggcatcgctgccgatcaccgcaaagcgtttttgtcgttccatccaaaagccctcctccccaaagcctgcgccattctatgcacaggtggggaggagggtgacggacgcaaacaaaaagccccggagcggggccgtaaggcttactccggggcaaatgttttgttttatgagggttaattacttagctttctcaacaacgagaatcatgtagttgtctttctcgaccttgtcaacctcaatgccaacagaaaccttgctgctcttaacaacaggatttgcagcagcaaatgcagcatgagctttcttagcctcattcttcaggtcagagacagagttccaagtatcggacagcttcacagtgtaaatctcataagaaccattgacggttgctttcttgatgtccttgccgttctgtgcattcttcattgcagcctgtgcaatcttatccatcgcatcagtgcgctcataggtgtaagagacagccttatctgccttagcagcatcattcagtgcctcaaccatgttcttggcgctcttcttgtcagcgacgccgcagccagtcagcatggtcagagccataacgcaaacgagggcagcagccatcagtttcttaaatgctttcattgttgtatcctccgtaatcagatagttccccagcaacggcccgccttgtgcggacagtttgctatgttaaattcagcatacccctttttgtggcaattgtcaagatttcactgcgttttcatcatttttaccaatcggtacggtgagaaaacagcgatatgaccagttttgccccggggcctccacgccgttttccgcacggtcaaacgcaaaaaactcccccggcaaaacgccggaggagcctgcgattttattgggttttttatctgatctctcggggcgtccctgactgtgcgcacgccgggagattacttcaggaactttgccaccgcgcgggccacgatgccgcccagaatgccggagacgaggaactccatcacaccctgcacgccaaccagcagcaccacgaacatgaacgggttggccgcacccttggcggccacgatgttctggatgtaatcgcagccgtagaatgccagcacgatgtagcccatgaagaacagggtgttgaggccgggagcgcacatggcggaaacgatgtagctccaggtgccgggcttatccagtcgcttgaggccgttgaagacgaggcccacgcacaggcccatcagcacacgcatccccacacagaggatgaacgtgttgacagggctcacctggaacagggcgcccgtcatggccgaagcgccggtgacagcgtcatagaagctcaccgcgccaaacacgccgcccaggatggcaccagccaccgggcccatggtgatggcacccacggcgatggggagcgtcaggaagctcatgtaaagcgggcccatgggcacgctgcccaggccgacggctttcatgaccagctcaatggcgaccagcagtgccagccgggtgagagtacgaagatcgttattctttttcataaaaatatttcctcctgctgccgttccgccctagatgtcggatacggcgcaaacctgcccgcaaaaggtgcggggccgtttttctattttactttggaatgctttgtcagggaacgttccaaagggagataacttattgatcacacgggaagcggatgcctgccgagcggcgggcagcggtcagcacccggctgaccgcaatggaggtatccagcatccggctgcacagctcctggtcgccgccctcaatggcgcgggcaaaggcctcaaactccgcggccagccgggggcggccgccgttgaggttgtagtgctcctctttgccgtcgttgaggtgcagcgtcaggccgccgcagtagttggccgtggatttctgcagcagatagcccttggtgccctgaatgacataccgggccggagccccgcagtcttttgccgccatgctcacggccttgaagccgctgtaatccatggtcaggatgccgctggtgtcaatgccgtggtcgatgttggccgcgtagttcacccggttgggctccccgaacaggcccacgatgtagctgatgttgtagacattcaggtccatgagggcaccgccggcgcagttgggatcaaacgacggggccacctgccccgcgcagaacgcatcgtaccggctggaatactggctgaaattgcactgcaccagcttcaccgtgccaatgcggggcagcagctcccggatcttattatagttttccagatactgggtggtcagcgcctcaaagaggaagacccgtttgtggcgggagagagcggccagctcttcggtctgggccgccgtgggggccatgggcttttccacaatgacatgcttgcccgcttccagcgccactttggcatagcgggtgtgctgcaaattggggacggccagatagaccacatccacccactgcagcagctccaggtagttggtggtgcactggggcacatggtaccgggcgcagagctccgccgccagcggcgcgctccgctgggtgctgcacagcgcctgcacctgaaacggcgagtccgccccggccagccagggcaaaaactccttgacgatcatcccggtgcccaggatgccaagcttcatcttctgttccat

SEQ ID NO: 706 - DNA, 5149 bp, unidentified
  source 1..5149: mol_type = unassigned DNA
  misc_difference 2777: note = a, c, g, or t
  misc_difference 2778: note = a, c, g, or t
  misc_difference 2779: note = a, c, g, or t
  misc_difference 2780: note = a, c, g, or t
  misc_difference 2781: note = a, c, g, or t
  misc_difference 2782: note = a, c, g, or t
  misc_difference 2783: note = a, c, g, or t
  misc_difference 2784: note = a, c, g, or t
  misc_difference 2785: note = a, c, g, or t
  misc_difference 2786: note = a, c, g, or t
atgagaatgcgtttcaagccctatgcccgcgctgagctgctggccagcgacttccacgtccacgacccctttgtgctgggcggaaaatggcacgcccagtatgcccgcccggagcagcctttcgtgctggagctgggctgcggcaagggcggtttcctctcccagctggcctgcgcccacccggagaacaattacctgggcatcgacatcaccgacaaggtgctgatcctggccaagcggaaagtggaggccgcctatcaggcggctgaccgccccattgacaacgtgaagatcatgagcgccgacattgagcggatccacaacgtcatcttcccggaggacaccgtcagccgcgtctacatcagcttctgcaacccgtggagcaagaacggttcctcccacaagcaccgcctcacctacccccgccagctcatccagtaccgggcattccttgaggacggcggcgaaatttacttcaagaccgatgacgacgacctgttccgcgacagtctggagtacttccccgcttccggctatgagatcacctggaagacctttgacctgcacgagaacgagccggagtggaacatccgcaccgagcacgagggcatgttcaccgaaatgggcatcaagatcaaggccctgatcgcccgcaagctgcccggcgacgagagcgtgacctggatcgagcccaaggtgctcaagaagatggccgccgcagaggctgaagccgaaacgcagaactaacgggaggtgctgtccttgtcgtttttcctcaacaccacagtctgcggctttacgctgtatcagatcctggcgtatttcctcgtctactcctgcctgggctggtgcctggaggtggtgtatgccgccgccacgacaggccagatcgtcaaccggggcttcctcaacggcccggtctgccccatctacggctttggcatggtcatcgtcctgtttgtcctgacgccgtttgagcacagcacgctggcgctctacatcggcggcgtcatcctgcccagtgcgctggagctggtgggcggctgggcgctttacaagctctaccacacccgctggtgggactacagcgataagccgttcaacatcggcggctacatctgtctggagttctccctgctgtggggcgtgggcacgctggtgatgatgaaagccatccaccccacgatcgccgggttggtggagctggtgccgcctttcatcgggttcctcctgatgtgcttcctctacgccgtctacgcggcagacgttgttgtcacggccgtggccgcctctgacctggcccgggagctggacgccctggaaaatgtggccgacagcatccacgccgtcagcgacgccatgaccgagatcctgggcaccaccgccatggaggccgaccagaaactggacgagaaccgtctgcagttcaaactggccgctgccgaggcccgggacgccgctgccaagctttcgcccaaggaagcggctgaggccatgcgccgcaaggccgacgaggcccgggacgccgcccgccgggcttccgagatctcccgcctcaatgcggccgaagccgccaaggccgtcaagctggcggccaagggcacagccgagcggaccgccgagctgctgcagctggaacagctggccgaggagctggctgcccggagcgaggaactgcgggcgcgcacccgccgcacggcccactttggcaagggccgtatgctccgcgcctaccccagactgcgccatggtaccaaacagctcacgctggacgaactgcgggagcgccttaaatacgagcacaagcactctgcataagaagaaccaaaaatgggccgtccctacggggacggcccattttttttaaattagagttcgccccagaggttttccgggtagagaccctcggcggtcttctgagcgatgccggccaccaccacgggtttgtcctcccggtaggtgacaccgtaccactgatcggtgctgttcagcaccttgaccgtggccttgccctcctccagcagctcggtgaccaccagcggcaggaaatactcacacttgagcgggtccttggccagatgctcggtcagccagcccgcaaagcggcggtccgcctcttccaaaaagctcttaccaaagccccagaggttcatgctgacctgcgtttcgccgggcaggtccacccaggtagcgccctcatcctcggtgtagtggatgccgccctcgtaggtctcaatgcgggtgcgctcgatgacgctgtggagggtgccgtccgggtttgcctggcagacaccgcgggagaccttgccgttttccgagacggtgttcttgagcagatagctcaccatgcagtaatcgtacacctcgccatcctcgtgggtggaaaggtaatcgtacatcactttgaatgcctgcgggccgtagtaatcgtccgcattgatgacggcaaaggggccgttgatgaacggctttgcggccagaaccgcgtggcaggtgccccagggcttgacacggccctccgggatggagaagccctccggcagctcgtccagctgctggaacgcgtatttcacgtccatcaccttggagacacggtcgccgatggccgccttaaaggcatcctcgatctcgtgcttgatgacaaaaatgaccgtctcaaagcctgcgcggcgggcatcgtagagagagtaatccacaatgacctgcccattgcggcccaccgggtcgatctgcttcatgccgccgtaagatcggaagagcgtcgtgtagggaaagannnnnnnnnncccatgccagccgccatgaccaccaaaacgggtttattcataataaaagcctcctgtttgtgccaaagcttgatttttcatagctccattatactcgaaaagtccctggacaacaaggtaggctttaaagcaagatttaattgcttattttgtaaattaaagcttgccaatctgtgcaaaacacggtatactggagccgcacactttttcctttccaaaaccaaaaatggaggttcccttttatgaacgaagccgttaccaagcgttttctgctctatttccgcctgatgatgctggtgtggatcctgatcgccaacgcgttcttccacgtcatggaatttgattacagctggctggtgtttttgagcaacatcatgctgttcaccatggagggcgacatcaaggaccgcttcctttccgtggagctgggcggccttgtaggcatggtgctcaccgtgctggccatgctggccattgcagccctgaccccggtgctgggcggcctgccgggcctgctgctgccgctggcggtggtgctgttcatcctcatcatcctgcacccctatgcccccaaggtgctcaacaacgtcggctttgcctacctcacggtggcctgcatcgacgcggagacctttgcggccaacctgccccggttcttcttcgtgtacatcgtcggctccctcgtcttcaacggagtctgcatccttctgatgaagcctgcgaaagccttggccgccaaaaccgtaaaagcatgacccccctgcaaaagcgatgtctcggcatcgcttttgttttgcccggccctgtggtacaataagaaaaaacgcagaaagggagtatccccatgtctcacaagaccgtctggatcaccggagcctcttccggcatcggccgggagtttgcctgccggtatgccaagctcggcttccgcctcatcctcaccgcccgccgccgggagcggctggatcagctggccgccgagctgctggcaaagtacaacacgttctgccgcgtcctccccgccgaccttgcccgggagagcgagtgtacccgcctgtgtgaggagctggccgaggagcggatcgacatttttatcaacaacgcgggctttggcgtctgcggcagttttctggagaccagcactgaggccgagctctccatggccaaagtcaacgtgctggccatgcaccagctgtgcaagttcgcggtgcagaaaatgcaggcccagggctttggcacggtgctgaacgtggcctcctcggcaggcctgctgccgggtgggccctatatggctggctactacgccaccaaggcctatgtggtcagcctgacccggggcattgccgaagagctccgggagcagcacagccctgtctacgtctgcgccctctgccccggcccggtggacaccgagttcaatgaccgggcgggtgtggtgttcgccctcaagggcatttcccccgccctctgtgtggaggaagccatgcgcgggatgctgcggggcaagaccatcatcgtgccctcggccctgatgcgggctgccaccaccgcccagcactttgtgcccacgccgctgctcatgcccattatggcccgacagcagaaaaagaaactgggcggcagcacccccgcacaggaacattgacgctgccgggaaaccatgttaccctagagcacaggagaaccgcatttgattgcgcaaacagaccaaacggagggatatcgaaatgaagatcgcactcatcaacgagaacagccaggccgccaagaacggcatcattgaagccgccctgaaaaaagtggtggagcccatgggccacgaggtcgtcaactacggcatgtacgcagccgatgacaaggcccagctgacctatgtccagtgcggcattctggccgccatcctgctcaacagcggcgcggccgattacgtcatcaccggctgcggcaccggcgagggtgccatgctggctttgaacagcttccccggtgtcatctgcggccatgtggaagaccccgtggacgcctacacctttgcccatgtcaacgatggcaacgccgtggccatgccgtttgccaagggctttggctggggcggcgagctcaacctggagtactgctttgagaagctgttcggcttcggccacggccagggctaccccaaggagcgcgtggagcccgagcagcggaacaagaagatcctcgacggcgtccgcgctgccaccttcaagcccctcatcgattgcctgaagagcatcgatccggacctgctcaagggcgctgtggtcggcgagaaattcagcgagctgttctttgcctcctgcaaggacgcggagctggctgcatacgtcaagaccctgctgtaa

SEQ ID NO: 707 - DNA, 7961 bp, unidentified
  source 1..7961: mol_type = unassigned DNA
  misc_difference 2803: note = a, c, g, or t
  misc_difference 2804: note = a, c, g, or t
  misc_difference 2805: note = a, c, g, or t
  misc_difference 2806: note = a, c, g, or t
  misc_difference 2807: note = a, c, g, or t
  misc_difference 2808: note = a, c, g, or t
  misc_difference 2809: note = a, c, g, or t
  misc_difference 2810: note = a, c, g, or t
  misc_difference 2811: note = a, c, g, or t
  misc_difference 2812: note = a, c, g, or t
acggcgtcaagcggtttgtgcagatatccaccgacaaggccgtcaaccccaccaacatcatgggtgcgtccaagcgtctgtgcgagatggtgatacagatgatgaaccgggagtccaaaacggaattcgtggcggtgcgcttcggtaatgttctgggcagcaacggcagcgtcatcccgctttttaagaagcagatcgaggccggcggccccgtgaccgtcactcatcccgacatcatccggtattttatgaccatccccgaggcggtgagtctggtgctgcaggcgggatactatgccaagggcggcgagatttttattctggacatgggcgagccggtgaagatcgacaccatggcgcggaacatgatccgtctgtccggctacgaaccggatgtggacatcaagattgagtacaccggtctcagaccgggggagaagctctacgaggagctgctgatgaaggaagaaggaatgcaggagactgccaacaagctcatccacatcggcaagcccatcgaaatggacgacgcgctgctggagcagcagctgaagcggctggacgaagccagccgggcggaaagcgaagatatcaaggacatcgtcgcggagatcgtgcctacttacaaacgcgaatgtaaggtctgaccaaacgaaataagagaaaatgaggaaagcggaatgtaccgaacgtttttcaagcgcctgctggatattattttgtccggttgcgccatcgtgatattgtcgccgctgctgctgatcattgccgtcgccatcaagatcgacgatcccggcccggtgctgttccgccagaagcgggtgggcattcacaagacccatttttccatcatgaaattccgcaccatgaagatggacacccccaaggacacacccacccatctgctggaaaacccggagcagtatatcacgaaggtggggaaatttctgcggaagtcatccctggacgagctgccccagatttttcagattttcactgggaaaatgtccatcatcggcccccggcctgccctgtggaatcagtttgacctgattgccgaacgggacaaatacggggccaacgacgtgcgccccggcctgacgggctgggcgcagatcaacgggcgggacgaactgcccattgaggtaaaggcccggttcgacggggaatatgtggaaaagctgagctttttctttgactgcaaatgctttttcggcaccatcgtttccgtgctgaagcatgacggcgtggtggaaggcggcaccggccagctggaaaaggagaagaaagaatgaagaacattctcatcaccggcaccggaagctatatcggggtttctctggaaaactatctggggaagtggccggaaaattaccgggtagattcgctggatatgcgcggcaccgattgggagaaccattccttccgcggctacgacgcggtgttccacgtagcggggctggtgcatcagccggacagcaaaaacgacccggcgcgctctggcctgtacgatcaggtcaaccacatcctcgcggtgcggactgccgaaaaggccaaggccgacggtgtgggtcagttcctgtttatgagctcggagagcgtttacggcctgactgcgcccatcggcaaaacggtcgtcatcacgaagaacacgccgctgcaccccgcggacaactacggcgtcagcaaagccagagcggaagcggatttgcaggcgttggcggacgacagcttcaaggtcgcaattctccgcccgcccatgatctacggcaagggctgcaagggcaattacgtgaccatggcgaagctggcgaagaagctgccggtttttccttacgtttccaaccagcgttccatgctgtatattgagaatctgacggaatttgtccggctgctcattgacgacgaggcggcgggcatattctgcccccagaataacgaatacaccaacaccagtgacatggtcaactggatcgcccacgccaacggaaagggcatcctgatggtgaggggctttacctgggcgctgaagctgctgcggtttgtctcgcctgcggtggacaaggcctttggcagtctgtgctatgattttgcgctgagccggtacagccgggattactgcgtaaaaacgctggagcagtccattctggaaacggagaaaacctgatttttaggaagcgaaagagggcggttgcttgaaaaagaagcgggatatcctgtttttgtgccagtttttttatcccgaatatatttcctccgcccagctgccctatgacacggtgctggcgcttcgggacgccgggttctctgtgggcgcgctgtgcggctacccgcgggaatacgccgagggcgggaaggtccccacgaaggaggatgcggacggcatccacattcaccgcctgaaatacatccagacgggccgggcgggatttcttggccggatcgtcaactatttttcctttacgtttcatgtgctgctgcacctgccggagatcggcaaataccgggcggtggtggtgtactccaacccgccgattctgccgtggattgcttcttgggcaaaatcgctgttcggtacgaagctggtgttcgtgtcctacgacctctatcccgaggtggccacggtgacgaacaccctccgggaaggcagcgtgatctgcaggctgatgaaccacatcaacaaatgtgtgttccgccgggcagaccgggtggtggcgctgtcgtcggagcagaagaactgcattctccgcacccggaacgccgttgacgaacttgtgacggtgattcccaactggtaccgggnnnnnnnnnngacgagggtggcctgcgcgaccgggaggaaaaccggttccgggagttgacggcggggcgcttcgtggtgtcctatttcggcaatatgggaaccatgcaggacatggacaccattctgggcgctatccgggcgctgcgggaggagaaggacgttttcttcctctttgccggacacggcaataaaatggagaagctgcgagagatcatcgctcaggagagcattgagaatgtccggattcacagcttccttcatggtcaggactttcaggacgcgctggcggtgagcgactgcgcactgatttctctggaaaagggtgcgacggggctttgcgtccccagcaagacctacagctatatgatgcagggcacccccctgctcgccatcatggacgagtgcgacatcgtccgggatatccagtccggcgcggggctctgggtgcgcaacggcgaaagcgagcgattagccaaggccatccgtttcctgcgggacaacccggaggaagcccgggacatgcgcagaaaatgccgggagctgtatctgcaaaagtacaccaccgaaatttgcacgggaaaatatgtatctctttttcgggaacttttacacccggaaacaggggaggagaatggattatgagtatttttgccaacaaaacgctgatgattaccggcggtaccggttccttcggaaacgcggtgctgaaccgcttcctggacacggatatccgggaaatccggattttctcacgggacgagaagaaacaggacgacatgcgccatgaattccaggcgaaaatgccggaggcggctgggaagatcaagttcttcatcggcgacgttcgtgaccttgcttccgtgaagaacgccatgcacggcgtagattacatctttcatgccgccgccctcaaacaggtgccgtcctgtgagtttttccccatggaggcggtgaaaaccaacgtgttcggaaccgataacgtgctgaccgccgccattgacgcgggggtcaaggccgtcatctgcctgtccacggacaaggccgcctaccccgtcaacgccatgggtacctccaaagccatgatggagaaggtcatcgttgccaaatcccggacggtttctccggaaaagaccaaaatctgctgcacccgctacggaaacgtcatgtgttcccggggtagcgtcattccgctgtggatcgatcagatcaaggcgggcaaccccatcaccatcaccgagccaaacatgacccggttcattatgtctctggaggaagcggtggatttggtgctgttcgccttccagaacggcgtcagcggggacattctggtgcagaaagccccggcgtgcaccattgagacactggcaaaagccgtcaccggcctgtttgcccccggccacgagatcaaggtcatcggcatccgccacggcgaaaagatgtacgagacgctgctgaccaatgaggaatgtgcccacgctatcgatctgggcaatttctaccgcgtcccctgcgacaagcgggacttaaactacgacaaatatttcaaggacggcgacacccagcgcaacgtcctcacggagttcaacagcaacaacacggagctgctgaacgtggagcaggtgcagcagaagctgctgagcctgagctacatccgggaagaactggaagccatgaagaataaataacggaagggtgagctggcatgaacattctgattaccggcgcggccggatttgtgggcaaaaacctgacggcggcgctggagtgcatccgggacggccgtgacaagacccatccggggcttacggtgggggagctgtacctctacgacatcgactccgacccggcgctgctggaaacggcctgccagaaggcggacttcgtgttcaatcttgccggcgtcaaccgcccgaagaatcaggaagagttcatgcagggaaatttcggctttgcttccacgctgctggacacgctgaaaaaataccataacacctgccccgtgatgctgtcgtcctccattcaggcgaccatggtggggcgctatgcgggcagtgagtacggcaggagcaagaaggcgggggaggagctgtttttctcctacgctgccgagaccggggcgaaagtgctggtgtaccgcttccccaacctgttcggaaaatggtgccgtcccaactacaattccgccgtggccaccttctgccacaactatgcccacgacctgcccatcacggtgaacgaccccggcgtggagctggagctgctgtacatcgacgatctggtggacgagatgattgcggcgttggagggcagggagcatcactgcgaatttgagggcgtggacacggttctgacggcgtccgggcgctactgcgccgcgcctgtcacccaccgggcgaccctggggcagattgttcagctgctggacagcttcaaggcgcagccggaaaccctgctgatgccggaaattccggcgggcagcttcgcgaaaaagctgtattctacgtatttatcctatctgcccagggaaaaggcggcgttccccctgaaaatgaacgttgacgcccggggcagcttcacggagctgctgaaaacggcgaactgcggccagttcagcgtgaacgtcagcaagcccggcgtgaccaaggggcagcactggcacaacaccaaatgggaatttttcattgtggtgtccggtcacggcctgatccagcagcggaaggtcggcgccggggaagtgctgaattttgaagtttccggagagaaaatcgaagccgtccacatgctgccgggctatacccacaacattatcaacctgagcgaaacggacgatcttgtgacgctcatgtgggcaaacgagtgctttgacccgaaaaagccggatacattctttgaggtggtttgacatggaaatgaagctggactattccgacgtggcgttccgcaatgacggaaaattgaagctgctgatcattgtaggcacccgcccggagatcatccgtctggcggcggtcatcaacaagtgccgcaaatattttgactgcattctcgcccacacggggcagaattacgactacaatctgaacggaatcttcttccgggatttgggacttgccgacccggatgtgtatatgaacgcagtgggggacgacctgggcgccaccgtgggcaacatcatcaactgctcctacaagctgatgacggccattcagccggacgccatgctgattctgggggacaccaattcctgcctgtccgccattgcggccaagcggctgcatattcccattttccacatggaggcgggaaaccgctgcaaggacgagtgcctgccggaggagaccaaccgccggattgtggacatcatctccgacgtgaatctggcctattccgaacacgcgagacgatacctccatgagtgcggtctgcccaaggagcgcacctacgttaccggctcccccatggcggaggtgctccacgccaacttaaacgccatcgaggcttctgacatccaccagcggttgggactgaacaaaggggagtacattctgctgtctgcccaccgggaggaaaacatcgacacggagaagaatttcctgtccctgtttcgcgccgtcaacgccatggcggaaaagtacgacatgcccattctgtattcctgccacccccgctccaaaaagcggctggaggccacgggcttcatcctggacagccgggtgattcagcacgagccgctgggcttccacgattacaactgcctgcaaatgaacgccttcgcggtggtgtccgattccgggacgctgccggaggaatccagcttcttcacctccgtgggacatccgttcccggcggtgtgcatccgcacgtccacggagcgcccggaagcgctggacaagggctgcttcattctggcgggcattgacgaaaagaatcttctgcaagcggtggataccgctgttcagatgaaccgggacggcgatctggggattcccgtgccggactatgtggaggaaaacgtatccaccaaggtggtcaagatcatccagtcctacaccggcgtggtggacaaaatggtctggagaaagtcgtaagaagccagacgccgacaaattgcgctgttttttctggatatgatgaaacagccggaaaatttcacaacatcgggaggcgagacgcatgaaatacctgttcatcaactccgttgccggctttggcagcacggggcgcatcgcggcggagcagtgccgtgggctgatggcgcaggggcatgagtgcgtgctcgcctttggccgtgaagaggcaaattgcagcgatattcccacggtgcgcatcggtacgcccatggactacaggctccacggggcggaaagccgtctgctggacgattccggcttcggctcccggcgggcgacccggcggtttctggattgggtcagggaatacgacccggacgtgatctggctgcacaatgttcacggctattacattcacttgggagagctgtttccttacctgcgcggctgcgggaagaccattttctggacgcttcacgactgctggagcttcacgggtcactgtgcctattttgactatgtgggctgtgaccgctggaaaaccggctgccacgactgcccacagaaacgcgcttatcctgcaagcattcttttggacaacagccggaaaaattacgaaaaaaagcgggaactgtttacgggcattcccgatgtgaccctcatcgtcccctcccactggctggaaagccgggtaaaggagagctttctgagggactacccggtgaaggtggtatacaacacggtgaaccgggaaatcttcaagcccacccccggcaatttccgggaaaagtacggcttggaaaataaaatcattctgctgggcgttgccagcgtatgggacgagcgcaagggactgcgggactttctggcgcttcatgacctgttggacgaagaacatgccatcgtgctgatcggtctgagcgcaaagcagattcaatccctcccggcgggaattctggggctgccccgtaccaacagtgttcaggagctggcggaagcctatacagccgccgacgtatttctgaaccccagcacggaggagaccttcggcatgaccgtgctggaagcccggtgctgcggcacggagg

SEQ ID NO: 708 - DNA, 8233 bp, unidentified
  source 1..8233: mol_type = unassigned DNA
ttattctgtccctcttatttttatgcgataagctttgggagaggccccttttttcttatgaaaggtttttgaaaaatacagcccattatcaaatccgacggaatttgcaatggcggtgatcgaaagatttgagtgttccaacagatagcatgcctgtttcatgcgaaaatccgtgaggtattcttttggggactgctgcagcaccagttcaaaggaacggaacagatggctgcggcttaaaccgacgtaggcggcaatatcttccactgtgatcgggtaggagtaattggcgctgatatattcgatacttttctggacgtaggttgcggctgtcagctgcgtttctttttgggtggaagattttagaaagagcgccagcgtggtatagagccggccggtcatttcaacggcatgttcaaatccgtttcctctggcatcatagatatgcagaagctgacgtttgacttcttcgccgttgggaactgcatgaatacatggatgtttgcgggaaaaatcggttgcctgcagaattgtggcagcgtcacttccggtaaatccgacccatgcatattcccatggcgtttttgcatcggcacggtagatgatctccgtattcggatacacaagaaaggcatcttcggcagaaagaaaatgggtttcgttgttgacttcgtatgtgccttttcccgagatcacatagtgaatcaggtagtggtcgcggattccgggtccccactgatagccggcatcgcatagctggtatccgacattatagacagacagggaaacaagttcttttgcagttgctttgtaggaatttttatattgatcattcattggaaatgctccttacacgattctagtattgagtttatacgtttttttatgcacatgcaacatttttacatgttttttctacatttggttctgtacattaagagccgggagcgatagaataggggtatcagaagaaaacaaaagcacagaaagggagagtggaattatggcaattttagttactggtggagcaggctatatcggaagtcatacctgtgtggaactgcagaatgcgggatatgatgtcgttgttctggataatctgtcaaacgcttcagaaaagtcactggatcgtgtggaggcactgaccggaaagaaagtgacattctataagggagatatccttgaccgtgatatcttaaataaaatctttgcagagcagaagattgacagctgtattcattttgcaggactgaaggctgtcggagagtctgtggcaaagccttgggagtattacaataacaacattgcaggaactttaacactggttgatgttatgcgtcagaacggatgcaagaacatcattttctcttcatctgcaaccgtatacggcgatccggcagaaattccgattaccgagaactgcccgaagggacagtgtaccaatccttacggatggacaaagtccatgctggagcagattttatcagatatctacaaggcagataatgagtggaatgtgatcctgcttcgctacttcaatccaatcggagcacatccaagcggaaccatgggggagaatccaaacggcatcccgaacaacctgatgccttacattacacaggttgcagttggcaagttaaaagaactcggtgtattcggaaacgattatgatactccggatggaaccggtgtgcgcgattatatccacgttgttgatctggcaaacggacatgtaaaggcattaaagaagattgaagagaacgccggactttgcatttacaaccttggtaccggacacggctacagcgtgcttgatatcgtaaagaattttgaggaagcaaacggcattaagattccatacagcatcaagcctcgccgtcctggcgatattgcaacctgttactgtgacccgggcaaggcagaacgtgaacttggctggaaagcgcagtacggaattaaggaaatgtgtgcggattcctggagatggcagaagaacaatccaaacggttatgaggattaattaaaaaagagggaaaagtcttattttcgaatttgtttgaatatttttgaaaaatatgaaaaatatgcttgacgaagcgtggtgtgtatgataatataatacatggttcgttggtcaagcggttaagacgccgccctctcacggcggaaacacgggttcgattcccgtacggactgctgagttataaatccagtgtttatacagattcttaggaagctgttgtaggcactggattttttgttttcttatatggtcatatatgaaaccgaaacgtcgggttagaatgtcgaaacaagattacctatgagataatggggataaaagttatgcacttagtaaaattggaagagattcctggtgctaaagaagaattgaaaaaaattcgcaaacgattctacgattggatgaaagatccttctgcattttcagagtaattcacaaaatacccaagaaaccttgcaaaacagggcatttcttgtcagcaggaggtatattatgacatcaattcgtgttttattcgtatgccacggcagggctatggaaagtcagtaaaatcaaggctttagggggcattacttgggtatatcgtggcaagtgtagtagtaaaggactacggtaatactacgaatgagggaatgcaaacaagccgatgtagaagtacaaattttaatggtagtagcaatcgttagaatgtaagggctatcgttatatagtgtgcaatcgttgaaatgttcagcaatatcgtgtaaaatgaatatctaattggatatgaacatataatattaatgcagccataagctgcgatttgaacttattttgacattgacaagcggctcatttggatgtatattttaagtacagtaagagattactgcaaatgtttgttgctactcgatatgcaactcaaacaaggtcgagttcaaatgtttgtcgctactcgatatgcgacttagaaaaggtcgagttcaaatgttttgaggttccattcgagagaatggggcctctttttaacgataggagaagaaatggaaataggacatttttattatattgatgatcagtactttaaggattttccagatccttatttgatgcagaataaggaaaaagtaaatggacagttgcatgacagaccatgtttttacgcattccaggatagtaatactcagctattttggatgattccgttttcgtcacaggtttctaaatttaaggggatttataataagaaaatgcaaaagtaccataggtgcgatacaattgtttttggagaagtacttggtcatgagaaggcttttttgattcaaaatatgtgtccgattacagaaaaatatatgaaaaatgagtatttggactctgctgccaatataccagttcgtgttgatggtagattggaaaaggaattgaaggataaggcagggaaagtattagcgttgcagagaaagggcgcaaagctgatttttccagatgtccttagtatagaacaggaattattataatagatggaaatatctatgttggataaagagaggtgctgtgccagttggcaggcatctttttctttataatccgcgtggtatatttcgcacatttttattgacaagagattgttgaggtggtgtttttataacataagagcgaaatatatcacataagagcgaaatatatcacataaaggcgatggcgattatgaatgaaaaagaaccaatgagcttgtcgaaaaaatataatatcagatacacaattgatggattattcttacgaatgagaagtacaaaggtgatgccttgctgcagaagtcttatacagttgatttctttactaagaaggtcaaaaccaatgaaggggaagttccacagtattatgtagaaaacaaccacccggcaatcattgaacctgaactcttcgacttggtgcagtcagaaatacagcgaagaggcaagggaagttcaaggtacagcggtgtgacgatattttcttccaaagttcagtgtgccgagtgtggtggctggtacggcagtaaggtgtggcattccaatgacaaataccgaaggggtatctaccaatgcaataataagttcagacataagactggttgttcaacatctcatttaacagagtttgaaatcaaggattattttgtaaaagctgtaaatcagctgattatggagaaagcagagatacttgataatcttcagctaattaggactacgctttgcgataaggcagaccttatcaagcagaaagaggcattggaagaggaaatcaatgtaacagtagaaatgacacagaatattgttgcagagaatgcgaggatggctcaaaatcaagatgaatacaataaaaagtatagttccttggtggagcgatacaataagctgaaggaagaatatgatagcatttgctcaacgatatccgacaaggatgccaagtacgagcagattggcagattcatcaaggttcttaaaggtcagcaagaacttataacagaatttgatgagtcgctttggagcagccttacagagaagatagttgtgaaaagcaaggaagaagtgaccgtggtattcaaggacgggacagagataacagttgaataaatataacaatattgcactcaggcttagtggtctgagtactttttctgtttaaagaactgtaacttttgagtcattgaaaaactgttcaatatatgttagaataaattatcttaattgtgcaagaaattcataagcacaaggagagtggatatgttaaagaataatatagaagtagatgtaaaagttaagtgcatagaaaacggaattacgcaggctcagcttgctgagaaatcagaaacatccagtccgtatgttaatcgaatcatcaagaagagtgaagtgttgaataagacctttattcgcatgatggaagaactcggatatgatgttgaactcacatatgtgaaaagaacggaggaatagccatggcgtttgattttaagaaagaatataaagaattttacatgccaaagagtaagcctgcaattgtaacagtaccaaaagctaattacattgcagtacgaggaaaaggaaatcccaacgaggaagatggggcatatcagaaagcaataagtgtattatatgctatagcctatactttgaaaatgagttataagactgattataaaatcaatggtttctttgagtatgttgttccgccacttgagggattttggtggcaagaagatattaacggaatagattatggcaataaggattcttttaattggatatctgttttaaggcttcctgatttcatttccagagaaaactttgattgggctgttaatacagcggccaagaagaaaaagctagattgctcatcagcagaatttcttacaattgatgaaggcctttgtgttcagataatgcatattggaccatttgacgatgaacctgaaagcgttgcaaagatggatgcatatttatcagaaaatggatacgaaaatgatttgagcgacacaaggttacaccacgaaatttatatgtccgatgcaagaaaagttacaccagaaaagtggaaaactgtaattagacatcctattaagaaggtgtgaagatgaaacagataaccaataaggaatatgaagaattccaaaaatataaagaagataagctatatggtagagtgcttaactccgatggtctgcgtttaatctgtgcagcagaaaattatgacccagaggctattggcaagcgtatgcttgaaacattggctaaaattggccgagagaactaatagtataagtaaggagggtcaattttgaaagaacaaagtgaactagacactacaaagaatgatagtgtaaatgcccatgaaacagaaatattagaagtgtcacacgaggcgtattgcaaaaaaaagccacttgtcatatttaaaactgatgcagacatatatggcagaaatatatcagcaatgagtaatttctttgatgggtatgttcaagaaatgtctctatccattcgtgagtcagatgggtcacaagtagtaatggacttgcctatttcagatttgagcataataggtgaatcaattaaccaggctgaaatcgtaatgagaggaaatgttacattgttaccagatttcgatagtttaccatcagatgttagaagtaaattaaagaaaggtttatattctgttggcgaatcaaaacaagtagatggcaatatgagagctgtaatacttgatgagaatggagttagggtaaaagatattactttgaaaaaagttcttaatagtcctgcaaatatcgaaactatgcgtagcataggaaatcaattacagatgagacaaatttatgccaaattatctgatatagaagagtttcaaacatatcagatagaaagggatcgtgacagagatatcattgtaccatttttagatgctcgttcacttgtacttgaggctgctactaaagattctgaaactgaaagagcacaaatgcttaaagaggctgatagtaaaattcgcacagcattaaattctgtttatagagatattgagacaacatcaaacagctttgccaaaagagtcaacataccattcttaggttttggaaaacaaattaatacatatatgagctatattgctgatgacttacagattgcaacaaaatatgtaggggtaagaatgcaaattttagagtaccttggtgagagcaaaacagcaaaaacagttttacaacagtttaatcatacaatgcttgattttatagaacagcctataactagaaaaggtttatcagcagcgactctaatgcaggattacttcccttataatgaagaaaatatggactgttggtataagttttccaaagacctgaaacctgcgattgaatcaagtatgaaacaattggaacttgaaacaaaggattataacaatcaagaaatatatgtagtttccgtggaggatgagagtgatgagtgaaaatctaaaaaaatgtaaggtatgtggtagaacaataactgataaaaataatatcactggattatgtcctaagcatcaaaaagtcgcaaatacagctggagctacagtgggattagtgggtttaggaattactgtaaaaaagtttgctcctaaagcgttaaaaacagttataaaaattattaagcgataagtttgaaaggaggcctcttgatggtcacagaagttaatcgttcaataatgcaccctgtgcatatcgttcaaggggtttcaaatgcaccctgtgcatatagttcaatagtacaaaggttcagttgtatcaacgatggtgtggcaacagatccagcttgtggtacatcaggattcttggttgctgccggcgaatatctgaaggaaaataagaaggatgagattttcttcgataagcagaaaaaagatcattatatgaaccacatgttttatggatatgacatggatagaaccatgcttcgtatcggtgccatgaacatgatgacgcatggaatagacaatccttttatcgaatatagagacagtctgtctgatcaaaatcaagataaggacaagtattcgttggtactcgccaatccaccttttaagggaagtctggatgcagagtcagtttccggagatttgcttaaggtatgtaagacaaagaaaacggaattattattccttaccttgttccttcgtatcttaaagattggtggaagatgtgcttgtatcgtaccggattgagtgctttttggatcttctaaagcgcataaggatatcagaacagagattgtagagaatcagagattggaggctgttatttccatgccttccggtgtgtttaaaccatatgccggtgtatctaccgctattctggtatttactaaaacagagcatggtggaacggataatgtgtggttctatgatatgaaggctgatggcttcagtcttgatgataagagaactgttgtgtctgaaaatgatatccatgatatcatggagagatttaagaatcgtgagcaggaaattgatagaaaacgtaccgaacagtcatttatggttccgaagcaggaaatcgtggataacggatatgacttgtctatcaacaagtataaacaggtagaatatgaaaaaattgagtatcctgtaacagcagagattctggctaacattaaggctttggataaagaaatcgctaaagagatggaagaattggaggcgatgttgaatggataa

SEQ ID NO: 709 - DNA, 5713 bp, unidentified
  source 1..5713: mol_type = unassigned DNA
atggcaatgcatacatggtttgaatgtaagatccgttacgagaaaacaatggaaaatggaatgaacaagaaggtgaccgaaccgtacctggtggatgccctcagttttacggaagcggaagcacgcatcatcgaagagatgacgccgttcatttcgggagagttcaccgtatcggacatcaaacgtgccaactatagcgaattgttccccagcgaagaggaagctgccgaccgctggtttaaatgtaaactggttttcatcacactggacgagaaaagcggtgcggaaaagaaaacctctacccaggtattggtgcaggctgccgacctgcgtgatgcagtgaagaaactggatgagggcatgaaaggcacaatggccgactatcagatagcatctgtagcggaaaccgccattatggatgtatatccgtacagtgcagagcccgacgacaaaccggaagtttaatttaagtgatgagttataagttatgaattattattgcgagccataacttataactcataactcataactcaaaaaaacgatgattgcagagaatttaaaacaagtactgagcgaactgcctgaaaaggtacggctggtggctgtttccaaatttcaccccaacgaggcgatagaagaagcgtatcgtgccggccagcgtgtgttcggagaaagtaaggtgcaggaaatgactgccaaatgcgaaagtctgcccaaagacatagaatggcatttcatcgggcatctgcaaacaaacaaaataaaatatatcgttccttacgtagcgctgattcatggcatagactcctacaagctgttggccgaagtggacaagcaggctgccaaagccggaaaaaccgtcaactgcctgctgcagttgcacattgcccgggaagagaccaagtttggattcagctttgacgaatgccgggaaatgctggcggctggtgaatggagagagctcaagcatatccggatatgcggattgatgggcatggccacgaatacggacaatgacgaacaaatcaaaacagagttttgttctttaagtagcttcttcaatgaagtgaaagccaagtggtttgccgatgcagagtcattccgggaactgtccatgggaatgtctcacgattaccacgaagccattgcagccgggagcaccttgatacgtgtaggaagcaagatttttggagaaagaaactattaaccataaaaaatcattatcatggcaacattagaaactacttttgcagggctgaaactcagaaaccccattatcgtcagcagctccggactgacagacagcgctgccaagaatcagaaactatctgaggccggcgcaggtgccattgtgctaaaatcactctttgaagagcaaatcatgatggaggctgactggatgggagacccgaacatgtaccccgaaggcagtgactaccttgtaggatatatccgcgaacataagctgggtgaatatctgaacctgattaaggaaagcaaaaaggtttgcaatatccccatcatagccagcatcaactgctatcagaatgccgactgggtggaatttgccaccaaaatagaagaagccggtgcagacgcactggaaatcaatatccttgcactgcagacggatgtacagtatacatatggaaccttcgagcaacgccacatcgacattctgagccacatcaagaagacggtcaagatacccgtcatcatgaagctgggtgacaacctgaccaatccgatagctctgatagaccagctgtatgccaacggtgccgccgcagtagtgctgttcaaccgcttctaccagccggacatcaacattgagaaaatgatacaagtatccggcaacgtattcagcaatgaagccgatttgtccaaagccctgcgctggataggcatcgcttcggcagccgtaaacaaactcgattatgctgcttccggtggtatccactcgcccgaaggcgttgtcaaggcaatattggcaggtgcttcggccgtagagatatgcagtgtgctttatcagaattcagctaccatcattgaagaatacatccgcttcctcaacttgtggatggaccgcaaaggtatggaaaccatcagccagttcaaaggtattctgaacgtaaacgacccgaagggagtcaataccttcgaacgtacacagttcttgaaatacttctcttcacatgaatgagacaaaagggtgacaagaagacaataaaaatgaaagggtgataacatcattgctgtgttatcaccctttcattttatacttaccctatctttttatttcttcttatccagcgcctcaaagcaggaattcttgctcacgaactccggaacaatatccttcatggcagcaacaattttcatctggtcataagtgtaacttacatcaatcagcttctggatacgctccttcacctcgtcatagtcatactcacgcaccgtggcaatcataatcttctcatgataggtgggctttgtaagctccttcacattcaagagttcctcgtagagcttctcgccatgacggagaccggtaaattcaatcttcacatccgtacgtccggaaaggctgatcatacgcttggcaaggtccacaatcttcaccggcttacccatgtcgaagatatagatttcaccgccgttgcccatactgccggcctcaagaacaaggcggcaagcttcgggaatggtcatgaagtaacggattatctcaggatgggtcaccgtcaccggaccgccacgctgaatctggtcacggaaacggggaatgacagaaccgttggaacccagcacattgccgaaacgcgtagtgatgaactgagtggcatggcctccctccttctgcaacttcttcgcaagagactgcacataaatctcgcaaatacgcttggaacagcccatcacgtttgtagggttaacagccttgtccgtagaaatcatcacaaacttctcggcaccgtatttcacggctagatcggcaacggtgcgcgtaccgaatacgttcacctggatggactcggaaacgttgtcctccatcatcggcacatgcttgtaggcggccgcatggaaaatatactggggcttgaactccctgaagatatcctccatgcgcgtggcattggagatgtcggctatgatggtctcagcatcgatgtcgcgccaacggtcctgaagttccagacggatgtcgtgcagaggggtctcggcctggtccactaaaataagcttatagggattgaacgaagccacctggcgcatgatttcactgccgatggagccggcggcgcccgtaatcatcacacgcttgccctccagatgagaggcaaccttatggatatctatctcgataggattgcgctgaagcaggtcctcaatctgaatttccttcaactgtgtgcggctcagcgcctgaccgttccactcgctcaaaggaggcgtggtcatcagtttgatgttgtgcaccagcaggcggtcagccatgccggacttcttcagttcctccatcttggcaggagaaatgatgatggtctgcacatcgcggtcgttcagcacatcaatcagcgtatcatcgttggggaacaccctgacacccatcatcaccttgttgataagctcaggttcgtccgcaatgaatccgcgcagacggtagtggttgcgcagattgacacgcaatgccttggcaatgttgaccccggcttccttggcaccgtaaatgaacacattggcactatgggtgccgtcgaagttcagcgcctcgaagaaagtcttgacaatcacacgggagcatgccatcatggcaaagctgatgatataggacatgaacagcacgctgaccggagccaggttaaactccaaatagctttccgtcaggacgctcgttatcatcagcagtgcatacgacaccgtcaatgacacaaaaatgcgcatgatatccacaaaggaggaaaagcgcagtacattggaatacgtacggaaaacacggaagaaaatcaggttgacagcaaccgtccataaaatggtcttgtcaatggtagatgattccagaaaaatgcttctgaaatcatatcggagagcataggccaacagactggatatgacgatgataaatacatcaattaacagaatagtccatatcggaagcactttcgcggaaagataccgatgaaaaaaatttcgcttcatttcgcttgacagttttgttttaggcgaggcaaagatacactattttagtcaaaacagacaataaatcgataaaaaaatgttataacaattatttatcgtctataaagaaaccatcccacctcccccgttttaacagtcagaaagcgggatagaaatagttttgccccggaaaatgcggtatccgctacatcagattacttgccaactcgctcaactggctgcgctcccctttcaccagattgacatgggcaaacaaattctggtctctcatgcggtctatcatatagacaagcccgttggactgactgtccagatagggttggtctatctgctgaatatcaccggtaaacaccatttttgtaccttcgccggcacgggtgatgatggtcttaatctcatgtggggtcaggttctgggcttcatcgataatacagtaggtttcgctcaagctgcgcccacggataaaggctaatgcctcgatgaccaattgttcacttttttgcatatcctccaagcgtttcacttcagaggaattggcagcgaactgatgcttgattacattcaaattatcgaacaaaggctgcatgtaaggagccactttctcattggcatcaccaggaaggaatccaaggtctttattggataaggccacgatgggacgtgccagaagaatctgcttgtagtcggtaagttttcccaatgcggcggccagtgccagcagggtcttaccggttcccgccttaccggtcagggcaaccagcttgatattcgggtcgttcagcacctcaaaagcaaagctctgctcggcattacgcggttcaatgccataattccttgtcttgttgacccgacaaatcgaatgggcaaagggattataacgcgcaagcacactgctgcggtcactcttcagcacaaaacattcgttgggacgaatgatgtccttaaaatcgaactcgttgatgtccagtccttctttggaagaataaatgcggtctatcagcgcagggtcaataccctcgaacacttcattcgacttttcgaatatatccacattgattaccttatcattgatgtagtcttcgcacagcagaccgatggaacgcgccttcatgcgcagattcacgtctttcgtgacaaggatggttttcattttaggctttttggtggaaagccagtccactaccgacagaatctgatggtcggggatgcgttcgggaaaggaatcacgtacccggggagagtccaccatgcctgccaccacaaacagacggcccaagccctctcccaatggcgcccctttggtgaacagattgtcatcggtaatcaaatctagctcacggacaaactcacgcgcattgaaattaatctgctcattacctttcttgaatttgtccagttcttcaaggactacgatgggaagataaatgtcattctcttgaaaattcttcaaacagttataatcgtgaagaatcacattcgtatcaatcacaaaatttttcttagctcccat

SEQ ID NO: 710 - DNA, 46413 bp, unidentified
  source 1..46413: mol_type = unassigned DNA
gaaaataaaatagattttttctcatttaactattgacatttattagctggactttttttattttatatatataatactagtatttatgttatgatattgcaagtaatttctttgaaaaattacaaaatattacaaaatattttctcttcaattttagtaaaatattatatgggtaaaacttgcaacaatttcttacaagtattacccatttttataaaatgtcttaatcaattaaattctctggtgtcttttcacactctaagcaatctgacaccttttggaatccctcagtactatccttcttgagaagtacaatagccgtctggaacaataatttgatatctgttctaaaactatagttttcaatatacatcatatcaagtataagcttatcctttggtgatgtattatattttccggcaatctgagcatatccggttaatcccgcctttgctctcagtctatatttaaactctggcaattcgcttgtatagcttttcacattttcaagcatctcaggtcttggtccaacaaagctcatatcccccttcaatatattgaacagctgaggtacctcgtcaagtcttgtctttctaagtacctttcccacctttgttattctgtcatcatccgatgttgcagatcggttttcaacatgttctttcattgttctaaatttataaacataaaacactcttccatattgtgttgcacgcttctgtttaaaaaatacggttccgccatctcccaattttattgcaatagaacttacaatccagattggtgaactaatcaccacaaatatcaaagagaatataatatcaaatattcgttttatcactctctgctcaaaagtcatattgctgatattgtgattaagaaatgatacatcatccagcaaataatgttctgatacattttcaaccaaatcgcatacatcaggatttatatatatatttatcattcgctcataacagaaattaattatatccggtttcttatcagaaggaatatcatatataaacactgtatccatatcttttatgatatcataaagatcttttcttctataatctactacccttttaatgcaatactgctttttgtaacgttttacagaagaagaaagctttgacaggtctgattcctgtgtagtaattacacaacagctctcaggatcatttattgcgaaaaatatgccattaccaatatgaacaaaaacaataataataaccacatggactacaattacaagtgccaaagtacctatatcagaaaacttgaaggcagaaacatttggtgttatcgtgttcattatcattaactggatatatgcaacaaaatctgtaaataatgttgctaataccaatgaataaattatcggcttactctttcttctacctatatcatatctgccatatatcgctgtcattaaaagcccaacaaatacatacgtaaaaattgtagttgccattgttcttgaaatatttaaaactgcaaaattatttctcgaaaacagaaagagaaaactgaacagtaatgataaatataacaagactttcaatataaaaataatagattgcattgtttttttaaaatattttttcatgttttttatcctattctgcaaatttttgttcaaacaagtttctggtattattcttcatacaagccaaatcatcttttgttatattaagaattcttaaaacacaagatttgacatcatgtcggtcaacatttattccaatgttacattcttctacaaatctacttgtatcaccctgaacagtattgataatcggaagaccgcccctaaaatacgaaatagacttcattgtaattccaatcgctaaatcttctcgtaagacattaattccaaaccaacactgatcaaaaatctcttgcaatttatctatctcatatactttaccatgatcaatgatttctatactattttttttcagaatatcaagaaattcatcttttctttcaccatcaccaattatatggattcttgttcttttatttttcgcaaactctgaaacaattttttcaattaatgatatatcaatgatattatttatactacctaaatagcataaatcaatttcttcttctgatactttcatttctatacttgtttctgcatttttcaatttcaaatatttggtttccattggaaggttaatcttttgtgccgacaataactccctataataatcacactcaatccatatttgatctgcaaattttaaattcttatttctgaaatttctccaaatatcgaatccccagtttacaatcatattctttgtcttaaccggcatagattccggccacatatcaaaaacgtccacaataatctcagcattattaatctttttatattttgccgaactttttactaatgaattatttggcacttctacatacaccaattctggtttacaagccaataacatgtaaaacgttttgtaactgaacatcagatgactcaatatcctgcttattgataaattttttttgtaagagattacatgcagttgcttactatttttatactcattgaaacaatacctctttttggtcatatgatcaaaatcagaggttacataaattacatcataaccttttttaacataatcattaacaaactttcctgttctcacattataatggttagtagaacttataaaataagcagtctttggtttcttattttcccacggcatagataaaacaagagccaatgaatacataaataatccaacacttgagtttaagcaaggattaaaatatgatatcacaaaaacaaacaaacagcctaactgtgctgctaaagctaataatctttgttctttgcaaaatacatcacgtaaaataatagtgtcaaaaacagaaaataaaaaaggaataataaaaattataaagcctataaaacctattttacttaaaatatctaaataaaaatactcaataaaaccatcatttatatcattggatactcccaatcctccgccaaataatggatgtttctttatattttctaatgctaacgtctttctttgctctctaatggccaaattctgaatttcagcttttttgtttgttagttcacttttatcatttttattatttttatcatttttattatcagaaggtttttcaacatttgtattagtatcttctatttctgctccggcaaataaacatctatttatggccacatcaaccaaatttactttttcagcgacactaaccataccaattaatacaacaactattccaccaacaaagcatgcccttatagccaatgttttaaaaaagtctctataaaataataatattaatactacaaatgcaaatattccaataacaaatgccaagtagcctgatcgtgtatatgaaataaacacaccaaaaatatctaacgatgcaataaatatccaaataattttacgtttattttctattaacgaaaatacaatgcttaaagcaaaacccgcaaaaaaaagtctgcttccagaattgaaaaaaatacgagtcacctttcctgtcaattctgtaatcatgcatatattgtatccatcaaaaaaatcatatgccccacgtctcatctctaaaggcatctgcagataaaatgccagaataatacctaacacagatacaactccaagtgacagagatagcattttcaaaaatgaaatcactctattttttttatacaaaactgccatcatcggaaaaactatcaaaaaatttaaaaaacctttgaaatcagacaaaagtattgttgtattttgttttccaacaaagcctctaatagcagctataaatataacaaccatgaaaacaagtacacttattaaatacttattattcaaatattttttcaaatccaataatataaggacaactgccgctaaaaccgatattccgaaaaaaatcattctactttgaattccaaagctctttgtcagttcccctgttcctaataatacaacatcaaacatatacaaaactaaactaatatatgttatcatctccattactattttgattgttttacttgatttcatgaattctccttattaattcaatgccgtctcttctaccctttagcatttgtttcatttttttcaacttatcatcttcgaatattagtgttttaaaaaaaaataatctatatgatttcttttctgcctttagatttattatatctttatgttcattcatataataaatccaatttctaaccatataatattttctcattgctgaatgattaagtgcagtaaatttaacgcctaaaatactatatttttttccttttcccaattcatggctaagcttaacactaccaatctgaagtattctatacccatgttccttaagcttagcacaaaaatcatgatcaacaaagtctataaaaagctcttcattaaatccgcccacatcattccaagctgaaaccggcaccaatgaagctgatgttatgcacttatccacctctataacatcttcattattcaattcacttttgaaatttctatcaacacactgtggacatagtgaacccaatttatgttcatctaaatacttattatattcttcaattatattatccgggcatactgagtcttgatctaaagtcaaaacatattcgtattgttgttcaatggcaaattcaaacatctgattcaaagctttagcaatgccttcattttttccattcttaataattgttatatttttccagttctttaatacacaatcctcaatgctctttatattatccgaaccattatccacacatattaccctatcaacttgtccataaattgatgatatattctcttctagtcttgcaacgtctggattgaataatgttatacctgctaatatcatttcttctccctgattcttttatttatacatttcagcataatcgctctattcttaaccatctcacccaaaggtaaatgagtcatttctgatgcattatttgaatgtcttctatataaaagaagctgttcgttacagaactcaacttttccaactctttccgacaacaatccaatccactgatcatgcattggaatattatccggaaaaggaattgcataatccagtatgcttcgtttaaaagccatacagcaacctatatatgaattttttatcaagtttctccaatacccttttttgcattttttaaattcaaaaaaagagcaaccggaaattctcaaattagcatcaacaatgcatgcatcatgcattaccaaagtacaatccgtatttccaaaaatatctagtactgttttaactttattatctttccatacatcatcctgatcgcataaaaaaataatatcgccttttgaatgtactattgcattttcaaaattcttaatcagtccttttcgaggaccatctataattctaattcttctatccttttcagccaaatcatcaacaattcttctggttctatcagaagaaccatcatctgaaataattatttcatcttgagaatcaagatttcttaatacagataaaatctgttcctcaatgtatttttcgccgttaaaagcagcaacacaaaccgaaatcatatttaacaaatcctcttttcttccataataactttatcattattgctcatacaagcaaaaacagaaaaaataaacggattatatgcaatttcaaggagatggtgttcagcaaatgacgctatagtcacgataaaaaatgctaaacacataatatatttctcattatccagcatctttttttgagccataaatataagcactataaccagcacaaaaacaatagctccatactcatacatgcatcttacaaatgaattgtctataaaaaaataattatctttagcaataatagacccaccatttccgtgttcctcaatatactgcccccataatttgatattatatgtcgacatagtctgggcaatatactttaatctatccgacagcacatcatttaatccaataatatatttattattaagctgatataaccatcccaatacaaacgaagctatcacaataaaactctcgcagatatctacaagtagccattcaatacgcttatttaatccaacccatttttttataatatagcatatagctattcctgtcaagaaaataagtagactggcaacagttgttctaccatcacatctaaaataaagaaaagctgcaatcagaacagatattaaagccattttccaataattcttcttttttatcacagaaaacaatactaaaataatgaataaaacatgagcacaaaaatccgtaggtgataaaaatccatatgcaatcctatttcccctgtatagacttggatatattaggttctcaacaatccctatttgacttcctagtatcgtaattaataaaaacggtatacataccattaggtagtcttttaaaattctatcaattggaatatcttttgctgctgctatcaataaacccacatacattaattcatgatagccacttaaaagcccacttataataaatggtgcaacaattgttgccataataatcagatattttctatttggttcaactaatattttacctataatatatcccagaagcactaccaaacaaatccatgtataacaacgtggcaaatgaatttgtatcattgttgttccccaaaagaaatgtataagtagaaaaatatatacaatagagaagacttctttattatatttttcaataaaagttttataattaccaatcaatagcatcaattatcaccattattttctatatattatatattcatgatatggaactctctcctcttcaggtggtggagtcatatagtctccatattcttcttccaatacctttttagcctgaacgggaattttggtttttacaccttcaaatataatgtcctcaacatcttcgaaccattccttctcataatatgtaacacagttatcccatatcaaatccccgacatatttgctattctcatatgaatagctatttgtaagcacatcaaacttatccaaaaaatacttagttcccttcacatgcgaatacaagtaaaccggaaatcttaataatcgtttaacaaaactcttatttgttcccattatattcttactctgtgcacaaccaacacactgcatccaaaatgttttctttttttctatttgttttttagcaccattcttaacatttcctaatgcatctaaaggataaatgtctataaataatcccatccccgcatcagatagtccatccgttttaaccatcttaaatctagtatcacaaaatctttgtaaattaaaaggataatcatcggctgtatattttgacatcaacttaaatggatatagttcttcttcatgttcattacaatatgctacaaacttatcatattcaggtcttaacatgcaaacatccatatcatcatcccaaggtataaacccattatgtctcatatatcctattaatgttccatacataattgaatacttaatatcattgtgctcacatatctcatctattttttttaaaacatttaaggtttctttatgcacctcttccaaactcagttccctattcatctaaaatctgcctttctacattctcgatatttacaataaccttttcagtttacatccaacatattacatagtcaagaactttgtacttttactctgcttttcttctgttctctttaacaaactccggcagcaccttaattccaataaacatgaccacagcaaaacataccaaatatcttacaaatatattatcaataaatataagatctactattgcaattatcacaatactaagtaaacataatgcaatacagctaactggaataatagaaaatctcattaatctataagaaataacaagatgtaatatcatataacaaatatatgcaaacagcgtagtatatgccgccgcaataaagccatatttctgtataaatatataattcgtaatgatattaattaccgccgcactcattgttccccacatgataaaacttgttttttgcttaaaatattcagatggaactattacattatatataaataatacaaaagcatctaaaatcatagggattgcaacatattttccaactgcatatttttgtccgcctattataagaaccaattctggtgaaattgacattactccaatagcaataatgaggaaaaaataacacaattgtcttgctctacttctgacagcttctatttctttatttttcatcttttcataaaaccatgtcatccacacttcagaaattgaatctgatataatagctaaaatcaatttgatattaccaacaagtccatatatgccagcctcagactttcctatcattttattaatcattattctgtcaaattgggcaagcaacacctgtgatattccatgtggaataataggcaagctgtattttattccaaacttccaatatttttttctaaatgtcggtcgagcacgtttatataaatcatatataatatatactgtaacaagtacagtggaaattgtaattccaagtacccttccaaatcctcttgatgaattaaaaatagtcttaattaatattaaagaaagacctacatttccaattgtgcttgctaaagaaaccttaatgtattttttatactcataatccaagctaattcttgcattatataaagtaactaccgcaattccaaaactgtatatcacaagcataaccaatgtaactaaatcaagatccaataattttgtcaatattttattaaaaacaatagaaataaacaaggcaactattaaatttatccaatatattcccataattgatgatgtaaaatcatcaattttaccctcaaactcatattttgcgcttcttattgagctatgcagagccattccaataaaaacgaacaagactgcttcatatgcggcaaaaaccgtatacacccccatctcttccgtagttaacaatctactaaatataggaatagccaaaaaatttatacctttaaccatgacatttcctatagtatatcctatgccagccttaaatactttactttgctttaacttcatatattttcctcaattaattttttgtttagtttacaactattagtgattaaggtcaagacttttataacgtaaatagcttccgacaattaatgtcgaaagctataatattatgatatatcatatcaattaaaacttaaatgtattctccagtgtctcccacttctgatccttatcacttaaattgattggtgtgccatcctcaagtgtgtatccgcttccgtcggcgcttcccggatactctccgacaagctgtggccactcgatgccgattgcaggatcattccatgcaagaccgccctcatctccaagatgccagaaatctgtaaccttgtaacaaaactctgctacatctgagagtactaaaaatccgtgtgcaaagccctccgggataaggaactgcttcttgttctcttctgtgagctctactccgaaccacttaccatatgtctttgaatcgcttcttaagtctacagccacatcaaatactgagccttttactgcacgcacaagctttgcctgtggatattccttctggaaatggagtccgcggagcactccctttgtggagcaagactgattatcctgtacaaatactctgtcaatgcctgcctcctgcatgtcctttgaattgtatgtctccataaagtatccacggttgtctccgtgtactgtaggctcgatgatgcaaagtccttcgattccacctacgtttttctgtactttaatctgtcccatgatttctatgtcctttctaaaagttaatctcctgcaaatatctgtgcagcgcatcctgccatgtagggagtggcttaaatccattctccacgagcttgctcttgtccagtctgctgttaaacggacgtgctgcctttgacacaccatactctgctgttgtaacaggtgcgactgtgagtctgtcctcagaatactctgtatggccaagcgccactgcctgcttaaagatttcctttgtgaaatcataccagctgatatatccgccctcgtttgtagcgtgatagtaaccgtatttatcagtctctatcatatctacgagcagtcttgaaaggtcgagtgtgtatgtcggtgtaccaatctggtcacttactactgtgagcttgtcatgtgtcttgccgacatttagcattgtcttgatgaagttcttgccgttcactccaaatacccatgctatacgcacgataaagtacttctcaagagtatttgccactgcaagctctccatcgagctttgtctgtccgtatacgttgagcggtgcatagtccttgcagtcaggctgccatggtgtggtgccctgtccgtcaaatacatagtctgtgctgatatataccatcttggcatctatcttcttgcaggcatcagcgatattctgagtgccgtctgcgttgattgcatgcacctttgcttttttatcatcatcctcggccagatctactgctgtccatgctgcacagtgtactaccacgtcaggcttaagctctgtaattgttttttccactgcatcacggtctgtgatgtcgagtgagacatatggcatctttgtaactgctgtgccatcgtctgctccgctgtactgtggtgctatatctgttccgattccttcgtaaccgcgtgctgcaagctcgttcattacatcgtgtccgagctgacctgcaactcctgtaacaaatactttcatttttggtctcctttatgcttaattattatcgtgactaacatcaccatatatgcgcaaaaccaccagacaaacgataataactatctattcgcgtacatcttctcatagtagttctggtactctccactgatgattgtctcccaccactcacgattgtcaaggtaccatttgattgtcttcttgattccgtcctcaaacttggtctcaggaagccatccgagctcattgtggatctttgttgggtcgattgcgtaacgcatatcatggcccttacggtctcctacgaatgtgataaggctctcaggcttgttgagctccttacagataatctttacgatttcaaggtttgtcttctcattgtgtccacctacgttgtaaacctctcctacacgtccgttgtggatgataaggtcgattgccttgcagtgatcctctacatagagccagtcacgcacgttctcgcctgttccgtataccgggagtggcttatcattaagtgcatttgctatcataagagggataagcttctccgggaaatggtatggtccgtagttgtttgagcaacggctgattgttacaggaagtccatatgtgcggtggtaagcaagcacgagtaagtctgctgctgcctttgatgatgaatatgggcttgatgtatggattggtgtatcctcatggaagaaaaggtcagggcggtcaagtggcagatctccgtatacctcatctgttgatacctggtgatatcttttaataccatacttgcggcatgcgtccataagcactgatgttccgatgatatttgtatcaaggaatacctgtgggttctcgattgaacggtcaacgtgtgactctgctgcgaagtttacaaccatatcaggatgctcttcctcaaataatttgtatacggcgtcacggtctgtgatgctctcctttacgaaacggaagtttggattgtccattacaggctcaagtgttgagagatttcctgcatatgtgagacagtctaagcatacgatacgataatccgcatatttgttaagcatatgaaatacgaagttgcttccgataaatcctgctccacctgttacgataattgtcattttgatttcctccttaatataactgctcgcggtattttccatcaagtacatcctttaagtactgtccgtactggttcttctttacgagctcatatgtctttaatacttcatcctttgtaatccagccgtttaagtaagcgatttcctcaagacatgctatcttgcggtgctgatgtgtctcgactgtcttgacaaagtttgtggcatctacaagactctcatgtgttcctgtgtcaagccatgtgaagccctgtcctaaaagctctacattgagtgcctttttctcgagatagattctattaaggtctgttatctcaagctctcctcttgctgatggcttaagattatttgcgtactctactacattgttgtcgtagaagtaaagacctgtgacacagtaattgctctttggatgctccggcttttcctcgattgaaatagcctttccctctttatcgaactctacgataccgaatctctcagggtcatctacatagtatccgaatactgtggcacccttaccactctctgcgttttcaactgcagccttgagtctcttgttgagaccgtgtcctgcgaagatgttgtctccgagaaccatggctactgtatcatcaccgatgaatttctcaccgataacaaatgcctgtgcaagtccgtcagggcttggctgtacctcgtaggtgaggttgacaccaaactgatgtccgtctcctaagagctccttgaatcttggtgtatcctgtggtgttgaaatgatcagaatatctctgatgcctgcattcataagcactgacataggatagtagatcattggcttgtcataaattggaagtaactgctttgatgttaccattgtgagtgggtaaagacgtgtgcctgaacctcccgctaatataatacctttcatgttgttctccttcaaactgaaactacgtgctgcatttgatgctttcggtctgtaaaatccactgacctgattcatcatttacctgcattataaaaggtgccccaagggcaccttcaagtactttttatatttttagcatttttcacaaaatatatgcttatattatcctgtttttaaatcattttcgtgcaataaagacacctgcatcctttaattatttactccaaggatgtctacctattctgcctataagaactttctttccgtttgctattctgtcatctttccaataaaaataaattcttaaatctgaatcattccttataagtttcagatgcggctcacatcttacatccgtatgtatatcttcatatgtaaacgaaaaccacaagctatctctgtgtgccggatccaaggaacacgctagtaatttagtagatatttcatcaatagctattttcaaattatttttatatctacaatataacttaattgcctcatcatttaaaacagccaaattcttagtaatctcttcagcatgatccggaaaattttgaatatgtttcatttcagcaagaatatcatctgcaaaacaactatctataaaacatgatttcatgaaatcgaaatattcgttaggattgtttattttcgataaaatttttcttctattaataacatactctttaactgatgacactgaatctttccactcacccaaagaaattaatatagaattaccagcagttttctcaaatccctgttttgaaagaatctctgctacaatccttctatcatcagttccaccagtcccaatagatgaatatacccaatctgcaagttctacatcagcctccacttcgatcccccatatgttatcattaaatattatactctcattaattttatcacaataggtatttatatcacttaatttctcaatatcatcaactctaaacgacatatttttcttatctgctgtatatctaaagctttcttcttgaagtctattgtttacttgcattccctctccttattttcaataattccctcaaatcaatacttttctggtcaaaaaaatcttttggccaatcagataattctccatttttatccaaccatattttttttatatctatatctttatctctacgattaaaaaagtccactgttacatgatctgtttgttccatatacgcagcctgcaaacgtataccatcaataacgtgttcgctatgagtctccactataatctgtacccctgataaagatattatttgtaaaaactttcctattctgctttgagccgcaggatgtaaatgtgcctctggattctcaattataaatattacatttttttttgctgaacaccacaatcccattgcaatcactgaaaatacatagcttattccaaagcctgtcattgttggaaaaacggcataatctacaagcgaatttttatataatatatctgtactagccttattaagatctgtcttcagagatacctgaacatcacccaatactgcatccatccatgcttcaacctgatcagaaaacttgatagaatcaatcgcacgaacactctctggaacgactacattctgcatatcagccctttctacaatatatgcagcattagagccatcttctataatactctccccacccgctgggtatgatattctaggtccacatctttccgcattcaaataaaaaatctgactatcaaggccattactgttttttatattgaatggtaaactaagcggtgacaatctatctatgctatatataaaatctattttattattttcattataaataataaatgaaaagtccccttcacaattatccgacggattctgtgctctcaatacacttggattacctatttgtattcctaacgcattattaacatctacagaattctctttttcttttaatgatgcaaaagcaagtaataaagcttgtatagccgtagattttccagctgcattgactccagtaaatatattaatagcatttaactcaattttggcatctgagaaacatttaaaattcttaatatctattctatcaatcattatattttattaaataacccccttataatttctatagcttttattatatttttttttgatcctgtagatgatgtgatcaccttatacaattcgccatcttcatcaatagccgctacatacaatttacgtattttttcagctttcatctgtatctcattattaaaataattcatattatatagcaccacagcccaactggtaaataaagctgtgttaattcttttttgtccaattttacaaaatgaatacccctgaagtatcatatgcgcttgtaacataattaccctaaactcattcaatattgattccaattcactttttttgtacgtatttaataataagaccatcttatccatagactttgtcaaaccatagtactgattaaagtcatgtttctcccaattataatatgaatttataactatatatctaaggcataactcttgagcccccattctcacatcgtttacaccccctaatgttgccttcataaattcatcacatgatgacatgttctttaacaaattacgtacttctgatgtggccaaagtatttcttatctcctgcggattaagaggaagtccacctgtattcaccctgcgaaacacatcaaattttaccatatcagggcatactgttcccaaaatattaacagaaagtgtcgtgtccaaaacgtacgatttatacttattatccaactgactaaattttttcccatcgcagcttgataaatattccagttttcttaactcaaactcatcatttagaaaagaatgaatagctgaaagtctctgcaaaccatctatcacgctctttgttccatcttttttttcatccaaataaaaagccggaatagggattttaagtaataacgactctataagcaatgatttccgttgattatcccaaaccaaatttctctgatattctggttgcaaatccaaaacaccatttgatatccaatactctacttgaaaaattgtgatcatcttttgctctacacgaatatcattaacattataaggtaattcattctcctcaaaattatcaatgccatcttctattccaatatattcttcttcgatttgtttaaatttattccaatattgttgtatatcagccatcatccacctactataaaaacattagatacattattataatatcatattaccttattctacgctaccaattattttcgtgcaataaatacacctgcatcctttgtgatatggaaccctccctctgtcttctttcttacaaatgccgcaaattccttatagcggtccacaatatacctgttctggttgccgtggcacgaaagcacatactctatcacaggctctgctttttctaccacaagctcatcctcgtatccatgccagcttaccttaccaaagtattttccaagtattgcctcaccattttctttaccaaattgctcatacagcctttccgctgacagctctatacggtcatcaaactgctgcaccaggtcgtttatttccttcatatgccgtgagctgtatgtactgcacacaaacacgccaccgggctttagcacccttagaatttcactgcacacggcatccagattgtcacaatagaacagtacatggtctgctatcacgcagtcatacgatgcatccggcttatacagcctgtgggcatccatcacctcatatgtgaagcgcttgtcatctgcgcctacatttctcgtcgcatcccttaccatgccatacgatatatcagtcagggttatctgcatatctgccggtatcctgtctatgttctgtgtccagagagaggcatcaccacagcccacctcaagcaccttttccccctcaaaaaagctgcactcatcaaatacccagctaaaccagctcaccggattcatcgagaaatccctgtgcagattgattctggctgatatatttgaagcatccctgtactgctgctttagcttttgctccatctcgtttatattaaccagctccagcatatgactccagtccacgctttgcccctcgtctattacctctgaagcctcctgcaatgccgatttcataagcttcatctgctctatcctctcctccacgagaccaagctgcatgtgaagcgactcagacatgacattgctgtccgtgtttctgagtgtcatctccttgatatcatctagggaaaagcccagatatttgaggaacagtatctgctgtagacgcgcaaagtcgtcatcattatagaatctggctccgttttcgtttacgtaggatggttttaaaatattgtgctcgtcatagtacctgacggtcttttttgtaatatgcgctttttttgcaaattctcctgaggagtagtagccgggtagtttcatcgttgcgttgcctttcctcttattttcttacttttgaacttcctatatctaagtatatcataattttctaacataagatttattaatatttacttattttcattgtttctgcttgtttttccggaaaatgtacttataattataatatcactatgcaacaaggagaaaacaatgaaatacgattatatagtagtaggttccggtctctacggagccatcttcgcccatgaggcaaaggccaagggcaaatcagtgcttgttgtggacaagcgtcctaacatagcaggaaatgtttacaccgaaaagcaggagggcatcaacgtacacatgtacggagcccacatattccacaccaatgataagagggtctggaactacatcacacagtttgctgagttcaaccgcttcacaaacagccctgtagccaactacaagggtgagctttactcaatgcctttcaatatgtacaccttcaacaagatgtggggtgtggtgacaccggaggaggctgctgcaaagattgaggagcagaaaaaggaaatcaccggtgagcctaaaaatctcgaggagcaggctatctcactcgttggccgtgatatctatgagaagctcgtgaagggctacactgagaaacagtggggccgtgattgtaaggagcttccggctttcatcataaagcgtcttcctgttagacttacctttgacaacaattacttcaacgctctttatcagggtattccaatcggtggctacaccaagatggttgaaaatctgctcgacggcattgaggtcagactaaataccgactatcttgagcacaaggctgagcttgattctcttgctgacaaggttgtatatacaggtccgattgacgcatactttggctttaagctaggtactttagagtaccgctcagtgcgctttgagaatgagaccctcgatattcctaacttccagggcaatgccgctgtcaactatacagaccgcgagactccatggacacgtatcatcgagcacaagtggttcgagttcggcaaggatgaggatggcaatgacctgccaaagactattatcagccgtgagtactcttctgagtggaaggccggcgatgagccttactaccctgtaaacgatgagaaaaacggacagctctatgccaagtacaaggagcttgccgacaaggagaccggtgttatattcggtggacgtctcggtgaatacaagtactatgatatggatactaccattgcttctgtacttgatatgtgtgataaggagcttggctaatagtcaggttccccacaaaatgctttgtttatgtcatacaaaaccgcccatagcatatcaattttgccacgggcggttttatttacattatttttttccggccagatttatctcagccgcaggaatatgctccctaagacactcatatccatactccttcgaatacgcatatatagccggaagctgtcttgacagaaagagcgccggtgcttctgtcaccgagtatgcgccacagtgcccaaactcaagaacatcaccaagctcaagcttcttaagcttcacctctctgaccagcacatccgccactgtacagaggcttccgcagagcgtatagtctatgtccggcaattgtgttaattccacaccggcagctctatatatactaatcggcggcacttgcatagccattctctgtccaaagtaattcagatggtggattcctccatccagaatcgcataattggcatcgcctgtcgatttaaggtcctttacctgtgtgtagtatttaccgcatgaggctgcaaggaaacgtcccatctcaatgccaagcggatattccacagcaaattctctaagcacctctgcagcctcatcaagtgattgtttttccttttcctgccagtcatcctcgaaatactccacacaaagtcccgggccatactctacaagctgtggctcaaagccgtatttttcttttaatccggtcagtgcagactttattttttccaagtccttatttattttgcgaagactcttctgtgtgccggaatagtagtgaatgcctattaccgtgatgcccttaaactcatccggatgtgaaatgatgtattcaatatcatcaagtgacatgccaaactggttgccacttgtcaggcgcagtatgacctgtgctttcatttcagcaaattcggcttcatgcgcaccttcaggcatacattcaagcatcacttccgatatcagtgtcgcatgtcttatgctctcacaggtcagtataccggctccatatgaaactgctcgctctatatcgcatttttccttcatcacgcctgaatagatgatgcactccggcttcacacctagcgctatacatatctcaagctctcccgggctgcacacctccacatggtctaatccctccggcagcctgtgaagcagaaacggatttgcctttatcgaaaaacaaagtggtatcctacgtcctcctttacaatcaagagcagcccttatcatggctgctctcttcgcaaactcgtccgtatcaaatacatagtacggtgtctgtctcatatgctttattcctccacaagctctttcacaagcttctcgattgcatcaactgagttgaaattctcaggaaccagatcctttggtctgattgtgatgtcaaactcatcagtcagctccgatacgagtgaaactatatcaaatgactcaagaattttgtcatcgatcagctttgtctccttctcaaaatccacatccggtcttaattcctctaaaatctctaaaattgtgtctctcattttacatttcctccagttttttcatatcatattttccgtttggaagcttaggaagctgcttcagtttcttgattttccttggcaccataaagcccggaagctcgtccctcagtgccagcgcaaggcttctcctgtcacagtcacctgtgtagaaaagtatcagcacctcttttgctttattatatataacgcagctttctgcgactccatcgaccacattggcggcatgctccacctcgtcaagctccacacggtgtcccatgtgctttatctggcggtccatacgtccacagaaatgaagtatgccgtcctcatcgagccttccgtaatcccctgtgcggtacatccgctcaggataagccttgttgagtggattgagtgtaaatgccgcagctgtcctctccggatcattataatagcccagcgccaggattggtccacatacgcatatctcgccctgttctccgacagccggctcatttccatgctcatctatcaggaaaaccctgtaattgtcataggcttttcctataggaagcacctcgtcctcttccaccagatgatccacactataatacgtgcacgaagcagttgcctctgtcggtccatattggttcacaaaatgcgcttccggcagattttcctgccattttctgagtaccctgcacggcatcactgagcctgagaagcagatttttctaagactcttaagccctacttcctcaaatgccccaagcgatgtgaggatggtaaatgccgaaacactccagccgacactgctgaccttcttatcattcatgtaatcaaacagggcatttggctccataaagtactcttttggaataatcgctgtgctgcagccggtctttaacggcagataaatgtccctgattgccgcaatatagtcaagcggcgactgattgcctagcacatcactttcctctatatgcatcacatcacaatatgcattgatgtatgtcataagtgacagatgcgatgtcatgactccctttggattgccggtggagcctgacgtgtagatgatatacagtgggtctgtcatggacatctgcctgcggactacagcgagcatatcccgtgagctgtcatctatttttcctgcacagcctgccacaacaccaccatctgtatcgttctcactatccgtcacagcgtctcctgctgattcactgattttacaattactatcagcgcacgccacctgctcgaagcgcgatatatcctcagcaataaatatctgcggtctatcgaaaccttctgcctttgccagctcatccactatgctctccacatgctcaaggctttccctgtcagccacaatagcccttggacacagattttcaagtattttttcaattctcttgtcaggaagcgatgcatcaatcggcgcatacggtctgcctgcatataccactcccaggaagtatgccggtgttaccattttccttccggcaaatactgcaacaggggttctgtccactccaagctgttctatcagatatgctcctgtatttcttgctatatcatacacctgcgcaaacgtaatgctgcattcagtatccgaaaatgcaggcttgtcagggtatttttctactgtggcctcaagccactccagtacgtttttcatcttagtcctctttcatgcattaataaacgttgccgaaaaaaattatagcacataacatccgaaaaaaatgtcatgtgctatcgaattaagaattcttaagaaagacttaatatttttctgtatgtttttctatatttgattctcctattaaatatatcggtctgtcctttgcctcgagatatagcttcgacagataaagtcccaaaatgcctatgctaagcagttgtatcccacctataaaaagtatgataacaacggtcgaagcccagccggctaccggatctccgaatacaagtctcctgataatgataaagagcattgcaattattgcgacaataaagctgaacactccggctattgaagccatgtatagcggcgcgttggaaaatgccactattccgtcaaggctatacaaaaagagctgccagaatgaccactttgtctcacctgccactctgtttacattctcaaactcaagccacttcaccttaaagcctacccagccaaacaatccctttgaaaacctgttgtattccttaagcgaaagcagtgcatccacgtatttcctgttcataagcctatagtcgcgtgcaccatcaaccatattggcctttgatattctgctcatgagcctgtaaaactttctcgcaaaaaaagacctgatcggtggctcccccttccttgtcaccctcctcgtgcctactgcatcataaccctctttcgtaaggacctgatacatctttggaagcatttccgggggatcctgaaggtctgcatccattattgccacatattcacccaccgcatgctgcaggcctgcatacatagctgcctccttgccaaaattacgtgaaaaggatatgtatttcacaccggaatcatttgcggcaagctcctttgcaacatcaagcgtaccatccatggagccgtcatccactataatcagttcataggacaatcctgctgcctcactctcttgactcatctgattaaacacctgagttattttattataaaaaagaggcagagcctctttctcgttaaagcatggtaccacaatgcttatcttatttttttccataccagccaccctgcatataatatcaaataaataaaaaatccgattgctgctcctgccgtatttgtcacaaaatcatcaagctgacaatatcccctgccggtaaccagctgcgtgtactcaattgctgcgcttataaaagcaccaacaggtattgtaaaccatctcatccaatttttaaaaaccaatggaaatataagcccaaatggtataaacaatactatattttctataaaataagcgtgcatctgaagtgtcatgccccaattgctccacagcaccatatcggcgacgccggttctgcttcccggctcccttgaataatacactatcattataagcgtatacatataggccacaaaggtgccgcagaacagcatatgccagattttgcccactatcttttttcttctctcatctgcctgtgatacctctctcattgtgaaaagatatcgcagcagacacacaaaaatatacatcgcaatgcagattaaagccaaatataccgctgacggaagatatttgaacttttcctgtatgtctcttattatataatcctttaaactcaatgtccttttttatgctccttgtaggcacgaatgaactccagctgtcgttcatcgtcctttttctgttcgtcatcagacatatgactcactttaataattatacacaatattatgccaattacaataataccggcacataatataaaaataattaagatttcaggcatagactatttcctccggcagaatttaattactattctctctacagattaaattatatccacttaatttatcttaattcactcatttatgaaccctcataacagcaaaagctgcatgatattctcacacagcttttgtatattacgtgtattatctttggcattaacctttattttaattttgcaacgaccatatccacatatttctgacagatttcctcgctctctgcctcaaccatgacacggataacaggctctgtacccgactcacgcacaagtatacgtcctgtatcgccaagctctgcagtaacctggtcgacagccgcctgaacctcaggattggcaagtgcttccgccttgtcagctacgcgcacattttgaagcacctgtggatagatattaagcccctcacagagctggctcatcttctgtttcctagccatcatgacctccatcatcttaaggctggtaaggataccatcacctgttgatgcatacttagagaagatgatatgtcctgactgctctccgccgatgcggcagccgttctgctgcatgtactcatatacatatttgtcacctactgcagtctttgcatagccgattccaagctcatcaagggccttatagagtccaaagtttgacataactgttgtgacaacagtattgttatcgagctttcctctctctttcatgtactttccatagatgtagaggatatggtctccagtgattacattgcccagttcatctacacagagacatctgtctgcatctccatcgtatgcgaagcctacatcaaggccattgtccaccacgtacttctgtaagccctcaatatgtgtagagccagcattattgttgatgtttagaccgtttggctcattattgatgacatagcactttgctccgagtgcctcaaaaatagactttgccatgttccatgagcttccgttggcacagtcaagacctaccttcatgcccttgaatgagtagacaccaagcgatatgaggtatcccatgtaacggttacggcctgccacataatccactgtacatccgattgcatccttatgtgcataaggcaactccttccactcctgaccaaacaggcgtagcttgccgtctatatagtcctcgacaaggagaattgtctcctcatccatcttctctccattgctgttgataagcttgattccattgtcatagtatggattatggcttgccgaaatcatgataccacagtcaaaatcatcggttcttgctacatatgccactgatggagttgtggtaacgtgtaatagatatgcatctgctcccgatgctgtaagtcctgatacaagtgaatactcaaacatgtagcttgaacgtcttgtatcctttcctattactatctttgccggctcatcgagctgcttctgcttcttaagctctccataataccagcctaaaaatctaccaatctgatatgcgtgttctgctgttaaattgacattagcctctccacggaagccgtctgttccaaagtattttcccattgtcgtccccttgtgaataaatttttcttatattatacacttaataaatgtgtttgtgtagtaaaataagcttatttgttaaattattctacttcataaaatcaattgtttataaatataataaaaccaacatatgtatataaaccaaagctacatagatatcttatggcactccatataatatctcttctcattcgcttctccaattgagaatgtctttctgggcagcaccccgcccgcatttattgcagggaacaatgtgcttttgtctatcgactgaagaaaaattccacatcccttagtctccttaaccagtccgtgaagtgcctcatcaccatggatatagtctatttccacattgccatgtgtctcaagatacttatctaaaataccctggagtatctcaaccgggaggcggtcacctctatttgtgatattaattccggaattctttattgaggtagcgcctgattcaacatactcaaatactatctcatcaccctcagtgctcgcaagtccttgttttgtgatttcagcttcgaaaaacgacagcatgtcctttacatcaacatttgtaagcagtctgtgaataggcttaaactcaagcgcctcactgtgcagattacagatttccacaagagcatgccttgcaggatgagttttcaactgcttttctgtgaattttccggattttttgatattttcccagcaggtcttcgctgttgcaagggaatggtttccatcacctactgcaaacaaaaagcctccacagctattctgttttgctgcgaatgcctctgccacctgctttgctgcctcaccctcgacagcatagcctcgaatatgtccgcctccctgcatgagctctgtatcgtaaagcttacgaagagtatccctgatggcataaacatgctcgattattccatgctttacagctgctatatttactgcatcttcctgtgtagcaccctggcatccatcaatcttttgcctgtctataggatcatcaacaagcagcataacatgtggcagctcaatagctgcattctctcttattttgactctcggaggtatacgtgagattactgttccctctgttgctcttatgagagtcttctttttcgggtcgaaatcatagtcatccagatcaataagtcctactattccaagacgcacccctgactccgtagtacgctcaacaagcacatagccatctgccaccgcttgctttaaggttccatctgtgagatatgtatccatagtggtattaatatatttgattctctcatcatcagtcattgaagcatattttgttttcctaccggtttctttgtcatttttgacactatcccctgacgaattgcaatcattctcctgattctcaattgttcccagatatatttcgggaaacaccacattaagcgttgacggtgcatcagccacatacttttccaccgtatcccaataatctgcctgacttgtgaactggtcacaggcgataactgaccattttttcatatctataccatcgtttggcaaaagaatatttgccggattgaaacaatttgacatatcaacaattctcctttaaatatacaaaatatataacaaaaatccgctatactctatagtataacggatttacttttatttgcatatattaaattccttttgttgttagaattcttccaactgcatcatctaatttttctgccggtatctcgccactgttaactgcagacaacactgcattataactgctctcaaagcccgttgaaacataaagcatgctcattcctgccttaacagctgccacagccgcctcatcctgtgtacataccttattaagagatgcgtctgataaatcatctgtaatcaaaaggccattaaagcccatggtagttctcatatagtttacggcacctgctgatgtagagcatggcgtggtttcctctcctgtcacactctggcaaatcacatttcccatcatgactgccggaacacctgcttcaattgccttctgatatggcacaaaatccgatgcctcaagatcctccagcttatctgtcatccagagcattcctgtcgctgaatctgtagtagcctttccttttccgggaaagctctttgctacagaattgattcctgcaccattatagctgcttacctgtgctgcaacacagtcacctacagtcgctgactcgctgccaaatgcatatgtatcgttatctgcattatcaccatatgctatatccgctgtcggcccaaaattcatattaaggccattggtagccatatatgagcctatctttcctgcactgctgcccgctgcgtcagcatctccaagctgtgatggtgcctgctgtgcctcatatccattagctgaagcaagaggaagtctttctccaccttcttcatcaattgcaagaaacagattcacgcccagtcgctcctgcgaaaatgactgcagactgctcatcatctttgtaactgcagcctcacctgagaaattctcctgtctgaaaacaaaaccaccaagaggatatgtaccaatagctgcctttgtcttgttaccggcctgagtgaactgtgatacacctgtaatctcctcaggtctcgtaatgaatagctgggctaccttttcctctgttgtcatagaagacagctttgtcttgacagaatctgacggagtaaatgccggtgctgcctgctgtccatcagcttgtacctgctgagttccatccgtctcctgagtaggatgctgtgtctcctgctggctttctgttattttcttattcgcattattccccggcatcacaaaatgcactgctccaaataccagcacaactatcagtgcaattacttctattgtgatgaggtacttatctccattttgtctgaagttcatatttaatccccaaaatttgtatttgttaaatcgttattaggtccgcttgcttttcctgataatgcactgctgtattcgtttacagttgcactaggagtatagcctgtatcaccttcaaggaactgatgcactcctgtagccatgtctgcaagtgtagtaggcacctcaacccatgcaccatcaacctttccaccatagaacacctgtggatatgctgtagaatcctctactgtatagtctgcaagatttttaaatactgaaagaatctcatcagtattatagttagtattgacatgtccaatcaggtctgataccatcttaatctttgccgctgtattcatctgcttagctgattcaaaaaccttaaacagcactgttctctgtctttcagcacgcttatagtctcctccggctgtataacgtattctggaatacgcaactgcctgagttccatcaagtgtatatgtgccggctgaatcaatatgggatgagcttgttccacgaaccttattgacctcatcaatatatccgtttatcacctttgcctcagatgcatcaatatcctgtacaatgcctcctacctcatctataatttcaccgactgtattgaaattgactgtaacataattctttatgtctaagtccagatttttgttaagtgtatccactgcaagctccggtccgccaaacgcatgtgcatgtgtcaccttctggtatccatgaccatcaatattcatcatacaatctctgaaaatagataccatgcggattttcttagcatcatgatcaaccctgactaccataatggaatcggaacgtgttcctttatcaagctgatctgaacggctgtcaacaccaaataacgcaaactcctcaatacctgatttgtctgtagtgctgtcatcctcagtctgagtatcggcttttgtcttaactgcctctgtacccggctttatgcctttaacttctttattcttaacattactgctgttaacctttacaagtattatcgctataatagcaataagtacaatcattactgccgtaataattatatttttcttttttttcatctgcacttattctccgtcattcatatgtgtctgcgcctgctacttttcgtcatcgtccctgccatagtaattaccatagtaattaccataatagtttccatagtaatgaccatacttagactcctcaaacctgcacttattgagcacagctccaagaatcttgactcctgagtcctcaagtgtacgctttgtattgatgattgcacggctgcttgtaatattctgggcagcaactattactgctccgtctacattctttccaactacggccgcatcaatcgcagctcctgtaggaggagtatcgacaagcacatagtcaaagttcttctctccaaactcgataagctctttaaactcctctgtctcaagaagctctgtaggatttggtacctcatgtcctgcaaagagaataaacactcctttgatgtttgtcgcatatactactttgtccaaagatacctgacctgagagataatgtgagagtccgtatatctttccaccgctctccactttcgctctgagtcgtcctacaaggactgacttacgcatatcggtatctactacaaggactgacttcttagagtccgccatcgaacgagccagatccataactacggttgtctttccttcatttggcacgctgctggtaacgaggatggacttcacgccctttccactgaaactgatgcttgttttaagagctcgaagagactccttcattgtatagctctggtcttttatctgattaataactattgtttccattaaactgccctcttcttactcttgctatcgtctgatttagatgattgagttttcttcttttttcttctctttgtcttggctccatcatactctgtctcatcaacaggaagtgatgcaagcaccttgaggcctgttctggtctccatatcatctgcattggaaattgtatcgtcaagcatgtatccaagtacaactatgccggtagcaagaaacagtccgagtacagctcctataactgtattcttaaggatattattattcaccggtgtctttgaagcatatgctgtctggataatctttggctgtgactgatccatattgtcagcgatatactgtgatgaaacctttgcaatctcatctgccactgtctttgaagcttccaaatcagtgtctgtaactacaatcttgagcacacgtgtatctgtcggattctctattgaaaccctcttgctaagctgctcgtatgtctcgtccatatccagattgtcgattacctgtgataaaactgtcctgcctgtgataacgtactcatagtcgtttgtcagactcgagcctacctgaatatcagcaagactggtgatagatgttgacttggtcagtacatacatctctgcagatgcctcatactccggtacaaaagtaatcttggagtataatccaaatactgctgcaagaagcaccattgatgccacaagtgccttccagtgcttcactaattcgtgaaacagcgctactaaatcgatttcaatttcctgatctcttattggttcgttgttttccattttcctaccctttacaaattgtaacattatttttcggtttaatcctatgttatattactacacttcatttcttttgtctatttttagaagtcacaaaaaaaatattaagaatatgtcatattttgtaaataattatgcaatataatagaaaagtgccgtttccggcacttttctttgttgtattttcatttgctatattttatttgttcctgttctattgttgctgttctagttctgctgtggctgttctgatggttcagtcggtgccaccggctgtggttgtggttttgaatttactgtaacggttattgaactgcttgcgctattccagcctgccatttcacctgctatagctgtaatctgtacgctaccagccctgtaaatggtcacatttccggcgccatctactgacgcaatcgaaggatcacttgactggtaagaaagcgctgctccgtttgaagcacttgctccgagagaaaatggtgcatctccctctgttacagttttattaccgcaacctattgtcacagatggtgtctggtttggctgtggctttgcatttacagtgattgtaattgtcttgctgccggccttatagcttgtagtagcctcagacttgacagtgattgttgcagttccgacacctgctatcgtcacattaccgttctcatccactctcactacaccattattatcacttgagtatgtgagctttgcattatcctctgctgtcacaccgagattgaatgctccgtcgccctctgtcacattataagagtcagctccgccaagactctgtgctttgccggtcaccttgtcaacaccaccatatacaattactttttcatctaatgttacattctcatatagcttctttgcagctgaataaggcatatttatgcagccatggctgccgctgtacaggtagatatttccaccgaaagtacttctccacgaagcatcatggaagccaattccaccattgaatggtataaagaaattaacccatgacttatatccgtctccccttaagtatctatccttatctcttgagaaaatagaatacactccggtaggtgttccgtgtccttttgaaatacatcctgtaacacactgacttgatacaacaagctctccattcttgtatacatataccatctggttggtaagatccacttcacagtaattgccaccatatgtgacatattcacctgtttcttcttcctttgcctcactgtaaactgcttccactgttgcagactttttattgtttattgcctcagcaatcgcctcatacagcttgtttccatctacagtctgtcctgatgatgctacaggcacatttattatacttccgcctgttgtcttaaactgtcctgttttcttctttgacacatcatgctttttggctagctctgtacaatatgtagccatattctcgccatcaagcgaaactgacaatccgtcattgtccactataagccactgggctatctgatcctttcctacagcctctgtagcagcttcacctgttgccggtgtgaaattacatgtcaccgtcacatcaagatatgcattggcttcttttaaggcattctttacctgctcgctgtctgcagccttttctccatcaacatatcctgttgtggatgtaagctccaccttatccttcagttcctttacagcacttgtaagatttgtagctgcattgtcatacacaggcgcatctcctgatacaccatcaacaccctcaaactgtcctgcctctgcattgtatgctattgtagcacgatatggcaaaattgacctcatatcaaaggtctgtgtatctgtctcagtcgtcttttgttcgtcatcctttgcctctgcatccgtatcactctgtgccgttgcatcagactgtgactgtgtttttgcagtgatataagagtctacaagagcagtctccagctcatcagacttatccattttaaaaagcttcacctgcttttccggctccttatccttattggccgcatttatcagttcctgaagatttgctttgtcattatacttaagccctaaatcctctgctgtcatatcaaatgatgcatcgtcaagcttcactgatatcttatacttgcctactgcagtctttatggctttctttgcctcgtcagcagtcattccacctacatcaactgatgcaagcttgtacttttcagggaatgtcttatatgctttctttccacagcctgacattcccaacgccataagcacacaggccaaaactaccaggagttttatatttttcttcttcatctttgtcctctttgtcctctttatcttaatttttatattattctcacagcaccatattttatcactttcttatatatgcctcaagtgagatttgtcacatattttccgattatttaaacatattattcatcattatgataacaaaaagcttgctaatgacgcacaatatgtaacaggcgtataaaatagttctgataaaccttatcgctcatatgcattttattcaacatacaaaatactttataattcttatttacacatttatacatatctgtattctttttttcgatttgactgacaaacagcttcatcctttttctaagctgttttttatcagtgtttctaatcaggcaaagctgcaaataatcgttgataaatttgcttgttttatcaaaccacagctgctttccgcctatactaaagtgctccgcatcccggcctgcctcaatcaatttcatgataaccttctcataatggtcaagcctcttcagtgagctttctatcgaaacgctctgatttacgtcaccgactctatactcataaagtgccttatcatatgcatagatactttctgcatatgccattgggattattgaaaactcctgatcctcgtaaaataccccctcagagagtgtcagtcctgtatttctataaaactgcgtattatatatcaccccatgcagactcagcccccaccagaaatcatacagatgctcgtccacatatcctgcattatatggtccaccattttttgttatatatttatcgtcgtatggatactcatcagtattttctctctgcagcacatatgatctatagctcatcagcactgcatctgcgaaattctcatgtttattttcattatctttaagataacaaatagtttctttcaacacatcagtgtttacccagtcatcagcgtctactaccttaaaatagcttccttttattatttttactccttcattaattgccgagccatgaccaccattttctttattcagtatccggtacacgtcaggatatttatttacatatttttgtgcaatctccacactattatcggtagagccgtcattcacaacaataatgtccagcatatttaaaagagagttatcatcaataataaatgatgataaccctttatccaaaaactttgccgcattatatgtcggtattattattgatagtatctttttattttctgtttccatatcctatctaattcctgtttctatatgttaatttccacttatatcgctgtctgtcaccatatttgacaatggtagtcagtattattttctgtatagtctgtctgctctgccaacccttttggcaaactcaagcagctttgcaaattgattctcgtaaaagctgttgctcacatgcagcttattaaacagccaaaatactttatatttacgctgtactgcctcatacataagtgcacttttttgagcaagcttcatgttaaactgctctactatcgctctgccggattgtctgtcggtattttttatcaaagctatttgataatagcttgtgattatgcccgacgtctttctgataaagtgttcctttccaccctgtggcatttttgcaaagctcttctctgcctcaagtacattaaatataacctgctccaaatccggaagacgcttcacctgacttgctgctgaaacactttgatttacatctccaactctgtatacatacaactcttcctgaataaatctgacagtttttgcatacgaaaacggaacagttgcatactcctggtcttcgtaaaatacatgctctgtaagcttatatccaagtgctttatagaaccctgtgttatatatcactccgtgaaatgatagaccatcatatacatcatcccacatatttactatatcctttaaattgtactctcctgtaaaatcaggcacactcacatctgccggtctgtactcatcctttgatatgtcataatacctgaagctttgtatcaccgcatccgaatctacatgctcgagatattcaaccaggtgctttagcgcaagcgtatctacccagtcatctgcatcgaccacctttaaatactttcctctcacatgctccacgcctgtgttgattgcagaaccgtgtccaccatttgttttatttactatgacaaaagtatccggataccagtccacaaatttctgtgccacttcaacacttttgtcaggtgtgccgtcatttacgactatcacctcaagcttatcgagtatagccttgtcaatatctatttcctcaaagcggccctccgttgccattttacagttgcgctgtgctgtctgtgcatctgtatccctgcataccagaaatgacgacagccccttattcagaaacttttctgcattatatgttggtattatgattgataatattttactcattaactgttctatccgtcctgattactattattaaaaagagtattgcatactcattaacgcctattcatgaaattaattaccacgcagtctgctatagacccatgctgccatcggaaatatcttaaaacctgtttttctaagcatccagacgctcttcctgctgcacgcccggtacactcccgggtgctcctcacgcagcatctcgtcaaacttcttcatatgctcaacgttccttgtatcattgccctttgcaagaaatatctggtactcatcatcgactgcctcggctatgccgcgctcaaggtactgcttcttgtaggtctgcagattgccatgcacgttgttgtactcaaacagtgcatcaagcaccttaaggtgctggtcatgacgcttgatcatcatctttatgtccacgctctggccactccttccaagtctgtactgatacagcggcaggggcgaaaacgtgatgcttgtgcagtatggtatagggtagagtatatactcctggtcctcgtagaaacagtgctcatccatacgaatatcattcttctgcaatacatcagtacggatggtcatggaatgtatagtgatcagcgggtccatgacggcctccgcaaagccccactccctgttgtagtgataagagttggacactgcctttctgcgttttgtgaccttctttgtcctatcatccaccaggttgaagtcattggatatgacatccgagtgcgtgtgcttcaaaagctgtacaaattgtggcaaaaggctcttgtccagccagtcatcaccatccaccaccttgaaatactttcctgttgcgcgcggtatcgcatagttgatggtagatccatggcctccgttctccttggagagcaccttgaagctgtatggatatttctgctcgtaggtatgtgccaggctggctgtggaatctgtggaaccatcatccactatgagtatctccagacttctgagcacagacaaatctataaacgagtcaagacagttctttatatacttttcaacattgtaagccggaacgactatggttaaaagcttctccatatatgtttctccatgtataccattttccttgtgtactactctccgagtccatccttgatgtactgtataagatattcaagcgcctcactctcatcctcgccattgcagataagctctatctcatcgcctgactttatgcatgctccaagcactgaaagtacactctttgcattagctacatttttctcgtcatatataaatgttacctttgatttaaatttcattgcctctttgcagagattgccggccggacgtaaatgtaatccggtaggattcttgattattattttttgtgctaccacttttattacctcttttcggttatatatctatcaatgtgatgaactgtcagagccgttatttccggtgtttcctgacgatgtgctgcccgatgacgatgaaccgcctgtgccggtgtcgcctgatgttgtaccgcctgttgttgagcccgaggctgttcctgtaccatcagttcccgttgtgccgcctccgtcaccttcccttccgataactatctgaacctttatctcgccccatgtgtacttggtctcatccagatttggctttaccgtcactgtatgtgtacctgtaccaaggcctgtcacatcaattttacccttcagtgtagttcccgaaagtgtatctatatcagactgggtgccgcttactatgacactgctcttatctgttacaaatgtaagcgtatatccctcttccagtccgtcatatgtgatattggaactgttcagcgtcatggttgaagtcgcatttgtttcaatctttatatctatactgagctttgccttggatgagttcactataaaaactccatccggcagatatcctgtcaggtcaacagatgtacttatatcgtctgttgcgcccgatatatcaattggtcccacatctatagatgtgatattgttcaatgcttctgcattacctttgagcattacagactcctctgatagttctactccgagcacgctctttcctcctgccggtgagcctgtcgtagtacacttgataggcacctccttggtacttaggacatcaactgtcactgctatagactgatactggctgtccacatcaagctttgatatatctatctcatcgccattatcatcaatcagagtgagatcaccgcgatcagttatctgattatctgatattatggtattgtcatcgacctttatatttacattggccgatgctatagttgaaacaatggactcaggacctccgatctttactacctttggatttgcctgtggcttgtttcccagtgctttcgcacctgagagacttccatccaatgatacctttacctcaaactgcttctgcatatatttttcaaccgaaagcgggagcatatggtctccaccgttgaaggtaatcgaatgtctgtacttggtgcatccaatatctacctttacgcttgccttattcgtatcatccttatctactatgatatttgcaaggtcgacatttgcgtaaaaatcagaatcatcaagctcgttcagatagcttctcttgcctgataccgaaaagctgatggtcttttccgaatccttgatggtaggccatagccccttgtcaacaaccgaatcacggcctgtgacggtgactgttgtggtaaatgtctttgtcttgaccgggtcattgagattgtagaccacaagccagagtataaatgcaaatgctatcgcaagtattttaaagcctatattatttgtgaaggtttttagaagcttctttcccattcttaaacctccttttaattaattcaaatttacccggctccctatgtctgttctgcagaagcttaagctgtgtgcgtagatgatcggcatctatatcgtgctcaatctgccccttgtatgctgtagaaactgatcctgtctcctctgaaactatgatagtaagcgaatcacttacctcgctgactccgaccgctgcacggtgtctggttcccaaatccttcgagagtgacaggctgtctgatagcggaaggtaacatgtagctgacaccacacggttgccacgcacgataaccgctccgtcatgaagcggtgtgtttttctcaaaaatattgatgaggagctgacttgtaagtatagcatccacatctattcctgttctgatatactctcccagatttatctcatcctccatgactattagcgctcctgtctttactctgcccatcgcaaagcatgcacgcaccagctcatcaattgtcttgtcggagaatttctcaatttcgcctctgccggtattaaaaaaatcacccaaaaaggtctttccaccaatattctccaaggcatttcgaagctcaggctgaaaaataacaacaagtgccacgagacctatattaaagagtttctcagcaagccacagtattgtatccatctggaacaatgctgcaacaagcacaaacaacagtatgataataaggcccttgaacagattccatgccctcgtggtctttatccacaaaagtatatgatagaagagcactgaaataataagtatctctataatgtctatcacaccgattttgatgcccggcacatttgtgaatgtaaggaactgatccttgaagcgtatcaatacaccactcacattatccatagcgccctcctttctcttatactatgtaactatttgtcatcctcaaatatattttcgtctatttcgagatcttttgcaatagcctctttgctgatattttcctgattatgtctctgaatcttctttccaaggcttcctgtattgccaaagtgctttacaaccttttcctccttggcaatcatcttctttggaactgccttgacgtaataataatattcatcatcctcaaactgtacattttctgtacgtgcatagtcaagattcataaatataaactgtatgacaacacctgcaaaaatagctgctacagtgctgagcacaagccagattatcttctccggcagtccgagcaccagataagcaacaacaagtgcaaccaactgtacgagtcctcctgctatggtagcaacagtccatgaattgttgattttcaatcgtctgacctgatacaccaccagtgtggtgataacaaagattgccataactataaacatctctttgttgtcaagaagctgtcccattgtcacattgagctttgtagtgctctgcccctttttatctaccacctctgcaagcgctgatgcattctgtctgattccgtcaaggaaatagtacaacagtgtgccacatattattgcaacaaccgaataagctcttcttaaaagacctgctgcaaccggcataacagatggtatgtgaagctgaaagcatataggtgtgagtatcacaagcatgccatccttcggtgcaaaacgaaaatagacaaaatacagtactaaaaaaagtacaaatgtgatagcaaaaacctctatggacagcgcatacatatctaaaagtatcataatcgaagcaatccagagtattgcattcaccggaagcagtgcacacacaagcgctaaaagcagtgccacaagcatcgagcttattttcgccatatagccgatattcaaatctattgttataaatgcgataaatgcaacggcaaatctcacaaccggaagtataaagtgctcatactcaccgcaaaatttgactgccttatccttaatttccagtaacttgttcataaagcctccctaacgcttaatcttttcctcacgggaatatattctgcccactgccttcaggtgatttgcgtatttgcgcacttctcttctgccggccttatatcttgcagtatacaccacaattgtgacaaaaatgtaaaccgccataaatgcaatatacagtatgcctattgtgacacccattgccttaaaatcaagcttattgattctgtccaaaagctctgctgcattgacagcaacccacatcacaacaagccctgcaaatgcgaatgtacctgtaaagaagctttttaagccctctttccatatatagtcccatccgtaatagcttgcggactgcttctgcacacggctgtcatcgcttttgctgtcacatagagcaatattaaacagttcccttactttttcttcgtttatcataaatcatcctcttacctgttacttgatatatctcatacggtttttgtcatcctgctgccacagctgcctatcctggctctttggtgtgtcaagggcactgcgtagtgtgtttgtgagcttagtcttgcactcatcacaaaatctacctgtacgtatcatcctgccacagttctcgcatggtataccatatgatgaatccggtgaaaacgaaagcctttcctcacgtatccacctatttatctgcttcatggatgtatccgtctccttggccactgtctcaaccggcacatttggattatcctcaacaaatctctttactatatcaaatttctcatccatttttttctggcagttcgggcagtactgctcatctgacagtacattaaatattctgccacagcccttgcaattagatattctcatctgataaaaccctcctaacttccctgtcctatgcaaatacacagcacatatacacggccgggacatttctttgctatctcgtgcccaatcgactccgccgtactgcctgtagtatatatatcatctactattagtatttggtcatattgtacaatactatccgccacttgaaaagccccctctagacaatttctgcgttcaacataccccattgtcttgagtggactggtatttttcactctgcgcacaagcccttttaccatccttatgcctgttttttcagacaatgcctttgcaaaacactctgcctgattgtagcctctctggcgcatttttttacggtgcatcggcaccggaataataacatctatcccacatcttagtatccagtccgaatatctttccactgctgtctgtgcaaaataagccgcatactcacgtctgtttgaatacttgaacctgtacatggtctgctttatgctgcccttgtatgcaaaaagcgccttgccctgcctgtagctgtcatcttcccgcatctgcctgtgatgctctagtgcccgtgcacagtcgtcacaatactctcttcgctcagacaaaaccggcttcccgcagcgcatacactgcggctgctcaaccggaaagagcttttcacagcatctgctgtgtatatatctctcaaccggaccaattataccatcacataccggacagcgcggtggaaataccagattgattacgcctctcccaatatcctttattttgttcactaatccccctgactgtaatatccccatttgtaacaatattaacaaaaaagcgacaatacattcctgcaatgcagggacatatcatcgccctcacggctgcctgttataaaacgtatattctagaattcttcatctctcttgcctgcaaggaactctacatactttcctgtaccgatagcaacacatgtcataggctgctctgcagtcattgtattgatgccggtcttttcctcgataagctcctcaagacctctgagcagcgaaccgcctcctgtaagcacgattcctctgtctgcgacatcggctgcaagctccggtggagtcttttcaagcactgagtgcactgcctcaactatctgaagagttgcctcacgaagtgcttcctctgtctcctctgagctgactgtaatagtccttggaagtcctgttacaaggtttcttcctcttacctcaattgtctccggctgtgggagagggtagcatgtaccaatcttgattttgatatcctcagctgttctctctccgatgagaaggttatgcttctttctcatgtatctgacaattgcctcatcaaaatcatctccggctatcttgatagatgtgctgactaccgaaccaccgagtgagataactgctatatctgatgtaccgcctccgatatctactatcatatttccgcatggctttgaaatatcaatacctgcaccgattgcagctgcgattggctcctcgataatcttaacatctctggctcctgctgcaaatgtagcatcctcaacggccttcttctcaacctctgtaacaccacttggcacacatacgctcacgagcggctttctgaagcttttcttaccaagcgccttctggatgaagtgcttgatcatcttctctgtaactgtataatctgagataacaccctgacgcagcggtctgactgcaacgatattacccggtgtccttccgagcatgaggcgtgcttcctctccgattgccttaatcttgttggtgtccctgtcaaaggctactactgaaggctcctttaacacaacaccctttccttttatataaacaagtatacttgctgttcctaaatcgattccgatatctgatccgaccattttaatagcccctttcctgccatatctttaaatttacacatacactctcttattatatacaataaatcccatttttcaaactttttttttgaaaaaggtcatatttaataaaattttaaagtttatccttgtctttttccagatatggtttcaaaaaccggcctgtatatgactgttttacctcgcatatctcctcaggtgtgccctgcgctatgacggttccgccgccgtctccgccctcaggtcccatatctatgatatagtcagctgtctttatcacgtcgaggttgtgctcgataacaactacagtattgcctccgtccgagagcctgcgcagtatctccacaagcttgtgtacatctgcaaagtgcagccccgtagtaggctcatcaagtatatatatggtctttccggtgctctttctgctaagctctgtggcaagcttgatacgctgtgcctcaccacccgaaagctctgtggacggctgtcccagcttcacgtaggatagtccgacatcatagagcgactggattttgttctggatctttggcacatttttgaaaaactcaagtgcctcctccactgtcatatcaagaacatcgtatatgctcttgcccttgtactttacatcgagtgtctccctgttatatcgtttgcctccacagacctcacacggcacatatacatcaggcaggaaatgcatctctatcttaaggattccatcgccgccgcaggcctcacaccgaccgccctttacattgaaactgaaacggccctttttatagccctttgccttggcatcgggtgttgatgcaaacaggtctcttatcatgtcaaacacacctgtatatgtggcaggattagagcggggtgtacggcctatcggtgactggtcgatgtctatgaccttgtcaagctgttcaagaccatctataccgtcatggtcacctgcgatacacctggctctgtttaaggatttggccagatgcttgtagagtatctcattggtcaatgagctctttcccgagcccgacacgcctgtaacacaggtcatgataccaagaggtatctgcacatcaatatttttcaggttattctccctggctcctcttatcgtgatatatccgcttggcttgcgcctctcctgtggcaccggtatctttattttaccactcaaatatgctcctgtgagtgattttttgcactttataatgtcctttaacgagcctgctgccactatctccccgccgtgcgagcctgctcccggccctacatccacgatataatccgctgcgcgcatggtatcctcatcatgctccaccactatgagcgtatttcccagattcttaagattcataagtgcgccaagcagcttgtcgttatccctctgatgcagtccgatacttggctcatcaagtatatatgccacacctacaagtcctgagcctatctgcgtggcaagcctgattcgctgggcttccccgcctgaaagacttgccgtgccgcgggtaagggtgaggtaatcaaggccgacctgctgcaaaaagccaactctcgcacggatttcctttagtatctggtctcctatatagtgttgctgctctgtaagctctatatcagcaaggaacttcacaagctccttcacagacatggaggtcatctcatatatgttcttgtccgcaaccgtaacggcaagtgacgacggcttaagtctctgccccttacagctcgtacacggagtaatgcgcataaactgctcatactctgcctttgccgtatcagaaaaggtctccttgtatcggcgctcaacattgtccacaaggccgttccatacaaggtcatagacgccttcgcctctctgacccttgtatctgaccttgagcactctgccgtctccaccgtaaaaaagcagttttttcatatctgcagataaatcatcaatcggtgtgtcgagaggaagcccatagccctcatgcagcgcacgaagtgtcgcataggtatagctctttgggtctgtacatgactgccaccccatcacctgtatggcaccctcagatatggaaagcgatgcatccggcaccataagctgcgggtcaaactccatcttgtagccgagtccgtagcaggtcggacatgctccgaacggattgttgaaggagaagcttctcggctcaacctcatctatgcttatgccacagtcagggcacgcaaaattctgggaaaaagtcatctgttcgccatccacaatatcaactattgcattgccctctgtcagttcaaatacattttcaagtgaatcagtaagcctcttctctatgcccggctttacaaccagacggtctacaacaatgtcaatattgtgctttatatttttctccattggaatatcctcggagagctcatacatgctgccatctacaatcacacgcacatatccgctctttttggctctctcgaacagcttctggtgctcacccttgcggcctctgaccaccggtgcaagaagctggatacgtgtgcgctcaggcagcgccataacagtatccaccatctggtctatcgtctgctttgtaatggcacgcccgcacttcggacagtgtggtattccaattctggcataaagcagtctgaagtaatcatatatctctgtgaccgttccgacagttgaacgtgggttcttgttggtggatttctggtcaatggaaatggcaggcggaagtccctctatagactccacattcggcttttccatctgtcctaaaaactgacgcgcatacgatgaaagtgactccatgtacctgcgctgcccctcagcatatatggtatcaaatgccagtgatgacttgccggagcctgaaagccctgtaaaaacaacaaactcatctctcgggatgtctagactgacgcactttagattgtgttcgctggcacctcgtattttgatgtattttctttctttttttgccataatttgtgttcctccaaattgcttcaggatgttataagcttttattttacgtctctcaatgtgtttttaagcataataagcttatccctgtactcagcagccgcctcgaaattgagctctgccgccgcttttttcatctttttctctatatctgcaatatgcttctcaagctcttttttgctcattgactccggatctttgtcaagagcattctcatcggccgctaccttctttgagatagctatgagatcacgcacggatttctgtatagtctgtggcgtgatgccgtgagcctcattgtactcttcctgtacctttctacgacgctttgtctcgtcaattgcgacacgcatggagtctgtaatcttgtcagcgtacatgataacatggccctcactgttacgtgcggcacgtcctatcgtctgtataagtgaagtctctgagcgaaggaagccttccttatccgcatcgagtatggcaacaagtgtaatctccgggatatcaaggccctccctgagcagattgatgccgacgagcacgtcaaatacgtcaagacgcaggtcacgtattatctccgctctctcaagtgtatctatatct

SEQ ID NO: 711 - DNA, 21882 bp, unidentified
  source 1..21882: mol_type = unassigned DNA
ttacagaaacccaggttattgatgaggagacagagcagaaactgatagcagccattcaggaaacgaaaaaggaatacctggcgtaaaggtatgataacagggggtgataacacatggcgtctatgagggatataaaaagacgaaaaggaagtatccagagcacacagcagattaccaaagccatgaaacttgtttctaccgtaaaactccagaaagccaaagggcgggcagaacagacagatccctattttcagtatatgtaccggacggtaagttccattttagcacacagcggcaatattgatcatccatacttaagaagcggggaatccaaaaagaaagcgatcgttgtactgacttcgaatcgtggacttgcaggaggatataatgcgaatgtggtgaaactgatcacagaaagtgatgatgttgccaaagaggatgtcgtgatctatgcagttggcagaaaaggaattgagatactggagcgaaaaggatatcacatcgaggtagatgcctcggaaattatggaaaatccgacatatccggatgcagcagcactctgtaagagagtgctcgacgatttcgcggaaggaaaaataggagagatctatctggcatatacgcattttaaaaataccgttagtcaggaagcgcagctgatccgtatgcttccggtggaagtaagtgaaccttcggaggaaaagtcttccagagaaattcttatgaattatgagccaaacgaacaggaggctttgaatcagattattccaaaatatgtgacaagtctgttttatggggcactggtagaagccgtggcaagtgaaaacggtgcccgcatgcaggccatggattccgcaacaagcaatgcggaagagatgatagaggatctttccttaaaatataaccgtgcaagacagggatctatcacacaggaattgacggaaattattgcgggagcaaatgcgatagagtgacgtaataaaggagaagaaacatggaaaataaaggagcaataggaaagatcacgcaggtgatcagtgccgtgctcgatatcaaatttccggaaggacatcttccggagatcaatgatgcaatccgtattcctttaaaaaagggcggagaactgatcgttgaagtagcacagcatctgggggatgataccgtgcgttgtattgcactcggaccgacggacggacttgtccgcggtatggatgctatagcgacgggaggaccgatttcggtaccggtaggagaaaaaacacttggccgtttgtttaatgtgctgggagagccaatcgatgaaattgcacctccgcagaccaaggagcactggccgattcatcggaaggcaccttcgtttgaggaacaggcaacttcccaggaaatgttagagacaggaattaaagttgtcgatctgctctgcccgtatcagaaaggtggaaaaatcggattgtttggaggagccggtgtaggaaaaaccgtgctgatccaggaactgatccacaacattgctacagagcatggtggatattcggtatttaccggagtcggagagcgtacccgtgagggaaacgatctgtattatgaaatgaaagagtcgggagttatcgataagacaaccatggtgttcggacagatgaacgaaccgccaggggcacgtatgcgtgtagcacttaccggacttacgatggcagaatatttccgtgataaaggcggaaaagatgttctgttatttattgataatattttccgttttacacaggcaggatcggaagtgtctgccctgctcggacgtatgccgtccgcagtaggttatcagccgaccttacagaccgagatgggggcactacaggagcggattacatccacaaagaacggatctatcacttccgtacaggcggtatatgtgccggccgacgatctgacagacccggcaccggccacaacgtttgcacatctggatgccacaacggtactggatcgttccatcgtggaacttggaatatatccggctgtggacccgctggcttctacttcgcgtatccttgacccgagaattgtcggggaagaacattttaaggttgcgcgtggagtacaggagattttgcagaaatataaagaactgcaggatatcatcgcaattctcggtatggatgaattgtcggaggatgataagcttgttgtcagccgggcacgtaaagtacaaagattcctgtcgcagccgttttccgtggcagtacagtttaccggactggaaggcaaatatgttccggtggaagagaccatccgcggattccgtgaaattctggatggaaaactggatgacgtgccggaaagttatttcctgaatgccggaacaattgatgaggtaaaggcggcatatgcagggtaatgtgtgtgtcggctggaggaaacagagatggaaaagacatttgatgtagaaatcatcacgccggaccgcgttttttataagggaactgcggatctgctggaatttaatacggaatccggcgagatcggtgtataccgtgatcacattccacttacaacggtactggaaccggggcttgtcacgatccatcatggggatgaagaacaggtggcagcagtgcatgccggatttgccgagattctgggagataaggtaacacttctggcagaactggcagaatggccggaagagattgatctggagcgtgcggaagccgcaagagagcgagcagaggagcggattcacaacagaaatgacaatctggatctaaagcgcgcggaatttgcattgcataaggctctgatccgtattaatcttgcagagtatcgataagtgaaaatggaaataagagggagggtatttcatgggaatatcctccctcttttatggactttttaaactggagtctgggactggatgtgaaaatacttttccggacggtacctgaagtcgtgaaaaagaacgggtctatgtaggcgaattcccggttgcagcaataaatagtttgagaaggcgtatcgcataatttctttgggaggcgggcgccttttcaattatgtggatcagtgtcattgcatctttttgttgccattcccgctctgtttcagagatttctccaaacatcatataatctaaattcatatctaacgatttggcaatcgccagcatggtttccacagacataccacacatcccgcgttcaatatccgaacagtattttgttgcccgattgatccgcaccgccagttcatcctgtgagagtccaagttgtatccgcttatggcgaatccgttcgccaactgcaattctatcataaggttcccgtttcttattcatttcgtaatcctctgcattccccaaaattccaaattttcttatataaagatagtatcagttattaaaatataataaacacttttcaaacgtaaaatataggtgcgtttaggacttgagtatttgtgcgtttacaaacggaaaaacgggggaattcgccaattttcgcgtgtaaacgtactgtgaaagggtaaagatatgaggtaaaatatctgttgttacaaacaaatatgattatgaaataattatggatcataaaaaatgctgattgattttcatacacatattcttccgggaatcgatgacggaagccggaatgtagaaatgtcactaagaatgttagcagcgcagagggagcagcaggttgatgaaatcgtagcaactcctcatttttatgcgcagaaagattctgtggaagaatttttattgcgcagacagtgcagctatgaaaaattgaaaacgaaaatggcagagacaaatctggatcagaagctgcatctggcagcggaagtttattactttcagggaatcggaagtgctggaatgatcccgaagctttgtgtggaaggaacacagacacttcttctggaaatgccgtttgcccagtggaattctgccatttatgcagatgtggagaaactggtacgacaccagaaactgaaagttgtccttgcccatattgagcgttattacgaattccagaagaaaaaagaaatctgggatgccgtcatggaacttccgttatacaagcagatgaatgcaggcgtatttctgaactggaaaaagaggcataaagcgtttcagcttgcaaaagaagccacaaccattattcttggcagtgattgtcacaacatggatacccggcatccaaatcttgccgaggggcgcatcgtgcttgcaaagagatttggcgaagcgttcctccagaaaacggatcgcctgaccagggaggtactgcagtgagcgaaaaaaagaaaaccatgcgtgcagttatagaaattatcattgccgtacttgtaatcattgctgtatattttatcatccgtgggatggatcggcacgacgtgcgtatccagcaggcagccacagaaaatgaaacgcagcgtgtctggaaagaatttcaagaaaaaaccgtctcgatcaagctacataaaaagacctggaaatttgcccatccggttcagacgtatctctttatcggaacggacaaaagcggaaacgaagatgccgagggagaagaatatcatggctcgatggcagatgcactgatgcttgttgttgtggatgaagaagaaaaagcatatgggattttgcagctgaaccgggacaccatcactgaagtgccaatgcttttgcaagacggaagcgctaatgccagtgcacagatgcagctttgcacggcacactggtatggaaaggacaaggctgcaagctgcggcaatacggtggagaccgtatccaaaatgcttggcggtctgcctattgatggatactatgcattaaaaatggatgcgatgccacttctgaatcatgaggtggggggagtaaccgttacactggaagatgatatgaccaagctggatccggctatgaagaaaggtgcaacgcttaccttgacagaccggcaggcagaactgctcatgcagtcccggtatgccatggatgacgatcgcaatacgcagcgtatgcgccgccagcagatctttttaaacgcattcatgaaaaagataaaaaaacagaatgcgggggatgtcaatgcgaccgtgaaattatatgaccggctgcgcccgtatgcgacgacagatattaagatgaatgatctgactgccctgttaaaggatatgcagggatatacagacaaaggaattatcacaatcgacggtacatccaaaattggagaaaagctgcacgatgggaaaaagcactgggagttttatatggatgaagattcactggagacatccatgaaacaactgtatccactggtgcaagagaaaggaaagtaacgaatgaaccaggaaaaccaactgacagagcagaacagcgaagaaaccgaaattgatctgcttgaaattttttatctgctgcgggcaaagctggtatggctgattctcgcatttgtgatcgggggagtggttgcaggctccatcacacattttctgatcacaccaaaatatacggcaactgcaaaaatgtatatgatttccgcatccagtggaagtgtgcttgatctgtcggatttcaatatcggaacatccctttcccaggactataccgaattgatcaaaatccgtcccgtgttcaatgaagttattgataacctgaatctgggtatggaatatgaagatctgctgaaaaaagtagatatttcagttgtcggggattcacggttacttgccgtgtcggtggaggacaatgatccaaaacttgcacagtcgatggtcaatgaacttgtagatacagcggtaacctatattccgaaagttatgaatgcatctgagaatgcacagccgaccattgcggaatatgcagtggttccagatgaacagagttctccgaacctcgcaaaaaataccattctcggagcgattcttgcaatgcttctcgtagctgtggtcttcgtagcacgtatgcttatggatgacagcttaaatacggcagaggatgtcgaaaaagaatttggtatcatgccgtttaccgttattccggagggggacattgaagaaatttccgatgaggtagaaaaagcgatcagtaaagagaaaaagaaaagaaggaagaaaaagtaatggaatttacaccgaaaaaccgtgcgaccgtccagaatatgccgaaacttccgtatgcggtagaggaagcactgaaccgtctgcgcgtcaatgtgagctttcttggaagcaaagtgaaaaaaatcatggtgatatccagcgctccagatgagggaaaaagttttgttgccatgcagctgtggcggcagatggcagaagccggcagcaagagcattcttgtggacatggatctgcgcaagagtgttatggttgacaaatatcaggttgtccgggaagacaatggaaaaattctgggaacttccgattatctggcaagtgacgatacgctggacaaatatgtgttgcgtaccaatatcggagcgggagatctccttccgaataaagaaaatattattaacccgtccatgcttctcgaaggacagaaactggcaagtacatttgaggaactggatgaaaattatcgttatacgtttattgatgctccaccattgaatctggtatcggatggagaaaagatcggctcgctgtgtgatggcgcactgctggttgtccgcgcaggagaaacgccaaaggcaatggttcgtaattcgatccgccagttggagcgtgccgggtgtccggttgtcggcattgcactcagccgtgccaaaggcgctgcaagtggatattatcacaaatatggcaactactatggcaagagttattatggaaaaggctatgggtactatggaaaacagggatattacggttatggaacagagccaaaataggtgattccccaaaagggttttcacataaatcaatcatcagggaaaggaggattatatcccaatgaacaaattaatcaagaaggtgctggtaggtattaccgctgctactatgatgtttggatctgtttgtactgcttatgctgcaacagattctgcaaccgtagctccagctccggaaaaacagacaaacgtcaaggctgataatggcgcaaaggtaagtaccgcagcaaacggtacagcaaccgtaaaggctttaccaaagacaacaaagaagagtgttacagtagcttctaaggttgttgtagatggagtctcttacaaggttacagcaattggagcaaaggcttttgcaaatgctacaaaagctacaactgttacacttccagccagcatcaagaccattggcgctcaggcatttacaggtgcaaagtctgtaaagacaatcgtcatcaagtctgcttccgtaaaggttgccaagactgcatttaagggtgtaaacaccaaaaagatgacaatcgaggtttccggtatgtctgcaaagcagctgaaagcattcaaggctcagctgaagaaagccggattcaaaggaaccgtaaagaaagtttctaaataatctcgggttcttgaaaagggcgcacagagttgattctgctgtgccctttcccatagaaaaaattgggaatgaacaaaagtaataagaatcatgaaaacgaaagaaaggagacatcatgtatcaaaaagcaaaaaacagctggatcaaacacattgattttgtgatactggatattctgtgtctgcaggtttcttttttcctggcatatctcgtcagacaccggaatctgaatttatattccaattccgtgtatggaaaccttgccatcgtgttgatcctgattgatgtatgcatgatgttctttttaaatacatgtaagaacgttctgaaacgtggactgctcatagaactggcggcaaccatgcgtcaggtcagcctggtgatactgtttgccgtgttttatctgttctttgtgaaaaatgcgggtgatttttctcgtattacactgtttctgaccgctatcttttatgctataatcagttatgggacaagaactctctggaaatggcatgtattgcggaatctgcggcttggaagaaagaattctatcgtgatattgaccgactgggcaaatcttccgcaggtgcgggaagatgtcgaaaatcacagctatgaactgtttcaggttcgaggaatcgctgtgatcgatgtcaatgaaaagaaaacacttcccgaaaaactgggggacatcccatttgtggcagagggcgaatcggtcatggattacttgtgccatgcatgggtggatgaagtgtttatcgatctgcagcctgatgatccgcgggtagacagatggatcaatcagctggtggagatgggcgtaacggtacatctgaagcttgccaaccggatggatctggcggcgaacaaacagtttgtggaaaaactgggacgatacacggtgctgaccacaagcatccgcaccgtgagtacctgggaactgtttctcaaacggctgatggatattctcggaggcatcgtcggctgcatcctcactggaattctgtttctgatccttgcaccgatgatctatcatgaatcgcccggcccgatcttcttcggacagaccaggatcggaaagaatggcaagaaatttacgtgctataaattccgcagtatgtatctggatgcggaggagcgcaaagcagcacttgccgcagaaaaccgtgtatcggacggaatgatgtttaaattggattttgacccgcgcatcatcggcagcaggcgtctgccggacggaacgataaaaaaggggcttggaaataagatccgcgactggtccatcgatgagtttccacagttctggaatgtactcaaaggggatatgtctctggtaggtacacgaccaccaacggaagatgagtgggtgaaatatgagctgcaccatagaagccgcctggcaatcaaaccggggatcaccgggatgtggcaggtaagtgggcgcagtgagattacggattttgaacaggtggtagcacttgatcgcagttatattgcgaactggagcctgggacttgatgtgaaaatattgtgcaaaacagtgggagtcgtgctgaaacatgaaggtgcgatgtgagcggtaaatgaatattacgatatctgattgaggagtatgataagtatcgaaatgtgtaaaaaggaattgaagtcatgagtgaatattcagttaaaattattgtagcaactcataaaaaatatcaaatgccgtctgacgcaatgtatattcctttacatgttggtgcggaggggaaaaaagattccgatggaaatgagttggattggggatatatcaaggataacactggggaaaatatttcaatattgaacccatcattttgtgaattgacaggtttatattgggcatggaaaaacttagatgctgattatataggtcttgtacattatagaagacatttttcactgaaaaagaaaaaaggatttggaaatgtgttatcttatgaggaactaaatccatacttaggaaaaataaaagtatttgttccaaataaaagaaaatattatatagaatctctctatagtcattatgcgcatacacattatgctgaacatttagatgaaaccagaaagattattgcggataagtatccatcatacttgaatagctttgacacagtgatcaatcggacatatggttatatgtttaatatgatgattatggacaagcatttattaaatgagtattgttcatggctgtttgatatactttttgaattacaaaaaagaatcagtaccaatgacttaagcactttccagggaagattttatggaagagtaagtgaaattatatttaatgtctggctggatgaaaaaatgaaatccggtgttcttaagaaaaatgaaataaaagaaattccgtatattcacatggaaaaaattaattggtggaagaagggaacggcctttttgaaggcaaaattttttggaaataaatataatggtagtttttgatacatatttactaaagcataattaggaaattactatgaagaaaattttattaattgcatcaagaccattggcaaatgatggacttacaaaaatagaaacagatgtgatcaagtatagcatagatagtattgaatttgaagtggcctgtgggtttgactatgatttcgataatttatatgttaagcaactaaaaaagcaacaaattaaatttcatgctctaccttctaaaaagaaaccatttacgtatatgagagaaatttacaaattggtaaaaagggaaaggtatgatggggtgtatatacatggcaatagtgccatgatgtttatggaagcgattccggcgaagctcacaagaacaagagtaatcacacattgccataatacaaagtcggactatccattagttcattatattgcaaagccttttttcaatagggcggttgatgtaaagatagggtgttcactatgggcctcacagtgggcttattgtggaaaaaatataattactattataaacggaatagaaattgatctattcaagtatgataaaaaaaagcgaaatgaagttagaaaattattagattgggaaagcaataaggttgtcggacatattggaagatttagtaagcaaaaaaatcacaagaaattgatagatgttttttcggagatgtataaaaaagatgatagcatgagattgcttttgattggagatggtgatttaaaagaaaacatagaaaatcaaatcagaatattgggattatcagaagtggtctgtattattgataaaacagaggcaccgcaggattatatgaatgcgatggatattatgattattccgagtttgtttgagggattatgtttggtggccttagaggctcaagcaaatggattgccggttttgattgatgaattttttacgcctgaaacatgtgctacggacttagtaaaaatactgaagttgcatgatccagatggggtttgggctgaatctgcgatacaattaatgcaagagggtagacatgatgttagtaaacaattatatgagaaaaaaatggacaaagaagatatgatgaaaagcatatgggatatattggtgaaatgataataaatagtaaaaagctagaagcagtagacgttatttcttttgatatttttgatacattgcttaaacgaaatgttccaaacaatagtgaaatatttaatattattgaaaagaaatctggagtatttggattcgcaaaaaaaagaatagaggctgcacatcgggctgaaaataaagcaatcaatggagaagcaacgtatgaagaaatatatgcgcaaatagatgacatttctgacgaacaacggaatgagttaaaacaattggaattggatgtcgaaaaaaggtatcttcaaacaaattgggatatgaaagaggtctatgactggtgtgttactcataataagaaaattattgcggtttctgatatgtacttatctgcgaatgtattaaatgaattattagaggaaaatgggtttgaagtagagcgcatttttgtgtcatgtgaagaacatgagaataagcgatcaggaaagctttttgatattgtatctaagaaaataaatactaaaaatgtattacatataggggattcttggaaaggagatttcttttctcctataatgtatggatggaaggcgattcattattctgcgggaaaaaggggaaagaatgttttagattgtgttataaaaaataattgtaataaaaattattttcgagatcttggattttctgttttaggacctatattatatgcgttttcattgtggttgaacgaaaaaacgagagatatggatactctattattcttttcaagagatgggtacattatgaaaaaggcttatgaaaagataagtgataaggagtcttcatatgtatatgtttcaagattatctttgactaccgctactatatggatgcatcctcaatttgaggatataaagcaaatgatggaattcccaaataattttactttatgttactttgtccggaaactcggattggatccacaaaacatttcgtttgagagatttcatttggatggtacacaaacgtatgagaagaacactttttggaatgctttggaggttaaagaattctataatagtataaaagaggaagtcgttttaaattcaaaaaaacaatatgaatggttatttaactatataactccttttttgaaggggaaagtagtcggaatagttgatattggctggaaggcgacaatgcagtcaaagtttttagaactgcttaaagcaaatcctgtttataaggattgtatagtacatggattttatttgggcgttgaaaagcaaactgcggatgttgaaggattcctatataaatcaaatcagcaaacaacttttaagacggctattgatgctggatatggggtgattgaaactctttttcttgcgagagaaggaacagtaataaaatattcacaaaatggacctgttcaggctgaatacgaaataaaaactaaagaggaaattaaaaatttacaagctattcatgaaggtgcaatggaatttatagataaaatgcgaattcttgatttcgaaaaggatattccagaccctcaagaggtgttttgctattttgagaatcttgtgtatactcctcaaatggaagatttaaggttactaggaggggttggctttaatgatttaaatgattctacgctaattagtagacatggattattgaactatatggtattacctaaaaggttttgttctgattaccataatgctccatggaaaatcggctttcttaaaagtaatatttgcagatggtttccttggggaaaagtatataaaaaggtaaaaataggctataggaagaaaaatgcaaaaacttagtgatgaagaagtaaaaaatatacaaatagaattattggatgaatttgtgtctgtgtgcaatgaattaggtatgtattatactttaggtggaggaaccttgttaggagcaattaggcataaagggtttataccttgggatgatgatatagacgttttaatgccaagaccggattatgataggttattagaatatgatgcaaaaaatgaaaagttgtggagttcaaatgtacagctgtgcaattggaaaaagaaaaattctagttgttgttttataaagttaataaagacaaatacagttgttaaagaaaaatatggaacaaccttaaataatatttggatcgatgtatttccgattgacggaattacaaatgaaactataaaacaagaaagcctttttcgaaaagttttgactttaagaaaaatatttgacatcagaaatgccaaaattggtgagggaaaaacagtttttaaaaaatgttttaaatgcttattaatacccatattaagaattatacccaattgttttttttgtagtatattagataaattatcacaaacatacaattattcagatgcggagactgtagctggaatattgtggggatatggaacacaggaatgtatgaggaaaaaggattttattcaatgtttagaggtagaatttgagggaaaaacatataatgcgccgttaaattacaatcaatatcttacgcagttgtattctaattatatggaattgccaccagaagaaaaaagagttagacatgaatatgaggcctatatcatgtaagaaggggattattagtggaggagaaaattttgatttctgttattgtacctgtatataatgttgaaaaatatttaaaaagatgtattgaaagcatattgcgacaaacctttaaagagtttgaactgctattaatagatgatggatcaacagattcatcgggaaagatatgtgatgaaagttctgaagatgataaaagaataattgtatatcataaaaaaaatggtggattgtctgatgctagaaactatggaataagcagagcaaaaggggaatatgttacttttatagactccgatgattatattggaccgacatttcttgagtatctgcataagagttgtcaaaaatataatgctatgatagctgtaggagcttcttttttttcatatagtgaagatttggattgttttaatgaacatgaaaatagcgcttttgaatgttatacatcgaaagaagctataaaagaaatttgtttgaataagaaatttggaatgtcagcatggggaaaactctatgataagaagttatttgattctattcaattcccaattggcgtattgtatgaagatttgcagacgactccatatttgatacataaatgtaataaaatagtatattgtcaaggggctacatattattggtaccaaagaaaaggaagtattatgcattcctataattataaaaataatgtctggtatgaagccgcggatcaatttgtcaaatttgtaatgcttaattattcggatttgtatgaatatgcgatttgtagatatgttaatgatagcttttggagtgtggtacaaagaattgcattaacagataattgctataataatataatttatgcccgagaacaatgttgcttctattggaaaaaggggctaaagaataagtatttaaaggccagaaaaaaaatcaatgttttgttgatgttgatatcacctagatgctatatattaatttatagattttattggagatttctaaaaaaacaaaaggaattgcattaagcgactataggagaaatattgtgatttattatattaacgaatatattgagaaaaaaatggaaaaaaatgcggggagtaaagcacgaaatgatgtagaagaaattttccgaaattttgatatgcaaacgattcaggttgatcgaaaggagcatgcaaaaggtattaaaatgcatttgaataatgctgctactatatattattcattaaagaaagaagatattcaagatagccttattttttttcaatttccattaataggtcattctatttttaacagtatggtattaaaaaagataaaaagaaaaagaaataaaattgttgggattatacatgatttagaatttcttcgatttaatgaagatattaatacaattgggtataaaagaattaaatttgaggaattttcacttctaaatatttgtgacaaaattattgttcataatgcagcaatgaggaacttactaatgtgtcatgggatagacgaagataagatgattgaattggaaatctttgattatcttattgatgttaatgcaccaaaggtaatcacgaaagaaattgatgcggatgtcgcgattgcaggtaatttaaaagctgaaaaaagtggctatgtatataagttaccagataaaccacaatttgcattatatggcgctaatttttgtggaaaaagcatacaaaaaaatgttaagtataaagggagcttttatccagatgaactagtttttcaattgaatgaaaaatatggtttgatttgggatggaaattcggcagatacatgtgaaggcaattatggagaatatttaaaatataataatccacataaaacatctctttatcttgcaggagaattgccggtgattatatgggagcaagctgcgttagcgccatttgtgttaaaacacaaagtgggaattgttataaagaaactaagcgagattaataaaaaaatagaagagattagtgctgatgagtatatggatattaaagaaaatgtagcggaaatatcaggaaaaattagacgcgggtattttatgaactgtgcaatcaaaaaagcaattgatcaattaggctataaaggataaaggggcatatgaaaatgaaagtttatatacctaaaataaaaaatacggaaaaactattttttgtttcttatactatatatatgattgctttcatacttaatcagaccttttattggagatattttcctgaaaagatggatcgatatgtactcttagtatgtgttttattgttggctttaaatgaaatagtgtccgttaaaataattgattttagatctttgataggacttattatatgtctgttattgtttgcgataacgtattctacaaatggaaacgccgttgcggggatgattgtgtttatatattgtggtagaaatatttcatttgaaaaaatcgcaaaaataacaatatatataacggtatttatgttggttcttattacggttagttcatggttggggattatagaaaatcacatagattatagcggtaatcgagtacgacaatatttaggttttcgttatactttgtatgcgccagcattaatatacaatataacattgctagagatatatattaaacaggaaaaattaaaatggaaaaatattatttgcctattgatattaaacggtttcttctttttctttacaaattcaagattatcttttggattatctgttttatcattagttattgcagtaatttataaatataaatttgttttctttaacaaaaatcatttcgtctatcttattttggtattttcatatttaatatgcagtggctttttttatggattaacggttacattttcgagaaatgtattatggatgaaaaatttaaatgattttttggggaacaggttaaatctaggacaatattctttattagagtatggaatttctgcttggggaaaacaaatagcatgggtaggcaatggattagatgtatacgggaatagagcaacaggctcttatctttgggtagactgtctatatgttcaagtattgcaaagatatggtgttatttttttgattattttcttattagtaatgacaattactatgtgggtttgttatcagaaaaaaaactatatgctactaattctattatctttaattgcagtccattgtatgattgatgatttgcagttgtaccttcattacaatacattttggtttgccataggttcgcttttgttaggacggagcaataaaaagtacattaagctcaaacaaatgaaataagtggatatttgagtttgacttttaataggaaaatgaagtgattggaatatgaatgagacgttttattgacataatgatgaaattaaatgaaaatattgacagacagagaaatgagaatattgatctgatccgggctatggcatggttggctgttgtgggactacattcttttgcgaaggatgaggatatatcaagctggttttactatttgtgtggattcgcggttccttttttctttatggcaagtggcttttttttgttgaatagaggaaggttgcagtggatgtattgcgttggcaaaatattgggcattattaaaattgtatttggttggaatgctcttatgattttgcttaaagtgatgaaatcaattttgacaaatgaacagatctcatataatttattatcaatcccggttgaatgtgctaagtcacttgttcaaaaaggcaatatgtggtagctgtggtacttgggggcattacttcttttgtatggaatgttatggggcatttctcgttttaatgacagtcaaaagacttggactatgattgcatgcgctgtgataggaattgccataagtatgtattcattactttgtagagaaattctagaagctaatgttgtacagacttttcgtttgtggatttggttgttctattttattttgggtagtaacatggacaagtttactagattcatacaaaaatatttaagtttgcgaatgcatattttttggcagttatcatgactgttttaaatattgcgtggcaggaatacattagttgtttgctatggagcacattgggggaactcggatatatgcagaatattattatgataacatatttgagatgatgtggatcatatgtatcttttctgcgttgttaagggtgtcattgtcagaaaaattagtaacgtggattaaatggtttggttccttacaatagttatttctactatatttacgtggcttattgcacatacacatttaaaaaattttttgatgaaaatttagagattgttttgaaaaacatttgtgttgatagagattagaaaggcaggaacaaatttgcaatataagatttgtaaggagtggatatgaagaagaacaattctattaaatttaatttcataatgaattcgcttcttacgatttcctcgttcatctttcccttgattacttttccatatgtgtcgaggattttgctaccggaaggaactgggaaggtttcgtttgtaacgtctgttgtaacatattttaatatgtttgcccaacttggaattccgacctatggtattcgggcgtgcgcaaaggtacgagatgataaagaaacgctttcaagaaccgttcacgagctactgagtattaacttgattatgagtgcatttgcatatttggtattgggaatatgtttggcaacgattccaaggtttcaaacagaaaaacctttatttattattgttagcactacgatattgtttaatgcagttggagtggaatggctctataaagggttggaacaatatacatatattactgtgcgttcacttgtttttaaagtgattgcactagtggcaatgttggggctggtacatgaaaaaagtgattatgtaatttatggtgcaattacaatttttgctgcctctgcttcgaatgtattgaatctgattaatacaagaaagtatattaaagttcgtagtgtaggaaattataatttagtccggcatattaaaccgattttgattttttttgcaatgtcatgtgctacggcaatctacacgaatttggatactgtaatgcttggatttatgaagtctgatgtagatgttggttactataatgctgcagtcaagattaaaagcgttttacttggcgttgttacttctttaggagcggtattattaccgcgtgcatcttattatattgaacatggattgaacgatgagtttcagaaaatttctaagaaagcaattgagtttgtgtttttaatagcgttgcctttatctatttattttatgatatttgcaaaggaaggagttctttttctttcgggatcagcttatgaaggggctatcattcctatgcagattatcatgccaacgttattatggataggactaaccaatataatggggattcaaatgcttgtcccacttggtagggaaaaggttgtattgtattcggagattgcaggagctctagtggacttggttattaatttgattttaattccaaggatggcatcggcgggagctgcgataggtactttggtagcggaaattgtggtgtggattgtacaatttattgctttacgcgtggatgtgacagaggcatatcgaaggattcggtatggtaagattttatttgccatagtcttggggataatagcatctatttggatcaaatggatgcagtggggagcgtttgtaacattggctttttcaagtattatcttttttggagtgtattttattatcttggttttggcgaaagaaccattggtatgcgagattaaaaaccagatagttgaaaaattaccaaagagaaattagcacattgtatgaaatgacgaggagaataagtttatgtacgactatttaattgttggagccggtttattcggttcggtatttgccagacaggcaacggatgccggtaagaaagtgcttgtaatcgacaagcgcccgaacattgcaggtaatgtttacacggaggatattgagaatatccatgtgcacaaatacggtgcgcacattttccatacaaataataaagaagtgtggaattatgttacgcgttttgcggagttcaatcgttttacgaacagtccggtagcgaattataagggagagttgtattcactgccttttaacatgtatacgttcaataagatgtggggcgttgtgacaccggaggaggctgcggcaaaaattgaggagcagcgcaacgaagccggtattacggagccgcacaatctggaggaacaggcgatttctctggttggcaaggatatttacgagaagctgatcaagggttatacggagaagcagtgggggcgtgattgcaaggatcttccgtcttttattattaagcgactgccggttcgactgacgtttgataacaattattttaatgctttgtatcaggggattccggtgggcggctatacgaagatggttgccaatatgctagatggaattgaagtgcgtttggatacggattattttgagaataagacaaagctggatgctttggcggataagattgtttatacaggggcgattgatgcttactttgaataccaattgggtgctttggagtatcgttctgtacgctttgagacggaagttctggacaaaccgaattttcagggaaatgcggcggtgaattatacggatcgcaagacgccgtggacgaggatcatcgagcacaagtggtttgagtttggcaaggatgatgccggaaatgatatttcgaagacggtgatcagcagagaatacagttcggagtggaaggtcggtgatgagccgtactatccggtgaatgatgagaagaatggtgcactgtatcaggaatataagaagctggcagacaaggagcagaaggtaatctttggcggacggctgggcgagtataagtattatgatatggatgttgtgattgcttcggcgctggagctggcagagaaggaattggattaggaaaaacagcaaccgccccaggtgaagacatggagcggttcggaacagacattggggtcagaccctttgaaatactaataaaatgagtaaatatgttttaaaagttttctaaagaaagtataacataaagaaattacgaatctgtatgtgttaaggatgctcagttaaagcaatatgaacacaataaggagagatatgaacacaacattacttatcatggctgctggtatcggtagccgtttcggaacaggaattaagcagttggagccagtggatgatactggacatatcatcatggattattccgttcatgatgcaattgaggctggcttcaaccatgtagtatttattatccgtaaggatatcgagaaggaattcaaagaggtcatcggagatcgtatcgcagctatttgctctgctcataatgtaactgtggattacgcttttcaggacattaacgatattccgggaactctgccggaaggacgtacaaagccgtggggaactggacaggccgtgcttgcagcgaaggaagtaatcgataccccgttcattgtgatcaatgcagatgattactatggcaaagaaggcttcaaggccgtccacgagtatctggtaaatggcggtgagtcttgcatggctggctttgtgctgaagaataccctgtctgataatggcggtgtgactcgtggtatctgcaagatggacgaggataacaacttgactgaggttgtggagaccaagaacatcgtaaagactgcggatggagcagaggtagatggtgtggcagtcgatgtgcattctctggtctccatgaatatgtggggcttgactcctgattttctggatgtactggaggacggattcaaagagtttttccagaaagaagtaccgggtaatcctcagaaagccgagtatctgatccccatcttcatcggtgagctgctggagcagggcaagatgtctgtgaaggttctgaagaccaacgacacctggtacggcatgacctaccatgaggatgtcgcagcagtgaaagacagcttcaagaaaatgttggcgaatggcgtgtataaggccgacctgttcagtgatctgtaaataacgatgaaagaaacgattgatttactcggcaagatcatcacaaacatcctgactgctctctatgaaccgtttggatgtaagcgcatagttttagggcgtaccctataaatgaaatctgacaccccgcgcta

SEQ ID NO: 712 - DNA, 23221 bp, unidentified
  source 1..23221: mol_type = unassigned DNA
gccggcctgccgcaaatgcagccaccgcgctgatgatgccaaggcccgcaccgccgtaagccatcaggtccatcagtgtcaccgagttcagctgcatggtgagcaccttcatggtgatcctgcggaagcgctcggcctgcgcattcatctgctcgtgcttccagccgtcggcctgataaattttcagggtggtcaggccctgaatgttctcaaggaagctgtcgccaagggtggtgtactcgccccagtagttcgccagcagctttttggcaaacttctgcactgccacaatggacatggggatcagcggcacgcagcacagcaggatgatggccgaccgtgcgtgcacacccaccagcagcacaaacagggtaacgggtgccagcaggctgtaaaacagctgcggcaggtattttgcaaagtaggtgtcgatctgctccacaccttcgctggccagcatcaccacctcgctggtggccgccgtctcggtgtagttggggccaaggcgggcaagctttgcgtagatgctgctgcgcagggtgcgcttgacatccttggaagcctgatcgctcatggccgatgccagcatggtaaaggcaaagcgcatgggcaccgtggcaaggcagagcacaaggttctgccacagctgtgcactggtcaggctgcccgcaaaggctgcgcccaccagctgggcaatggcccgcacaaagatcacgttgcacagcatccccagccattggaaagccacattggctcccacataccgcagcgcaccgcggtcaaaggacagcaattttttgttgatcactgggctttctccgtttctgctttttctgcatcactgccaaacagacgctcatattcgccggtaaagatgcgctccggcagtgcactggtcatggcaagggcagcggtaaagcgctcttcttcgctcagcggctcaccgaccggcgggaaatgggtcaggatcgttttcagctcccgatccacctgttttgccacccagatgccccggtctgtcatatagatcttgccgtagtgctcctttacgatcatgccgcgctccatgagcagattcataatacgcaccaccgagggcttggtcacgccaagcttttcggcaatgctgcgggagctgatatccagatgggtctgtgagacttcgtagatcgccagcagatagcgcagatgcgccgacgtcagttccatgccgatcactctcttttctgatagattttctaatgttatccaaagctaactttttgtttctgaaaaaagggcgcgagccgaatgttccagcccgcgccctttgcggatcatttcaatgctcagtgacagccgctgcaaccgctgcagctgccattgcagccgccttcgccgcagccgctgcacccactgcagccgccgccatgcttgtgggagtgccatgtgatccagcccacaccgccaaacacgatagcacccacgatgatcgtcggcaaattaaagttcgcggcgagaaattccatcatacaaaacacaccctttccgtgcaaagcgttcttttagatcttggagatgtcgattttgacctcgttatcaccagcatacttgttgggacggaccagcaggtagatgaagccaaccagaaccacagcagccacgatggtgaagaagttgaagccgacctcaccagtgatgatgccgcccagctggtacacgaccagagctgcgcagtaagccagagcgcacatatagccaatggcgatggccgtccatctgccgttgttcatctcgcgcttgatggcgcccattgcagcgaagcagggagcgcacagcaggttgaagatcatgaaggcgtaagctgacagagcggtgtagtcctgcgcaacagcagcccagatctcatcgccgttctcagacagctcgccgccgaagtgatacagaacaccgaaggtaccaaccacgttctcctttgcgatcaggccggagacggaagcgacagttgcacgccagttgccgaagcccagaggtgcaaagatccatgcgaccttggtagcgatcgcagccagcacggagttgtcctgatcctcgaccatgccgaagacaccgttctcgaagccgaagccctgcaggaaccacagcacaacggtagcggccagaatgacggagcctgcgcgcttgatgaaggaccagccgcgctcccaggttgcacggaacacgttgccccatgcaggcacatggtatgcgggcagctccatcacgaagggagcgggatcacctgcgaagagcttggtcttcttcaggatcacgccggagcagatgatggcagccatgccaatgaagtaagcagagacagccaccagagaagaaccgccgaacatcgcacctgcgatgaggccgatgatgggcatctttgcgccgcaggggatgaagcaggtggtcatgatggtcatgcggcggtcgcgctcgttctcgatggtacgggatgccatgacgcccgggacgccgcagccggtgcccaccagaacagggatgaagctcttaccggacaggccgaacttgcggaagatacggtccatgatgaaggcgacacgggacatatagcccacatcctccagaatggacagcaggaagaacagcaccagcatctggggaacgaagcccagaactgcgccgacaccggcaacgatgccgtccatgatcaggccgtacagccagcctgccacgccgatgctctccaggaagccgcccagagcattgggaacaatttcaccgaacaggacatcgttggtccagtcggtggcaaaggtaccaatggcccagccgccgtctgcaatggaggtgcccatggacagggagtacatcaggaacatgaccagtgcgaagatgggcagagccagaatacggttggtcacgatctggtcgatcttatcggaaacggtcaggtgctccacgcgggcctttttcttaacagctttgcccacgacggtgttgatatatgcatagcgctggttggtgatgatgctctcagcatcatcgtccatctcagcttcgcagtccttgatgtgctggtcgatgtggtcgctcaggctcttgtcgagcttcagctcgtccatgaccttctcgtcgcgctcgaacagcttgacggcataccagcgcaggaagcggtcatccaccttgccctgaatggactcttcgatgtgggcaatggcgtgctccacgctgccagtgaacacatggggcagttcagcagccttggtagcctttgcagcagccacagcagcctttgcagcggcctcggtgccctcgcccttcagtgcgctgatctccaccgcctgacagcccagctctgcgctcagcttcttcaggtcgatcttatcaccgttcttgcgcaccagatcgatcatgttcacagccatgaccacagggatgcccagctcgatcagctgggtggtcaggtacaggttacgctcaatgttggtaccatcgatgatgttcaggatggcatcgggcttctccttgaccagataagtacgggaaaccacttcttccagcgtgtacggagacagcgagtagatgccgggcaggtcctgaatgataacatccttatcgcccttcagcttgccttccttcttttccaccgtaacgccgggccagttgccgacatactggttggagccggtcagattgttgaacagggtcgttttaccgcagttcgggttgccggcaagtgcaattttaatgctcattgcttaatccttcctccctttgggatcagactacttcgatcatttcagcatcggccttgcgcacgctcagctcgtagttgcgcacggtcagctccatggggtcgcccagaggtgccaccttgcggacatagatctcaacacccttggtgatgcccatgtccatgatgcggcgcttgaccgggccttcaccgtgcagctttgccacagtagcggtctcgccgacctttacgtctttcagagttttcatacttaaccatcctcctctgcttgtctttatagagagactattccagtttcggagcagctcccaaacagcgcctgggcactgttcagccaatcatgatacggtttgccatggtcttgtccagcgcgatgcggctctccttgacctgaatgatcaggttgcctgcgatctcgttgacgaccgttacctcactgtccaccacaaaacccagctctgccagatgcagccggatctcgtccttgccggtgatctttttgatggtgacggtctcccctgcttttgccattgtcaaaggcatcatacttccgcttcccttcctgtttgaatctgggatatcgctgcggttagtcagccgcaactaccaacgtggatagtttacgcccactaaccttttatgtcaatagttttttcataattaaaagttagttcatatgaacaaacaatttttctgcccgattttttccgttttttcaccacaatcaacaacaactaactcaaattattgaatcaaagttagccattgtttacattttcttgttcttttttggcggcatcttgtaaactatcacaaagctttttctctgctctgctgtgctcttttgctgcaaatgacacagccgcgtggtacagtggtcagtctgcaccgcgcggccgcgtgtcaaaaggaggatttctttcctgccagtgcgtggacaccagcaggtgccaggataaaaagagagtatttgaaaagagaatgacaatttttaagccgccacggcaaggcggagaatgggtgttccactgtggaacagccgcagatagactgctgtgcacttgctcagctggtcaaagtgcttctgcgctgcatccgggtcgccataggacttccagcagccgcagcaggtaaagttcttgccgcggttctcgataaagcccacaacatcacccagaggatagccaaggaacaccccgatctcatgcggaaattctgccgaacagcacagcttgcgggaaagctgagtgagcatattgcccacatccggtgcttcgcccgcttccggcaggcggtagccctcctgccgcagaaagctctgcaccttttcatctgccagcacggcagccagcttgctttcgcggtagacatacacaagataccggtggttgagcacgcagcccttgagcacccgcacacgcaggcccttggggttcagctgagtgttccagtttttcacccggcgtgcaaggtcggcgcagtcgcgggtctcatagcggaacaggcctgccggtttcaggcttgccagcaccggggcacactgttcgatcatgaccgtttcaaaattacgttccatgtctgcgccctcccgccttgtttctccgggctattgttccccggatgcgccgtggttataagttagatgttcctaaccctgattccaaaaaagaagcagctttgcacggagcattcaaggcttcggcctgccgatctgtttcttgtggttagttatttctaacgtgactgtatcttaccacagcggtgggccgttgtcaacacttttcttgaaaaaagttattcgtggcaaaccacggttttctccgcctcgctttttgtgcattctaccgttttggcgcaggctgtggtataataaggaaaaccctctcaggcgctaacgcgccagctcccccgaagggggagctctttatagagtcagcgcattcaaaagctctccccttcgggagagctggcattgcgcagcaatgactgagagggttctatcttataaaaggagcacgcatccatgccacagaacattgcaccgccgggcctgatctcccttcttgccgccgcactggcacagcagcccacaaagccgctggtgctggcgctggatggccgctgcggcagcggcaagaccacccttgcaaatacgctggcccggcagttcccggccagcatcaccctgcacaccgatgatttttacctgccgcctgcacagcgcatccgcggctgggagaaaacgccctgcgccaatatggaccttgcccgcctgcgggacgaagccctgcgcccagcctacgagggccaggcggtgcagtaccgtgcctattcctgccgcgagggtgcgtacctgcccgcgcgggagctggccgcgcagccgctggtgattttggagggcagctacagccaccacccgctgctgaccggttacgaaacgctgcgggtgttcctgacctgcgcaaaagaagagcagacccgccgcctgcaggcgcgggagggggagcgatatgccaattttgccgcccggtgggtgccgctggaggagggctattttgcccagtaccacattgcggagacggcggattttgtggtagacaccacccaaagcgggacgatttgaaatggctttcgcgccgccggtaagaccaaggtgccatatagcaaagcggaagaagcctctaaaaaatggcacagcatgaccgggaactggacgcgttgtgatactttcggcttgggtatgaagaaagatgcgagtggcgagttgatcgacattctgcttgccaaggttccagccaataccccggagggcaaggcagagctgtcggaagccttgaagcatcctgcctttaatcgcagcgcttgcacgaaaatcggcattgccgttgtgaccattgacgggcagatgtactggacctgcagcgtgtattcctgatttcccctttccgcgcggaacaacaccccttgaacagaacaaagccggacagcttgcgggctgtccggcttttgattttgcttggtttacaggctgttacttattcttgtacatatcctgatagtagttctggtaatcaccgctggtgacatggtccatccactcctgatggttcaggtaccagtcaatggtcagcacgatgcccttttcaaagggggtctcggggtaccagcccagatcgttcttgatcttggtggggtcgatgccgtagcggcggtcgtggcccagacggtcggcaacgtgcttgatgaggtcctcgctgatgccctcgtcctgcaggcggtcatgcaactggttgatgatggtcttgacgatgaagatgttggggcgctcgttgtggccgcccacgttgtacacctcgccgaccttgccgccgttggctaccatgtcgatggccttgcagtgatcttccacatacagccagtcgcggatctgcataccgtcgccgtagacgggcagctgcttgtggtgcttgacgttgttgatcatcagggggatcagcttctccgggaactggtaggggccgtagttgttggagcagcgagtgatgttcacgggcatgccgtaggtatcgtggaatgccataacgaacatatcggcgctggccttggaggaagaataggggctgtgggggcacaggggggtggtctccataaagtagccgtccgcacccagtgcgccgtacacctcatcggtggacacctgcaggtacttcttgccctctttccaagtcttggcatcggcatcataccatgcttccttggcgcgctgcagcaggttgacggtgcccatcacgttgctctgcacaaaaatttcggggttcttgatggagcggtccacgtggctctcggcggcaaagttgatgacgtaatcgaaatcgtacttctggaacaggccttccaccagttccttgtcgcagatatcgccctgcacgaatacatggcgggggtcgccctccacatccttcaggttttccagattgccggcgtaggtcagcttatccagattgaccagcaggatctccgggtatttcttgagcatataatgcacaaagttggagccaataaaaccggcgcagccggtgatcagataggttttcataggttcaatttcctcttttcagtctttcatcccgttgtcgccgtcccagtgggcgaagaagcaggccagagcgtccttccagtcgcgcacatcgttgcccacggtgcagcgcagcatccggttgtccagtgcgctccacttggggcggtcggcgctttccgggtgctttgccttgtattcctcactggtgcagggtgccacagcggcatccacgccggacaggcggatgatctcggacgcaaaatcataccacgagcagatgccctcgccggtgcagtggtacaggccgtactcgtgggtcacgcacagctgcaggatctcgtgggccagatccaccgcgttggtggggttgccgcactggtcattgaccacttccagcttgccaaacttcttgcctgcgttcacgatggtcttgacgaagtttttgccgtagtagctgtagagccacgcggtgcgcacgatgaagtgacggtggcagaactgctccacatacttttcgcccatgagcttggtggagccgtaggcgctgatggggccgggaatggtggcttcgtcctgtgcaacgccgccgttctcacggccggagaacacataatcggtggagacgtgtaccagtcgtgcaccggtcttttccgctgcctgtgccagattgcgggggccgagggcgtttgccttgaaggcggcatcatggttcacttcgcagccgtccacattggtgtaggcagcgcagttgatgatgacatccgggcggttgcggcggatgaactcgtccaccattttgtagttggagatatccagatccggcaggtccacagcgatcaccgtggcattgagcagcttttcggggatggggccgatctcgctgcggccttcgcgcagctgcttgaggatctcggtgcccagctgacccttgcagccggtaacaatgattttcatatgggtatgcctttcttttacttaatagcgcagcttgccgtctgcaacgttcttcaggtgctggccgtaaggactcttgccgtagcgctcagcgctttccagcagggtgtcgcggtcgatccagccgtacttgaaggcgatctcttccggcgcactgatcttgatgccctgacgcttctcgatcatgcgcacaaaatcggctgcttccaccagactgtccatggtgccggtgtccagccatgcaaaaccgcggcccagcagctgaacatccagctcgtccttcttcagatacatgtcgttcagggtggtgatctccagctcgccgcgggcagagggcttgacctgctttgccatcttcacgacctctttgttatagaagtacaggccggtgatggcgtagttggacttgggatgctgtggcttttcctccacgctgagcaccttgccgtccttgtcgaactccacgatgccaaagcgctccgggtcctgcacatagtagccgaacacggtgcagcggcctttgttttccgcattggcggcggcggtcttgaggatcttggagaagccgttgccgtagaagatgttatcgcccaggatcatggcgcagcagtcgtcgccaatgaactcttcgcccagaatgaaggcctgtgccagaccgtccggagagggctgaactttatactgcagatggatgccatactggctgccatcacccagcagcgcctcaaagcgaggcgtatcggtcggggtagagatgatcaggatatcctgaatgcctgccagcatcagcgtggacagaggataatagatcatcggcttgtcgtagaccggcagcagctgcttgctggtgaccatggtcagcgggtaaagccgggtgccggcaccgccggcaagaatgatacctttcatatttgtgcactcctttaaaatagattgaaaagttgtgcagctgtacgccgcccagacgggagaccacccggatgacgtatggattcaaagcggagctgcgtccgctgtaaacaaattcaggagccgctcccccctgcccaaaatggcaaaatgggaatagcagttcactttattttactatcaaatcacacaaaaagcaagaaagaacggctttcccgaaaaattttccggaaaagccgttctgaaactccttcagtctcgcatttgttccgcccaaaaggccccctctccgaaggggctggcaatgccgcaggcattggctgggggagttaccacgcaaagccccacttggagaaatagcgcagcaggctgcgcagctgccacaaaaagggcttcagactgcggtgcgcggcgcggtgccatgcatggatggccgtatactggggcaccagatacgctttgccccgggtgcgcatcttctgggtgaggtcggcatcctccacgtacatgaagtagtcctcgtcaaagccgcccacagccttgaacaccgcagtgtccacggccgagaagctgccggtgcagaactcgatctcggtggggctggtcaggtctttgtccgccatgagatagcgctcgttgtactttgcccagaatttcaggcagggcagctggcggtacaccatggcccgcacactgcaccggcgcagcggcaggcgctggggccgcccgtccgggaaggtgagtgcgggccgcgtcatcaccacgccggggtgctgtgccatccagtccgcaaggtcactcagcgtatccgcagtgagctggatatccgggttcaggataaagtgcacccggctttgcagcaggctgagcaccgtgttgtggccggtgccaaagccgccgttctctgtgcggcagagcacctccaccttctggtccttgcggatgtgcagggtgccgtcctttgcggccttggcaaggcactggccgctgccgtccgggctggcgttgtccaccagatacagtgtcagcgggtggcggcgggtgcagtccagcacggtctgtgccgccctgagcgcttcatccgcgccgttataaactacaatacaagcagaaagttccatgttgttcactccagcggtttgatgtcaaagctgaagtcctctttcatcaggtcaaagttcgggttcatgcaggggtcgcctgcggccagctgctttgcccaccgcttctggaagcgctccacctctgagatgaagcgcttgcgcttgaccgggttctcatccagaccacggctcttgctctcgtagtggtacagctgtgcaaagggggtgaacacgttggtatagcccgcttcacgcacgcgcacgcagaagtccacatcgttgaaggccacagcaaagctctcgtccagaccgttcacctgctcgtagacgctcctgcgcaccatcaggcaggcggcagtgaccgcatacacatcctgtgcatagaccagacgtcccatatagccggggtggcccaccgggaagttcttgtgcatgtgggccgcaagggtcaaaaagccgaagccgatgcccgcatgctggatggtgttgtccggataaagcagctttgcgcccacgcagcccacacggtcctgctgggcgtacatgagcatttcttcgatccagcgcggagaaatgacctccgtatcgttgttgagcagcagcaggtattcgccggtggcttcccttgcgccaaagttgttcagggcgctgtagttgaagccggtgccctgccatgtgatcaccttcaggttcttgtgctccttctgcagcttttcatagcagcggaaggtggcaggctccctgctgttgttctcgatgacgatgatctcaagatcctcataggtgctcctgcggtagatggactccacgcaggtgcgcaggtcggaagaatggtcgcagctggggatcaggatgctgacccggcccggctttgtgatggtatagtccgtcttatagaagcccggcgtacccgggatcatggaaacttcatccaccggaacacccacacgctcgtagtgggcatacagggccttgaccgcagcttccagacagtaggtcttggccgaaatgttgcttgccacgctggtggggctggagcgccagtagtacagcaggtgcgggatatgcacgatcttgtgcgccttttcggtcaggcgcaggtagaggtcatagtcctgactgccgttgtaggctgcacgctcatcgccgcccacagcggccagcagctttgcgctgaacacgctcaggtggcagatataattgttggagcgcagattatccagcatataatccggcttgaaatggtaaacggtcaggtggtcgatgtcgccctcaaaggtcacttcatccgtatacacaaagtctgcgccctgttcggcaatggcctgtgccacgtaccacagagcacaggggtgcaggatatcatcgtggtccagcagggcgatgaactcgcccgttgccagtgcaaagccctgattggtgttgcccgcaatgccctcgttcttttccagcttctggtaacggatgcgggggtcttccgcagcacgggctgctacggtctggcccaccgtctcgtcctgaccggcgtccacaaggcacagctcccagttctgataggtctggttctgcaccgagtccagcagctccaccagaaactgctgcggcgtattgtacagcggcaccacgatgctgatgcgcggcgcggcgggctggtcggccgcctgccttaccagcagctctgcgctggcaaagcggtcggcgcgcatggtcctgcccgggaacagcttcgcatattcctttttggcctttgcctgcgcacgcacgccggaaatgcccacccggcgcagctggcccagaaagacgaacggcgggaaggtgtgtgccagctgacggcccttgctgacaaagtagcgcagcggccagctcatcttccagaaagtagagctggtcacattgttcagcgtcttttccagatcctgctcatggctgcggctcagcgaaagatcgctgcgcaggcgttccagctgagccgtctgctcttcgccggtgcgctcggcctgctgcatccgctcccgcagatcgtccagcgtcatctcgtagcctgccagcagctgctgtgcatcctgcacagcggcgctgcggcagaacagcgcggtctgctgggctttgccgcggttcttccactcaaaatcccggtacaggccctgtgcggccagctgctttgcacagtcagccatggccgatgcatcggtgcataccagcagcacccgtgcacactgcagtgcgggcagatccacccattccgggtcctccaccaccagcagggcagcggtgccctgctctgcattctccggcagcagctgtgcgccggccttttccagtgcttcggccagtgcgccgctgccgcccagcacctgaatgctggcaggggtcagctcccgcacgatgcgctgcgccagtgcacggcagcgctcggcctgtcgtttggtttctttttcctgatccattccgatctccgctcctatggaacttttttatcttaaaatgatctctcaaaaaatcacacgatttatagtataccaaatccggcatgatttgagaaggttttgcgcgcatttctttgcagttttccactgcttaccagtggaacaggctgtgcagccagccaaagaacccaccgccggagctgccggaagcggaaatgctcacacccgtgtagtagtggctcaggatctcccggtagcccatgccctgctcctgtgcgtaacccacagcaccgcactggctcatgcccacgccatggccaaagccgtaataggtcatgcagggagtgccgctttcgtccgcgccaaagtcgaagcagtaacgggaggaaacgaactggccgatatagcggtagctgcggccattggaaacaaaggtgttgtactgcacaaagccgcccagatccttgtgggtggtgtcggcgttgacgtagggctcgccggtgcggctgtcgttatactctttataggtataatcttttccgatgacccggcgcagcttgttgtggtactgctcctcgtaggggctttccacgctctgcagatacggcacatcggtgccccatgcgtcccggctggagcaggtgccgtgcacgccggtctgggtgttatagcccgcactggccgaccacacggcgtcacagacgctgccgttgtaggtaaggatctcatttttcaccggttccaccgccctgcggatggcttcccatgccgaggacgggatctgatccaccggagtgtagatgagcgcattggaagaggagccgtactgcttgtggtattccagataggaatggatggccaccgcctgtgccttccacgcctgctgggcggcgctggcgctgacatagctgccaatggagccaagctccgtgtaggtaatgcccacaaggcagtccacaaggttcagcgtgacattgcgctgcaggccttttcccttgatgttgaggtaaggcatggtgatggtatcactggtgccaaagagccatgcaaggcagttttcctcctcggcagggatcagggtcgtgtccgcgccgcccatagtggtggctgccgaagccgccggggccagcacgcaaacgcacagcgctgctgccagcacaaacgccgccgcgcggcgcacaaaccgatgcagatgtttcaaaagtgatctcctcctgttttttgcagatttctgactgtattttttacagtgtaacacagcctgcgcctgcgggcaaggactggactttcgttttcacatctggacaaagaagaaaccggagggcctttcccgttcgggctgctctccggtctgatttataaggtctccggccgacgacgcatggcatcgtcgatctcgttctcgatctcccgcaggcagtccagcagcaccggattgaacgccccggcctcgccggtgcaaagcatctgcactgcagccgcgcagggtaccggcggctggcttccgctgccagtagtcagcgtttcgtaggcatccgcaaggccgaccacctgtgccgcaatggggatctgttcgccaaccagctggtccggatagccgctgccgtcgtaccgctcgtggtgccagcggcagatctgataggctacccgcacaaaatcttcgtcgcggtagacatccagctcttccagcatccgtgcacccagcagggtatgctggcgcatggtttcttcatcctccggcgtgcgcggctccgggctgttcaggacctgctccccgatctccattttgccaatgtcgtgcagcaccgaggccatgctgatggtacggcgcatctcctgcgtcagggggtaagtctcggtcttttgcaccagatggtccagcagcattccggtcagggtgctgatgtgctgcacatgggtgcggctctcgccgttgcggcgctccaccacccggctcagaatgccgatcatcatttggctgcgcttttccttttgcgacacctgatccgccaccatggcgctcaggcggcgctgctttgcatacatgcggatggtgttggtaatgcgctgatacaccacccttgcatcaaaggggcggctgatataatcggacgcacccagatcaaaggcgcggcgcaccgtgtccacattgtcctcgctggagatcatgatgactgggatctcttccagcattccgcgctggctcatggcttccagcacggtaaagccgtcaatgccggtcatgtggatatccagcagcacaacggagatgccggtggggttctgttccagcaggcgcaggcagtcctcgccggaagccgcttcggcagtgtcgaactggctgttcagcatctggctgagcagcatccggttcatggccgagtcgtccacaatgagcacactctggcggctgtgggtgggctgcagggcgtgcggctccggctgacgctcggtgatcacggtgtttttctggatccgtgcatagtgcatcagccgttccgcgtgctgcaccgcatcgtccacattttcgtcgtcgatccacacgccgccaatgctggctgacatgcggatgcgggagtagcccggcacgctggccgcctgcagctgcagacggatctgttccagacgcgggctgagctgttcctgccggatgtccggcagcagcaaaagcagcctgccgccgtcgtagcggatcaggcggtctttttccgaaaggccgcgccggatggtgcttaccgccgtttccagcacgctgttgcccgcaccggagccgtaaacatcgttggagaacttcagatcgtccatatccagcatcgccacaccggcggtaatgctgcggtagcgatagttctcatcataataggtgcggttgtaggcaccggtcagcgggtcgcggtagcgcttttcccgctcgtcggtaatactgttgagcagccgctcaccgttttccgggtccaacagaacgctgcggtcgatcttgcgggtcagctccagcacacagagttggccatccacctgcacacagctggccgtgatctcgtacagctcctgcccaaagtattccagccttgttttccgggtgttcttttccagcgcctgccttgccacgcagttttcacacggacggctgcgccgccactgggcatagcagggcgcgctgccctttttgccgccctgcacctcgtccgccttcatcaggcgcaccgtcatgaacaccttgcggagctggcgcatttcctcttccatctgctggcgtgttctgtttttcttgctcatcatcgcatatcccccgctgcaaaaccgcgcgttttgggccgcacggcattccttcacgaataacattatactattttttaccagaatacgtcaatcttcaccccttgcagcctgcggtgcggaatgtgtcgttttgatcctgtaaaatcaacgtaagctctttatttttgtcaaattttctcatcagacaccgtactgtgccgcacaaagcgacgcaaattggggagtgcagttttccggccgtctgctgcccgctctgcccgggaacagtccacgtgtttccgccggaaactcagtcttgattttgtgcgcagaatccgctataatagtaacgttcttttaaattgcatatcagccggtgtgtcggaatggcagacgagggggactcaaaatccgcttcgtgatttttcttgtctgtacgagaaattcacgattgtgcgttgaattttgaaggtttgtcgaagcaggatttcttacatccctcctgaacatccctccaatcttcagaaaccggtacgaatgtctcaaaattgaatatcagccgatgtggcggaatggcagacgcaaacgactcaaaatcgttcgggaaaccatgtgggttcgagtcccaccatcggcacttcatcataaaacagcttaggatcgaaagattttaggctgtttttcttttttgcccattttttatactttggcgttttctgggaagatattgacgattgcattcgccgaagataccttactggagaaatccagatgtgtataaatgttgcttgtcgtgctgatgtcgctgtgccccagccactcctgaatctccttcaggctcacgccattggcatagagcagactggcgcagctatggcgcagatcgtgaaagcggatacgcttcatctggtgtgcgaccagaaaatccgggaaatgttggctcaggaaatcgggccgaatccgttttcccatcgggtctacatagatatagtcaagataatcggtgcaatagcttttgccgcagaccttccgattctgctcctgctcctttttcattttattgagcatctgctcacaggcagggattaggggaagtgtccggcagctcgactttgtttttgtcttatctcgtgcgatttctgttagcgttccgttgacctttgcggtcacaaccgtatgctgaatgctgattttcttgttttcaaagtcaatggcatcccatttcaagccaacaacttcactgcgccgcaggccgtagaatgcagccatgataacgccaaactccgaagggtcaccttgaatcgctttgaaaagctgctccagttcttcaccgctgtaaatctccgacttgaacttttccttacgaggacgttcaacgcgatctgccgggttggaacggatcatgccgatttgaaaagcgtactgcaagcatttgcggatgttggcgtgatagtgaatgacggtgtttgccgtaaggccacgatccaactcatgctggtagaagtcttggatgtatttgggatgctgttccatatcctgcaatgtatagtggagcggttcaaaatatgggacgatcttgtgaacgattgctctttcatagctggtataggttgtgatttccactcgtgacttcatcattttcaaccagtccgtgatgaagtcggtgaaaagtaccggggagttatcaaggcaggggtcaacttctttgatggggctgaccttcagccaattattgtcaacggcatattgtagggcatcggtcaactccttgtgccaatccagaagctgctgtacactggcctcctcctgctgacgctcatagcggaagaacgtttccagatcgcgcggagagagtgctttcaaagacagccgcttcttttcaaagtatgggacaactactcttcccagatcataagcatatctgccataggtttcgggcggaaggttcatcacgctttcccgaagccagcggttcagatattccgataccggcaggtcggaaacctgctgcatcgtttcagggttaaactctttttgtgttttacgcaacagagattcagctctttttttgtttcctttaacaggaagtcctgtgctgatggatttggttctgcgctttccatctgtgtctttccagctcagaatcatctgatacataccgttttgttctcttaaatgtccggccacatttgtcatagttatgctcctttctgttcgcagccaaacgtcctttgcttaggcatcataagtttagaagattctggagtgttttgcaaggatggcacaagggagtttgaaaggtgcatccctccaagttgccgatcctgatcgagcaggtactctaccacgcagagttttggtatcttatagctgcgtcctacacgcgccgagtggatcttattctgcttgaccaacagatacgcattcttccggcagatgccaagcatttcctgaagatgctccaccgtcaccacatccgggtagtccttgaacatcgtcagatacctctccgtctttcggtcaggctcttcctgaatcaaagtgcaggctgcgatctcgctcattcctgtcctctctttctagttcaatatgtcgattattcagcaaaaaatactatatgtaaagtgtgatggtctttttcggggaccatctcacttgccaaaggagatatttgagcttagaacttcatcggcagtgcgtctttcctgcacttgccgttgtaggtggtgtagatggggtaaacgtaccgccgccagcccggaagcttggcggggttatcccggctgacacggtagagctccatgggatggacgccgctcagcgcacggacaagccgctcctcgctgtactgcccatgatacagctgcacaaagtacatcacgccccgcaggacagccgcccggaaggaatccggtttgccctcccacgcttccacgatgtgccgcagagcttcgcagtagatctcttcgcccagctggtcgtacagcttcagcgccgtgcccacgcagccgatgcggtagtcgctcagctgcatactgtcgtagttgagggaaagccccgcccggttagtggctgcgacaaacgccttggaaggcgcatcgccgcccaccaccttggcgcgcagcttgatgcccgccgacaggggtgcggcgtgaccgttctgctcggcaaagagcagggcttcctgctccatcgtcagaccggtgtagaccttgcagaggatcgggcggtcctcgccgccgttgaggaggatgcagccctcgatggtgtgctgcccatccattacatagtacctgccgttgcggaagctgaccttcggctcgttaacgatgtactcgttgaagtcccttgcaatcagctccaccctcttgcgctctacgccccgctggtagatctcgcggggatagatcagcttgctgctgtggatgaccgaaagctggtacggcgggttgataccaatgaaagtattgttgtcgttcaggcgcatcgcatttcctccttgattctccaaatgtacttctcggcttcctctaagatctcagtcacctgctgcttccgcttcgggctggtgagcaggctgggattgaaggtgaagctatattcgagccgctggatcatggcatgaaccgcggattgcagttcggtgtacagcatcatttcctcgatgcttccggcgttctcaaaggacgaccggatgggcgtataggggtagacaggcggtttgccatccaccacctcaggcggcgcataaaccgccgtagagcgccggataggctctatctgctggatgctgcccatagggttcagcgcaaggctgatgcgaaccgcatcatccacccggcgcatctcctctggggtcagatgccccagatacttcagtgcccggcttttgtcgatggtgaagatctgctctgcctgcacaacggacggcatattcaaccctgcgttttccaacaggcagtgggtcggctggtttactttcttttccgccttgcttgtcatggtcgcaacgatcagggtcggagagtgataattgcccacgtcattctgaagaatgaccgccgggcggtcaccgtgctgttccgagccggtgctcgccccgaaatgggtgaagaagatgtctccgcgttggaatttccagttttgctgcaaaattgtacctccatgttgttatgtgcaaagcccgctgccggatgttccgcaacgagcttcgttcaaggtatggtggtatggttgggtcagcggtgcatgaccacataatcatagccgcgccgcatctggcagacggtgcatgtgtccatgctccggtctgggctgggtacaagcgcgattttgaaagcctttgcatccacaaagtgccgcagacaggtaccgcagagagttcggatggacttgaccatctcaggggtcagctccatctcctcgtagatctcctgctcgcgcaccgtggggttcaactcgtccataaaagtgtcctcctatgtatcaaaagtgaatattcggataaagaataaataagagtacgtaaaaaaacgggaactgccggatgcgtggaacgtacccgacagttcccggatcaatatgattaaaggtctcgcatattcgccctcggctccctgcgagtggggcatgaacatctggcagcggacttgtaccgcttcattggcatttcagccaccccgtctgctttgtgaccgggccgcgaattacggaagtatcattatcggagtaccagatgacggaactattcagttttcaaggtccctgaggtcggacgtttcgccctgcggcaggtgccgcttgggaaatcgtcctctcacttggtagccgacgagaaaggtcaattcgtagcattgaaattgaagtttttcaaaaatttagtaattctcttgattttgatactaatagtgggccgagatacgccgtagactttagaaatttcagtgatgtcgtatccctcgtaagcgtacatggtgatgatttccaaatcttcggttttcaaagtttcgagtgcagtaagcaactgctcgttctcaatctcaccaatccatgcaaaacggcttttagtttcgtggtaagtatctgtcacggtaatcgcatcctgatagcgtagcatcaaaggcgacgcttcttcctcagagctttcatacgcaggagcggtgaattcctgcgtccgctcgataaaggtacgctccgaattgaattgctgacggtcataatcgtacatcttctggatggcctctttcgtcattcccgcagctgcgtactcgatgcgcaacttttcccagtgtgcttcaaacttcttcaactcatagcctttattaaaagacatcgtaaacctccaaattttcgataagtcgtaaaaagtcgaaaatttggaaggctacggatatttcgccgcttggggcatccatgaaaaacggacaaacataaagcctgctcctttttacgggagcaggctacctgaaggctaaaaaaatagccggacaaccaactaacagagcggttctaaagcagaatcactctatcagctgttgcccggctatttggtgcgcgtttcatacattgccttgcggcaatggcccgttgctcggtgacgaacagtccatattcatggtgcaatgcacccgatttttgaaattgtggtttgtctaaaaaagtcagcgtctgcggtaggctaagtcaactgttgctatgttaccgcacttgaggcactttatgctgatagagcctgaacagctctcgtttttttggtagagcttgtgtccgcaaaccggacaaaacctccagccaatgctgaattgtgcctgctgtatattgttcagcggtttactcttaaaagagcgattatttgaccaagtcatattattctccaaatcgaatgacgtccaatggatggcagtggatgggttttccgttgatgacctgcatctgctgtaatctgatcctgatcgcagaccacgataccccgatccgtgcagccatctccagaattctttcatagttcgggtccgatgcggatttgtacaggattccatttggcaggcacagcgctgcacgttctatttcggcgttgaccagaaatgttggcatcagcagctccgctgcaagggtattcgcctgccattcttcccatgagggctgtccgtttcgttcccgataggcaatgtgcccacggcacttgactgcttttccgtagtcgttcggaaacaggtcagccagtatatggtgcgccgcttcatgcgctatcgtgaaattccggcatccggtgcagctgtctgacgcaagggcggaatcgattacaacgtccttcggcatgaacacctccacaagctttgtcccatcccccaaggttacggtaaaaccgcatttctggaaaacagtcagtcctagaatacttccatcgctgcatagcggcagcattttcacattcagcccaagaacagaacttgcgagccgttcagggtcaatgggttctgggtcatctttactgatcccgaaacgggtatagtactggtcgatatacttacccgctatgtgcgaaagatctgcacgggataagtatcttgccattacgaagcacagctttccggcacggagcagtaggcttccacgaaccacttgccccgttcaagccaaagattccgcttctgaccgcagatcaggcaggtgaagcagtgaccttttccgcctaggcgtgatgtcccatgtttgactgccaagacacgatcaattccataagtgtgagccttgtcatagttta

SEQ ID NO: 713 - DNA, 13118 bp, unidentified
  source 1..13118: mol_type = unassigned DNA
ttgagatctaaatatcattttattataatcggttcaggctggcgggccttatattatgtacgcgtagcaaaggctctgcctgaaatattctgtattgatgcgatgtattgcaggacgcaggagaaagcggacttaattgccggtcagtatcagatacatacaactacatctatagaagaatgcgtggcatataaaccggattttgcagttgtggctgttaagaaggacgccatatgtgatgtttcaatggaatggcttgaccgtggaataactgttttatcagagactccggcggcacttgatacggattcgctcaataaactgtattcttattacaaatgtggtaaaaaacaggtggttgctgaacagtacagggagtatcctaatattaaagcatcattaaagcttattaatgaaggaattattggtgatgtcagctgtgtaaatgtgtcactggcgcatgaatatcatggaataagtcttataagagcatttcttggagttaatccgggagagaagtatacagtttcagctaagacatatgagtttcctacaacacagactcttacaagatatgataagttcactgatggcaggattgcaggaaagaaaagatgcgtcgccacatttgaattcgaaagcgggaaagtggcatggtatgattttgattcggagcagtacaggtcaccaatcaggaagaatacgcttaaagttcagggtgtaagaggtgagcttgttgatgactgtgtatattatcttgatgagaataatgaaggtcaggttggcagaatcataacggattcccatgtgattaatacaggaaattctaatcctaattttgagaagattcgtgaaattaagaaaatttcatttgataataagattatatatgagccggaatttggattgtatggtctgtcagaagatgaaacagcaatcgcagtgatgatgaagaatacggcagagtatagcagaggaaatgcgtctgcaccatatagtatggaggatgcccttgcagatgcgtatgccgccatcttactgaagaaggctgtggaaacaggagaagtggtgcatagttaatataatgaaacggggtacatggtatgcagaaagaattgttaaaggtggcacttataggtgtaggaagtgttggaaagaaatatgccagaatgataacagcgggagaagttccgcatatgaaattatcagctgtggttataagaagagatgaacttattgaatggggcgaatcacttgttaatactgatggtgataatgcaaggatattcaggagtgcagaagaattatttgagacaggagaatcatgttatgatgcagttattatagcaactcctcataaaactcataaagaactggctttgaaagcatttgcaaagggaaaagcagtgttatgtgataagcctgcagcggcagatgtaggtgaagcacttgcaatgcagaaggctgccagtgaaagtggcagaatatatggaatgatatttcatcagaggctttaccctaaatacatcaggattaagcagatgatagataatggtgaattaggagatataaagagagtatgtcttattaattcacgatatttaagaacctcatactatcataaatctggctcatggagaagcagctttgcaggtgaaggcggtggagcacttatcaatcagggacagcatattcttgatatgtatcagtacctgtttggaatgccacagaaactttttgcagcgattccatttggaaaatacaacgactttatagtagatgatgaggctactatcgttatggaatacgacaatggaaagacaggcacatttatactatccacaggcgaagcctgtcacgaagagcgacttgagattataggaacgaaggcaagaattcttctggaagacgacacgctcaccattacaagacacagagatgtatgtgagtatatcaagaacgaagaagtcaactcaaggcagaatatgacatttacagaggaaactatacagttcgagaaggcatctgagccatatgcacagctatttgaaaactttgcaaatgcggtgcttaaaggtgatgagtcttatctgaccgttaagggtagtgagggaattaattcactcatgttgtgtgccagtgcctattattcagcatgcaaaggcataaaagtagaacttccgcttgaagcctcagattataaagagcttatggatgaattgattaagaaagaagagggagaatagattcagtctattcttcctcttcttcgtcgttaaagccgtggagcagaaaatcgttccacctggcattagtttcttcaagctcttttttctgcatgatacggtttctgtcgcttagaatggaaatcatttcatcagctatctcctcaacaggagggtggtcgtaatgatagagataaccaatcatgcggctggcagtgaaatcagtattgagattcttagtgacaatatcacagaaatttttctcataacctctttgcagcattaattcatataattgtctgcttaaatctgatttgggtttcataaaatgtgactccttgtttgtggtgcgtaatatgtctgtttattatagcataaatatttgaaaaacataatgtattgtgatatattacatttgtaatgatgtagcattaaaatagtgtgctatatgaatatggaggtattttttatgtcaagtacaattcaagtaagagtggatgacgatttgaagattaaatcagataatttatttaaagaattaggaacagatactacaacggctataagaatgtttttaacacaggcagttgctaataatggatttccatttgagataaagaaagtggcagctaatccttacattgttatttcggaaaaggaagttcttgacagattagcaaagtcaagagatcagtcaaagaatggagaatattcagaagcaggtgattttgttgcagatatgaggacaaagtatggcatataaagtggttgttactaatgatgctaaagaaaatatgcaagagtatattgaatacatattatatgaaaaaaagaatcatcaggtagcaggaagtctccttgatgattttgaatatactaaagatatattagcagaggtcgcaggaagtttaaaattatgtgataacgaaaaattgagaagtttaggatatagaaggataggctttaaattccatagatattttatgttgtatagagtggaagatacaactgtttatatagatgggatttttcatgagttacaggattttgagaataagattaactgagggataataaatatagcaagatataattttagtaaaacaattgtacataatgggttgaataaaacaaaaacaatatatggaaccagatgttattatgtaaagaaggggaataataacttaatctgaccatataaatttaactcaaaatgacaatgtacacatgtcactttatctgttattcttatgtgcaattaaagtatgttgatataggaggcagataaaatggaagcacaacagacacagttagtacagcaggggattaagaaagaaggatttcatattactgtaacacagatgtgtgtaacagcagtatttatggcacttacatgtgttgcaacaatggtggtgcagattcctattcctttgggatatgcacatttgggagacagcgtaatacttatatgtgcatttttcttcggaccagttgttggcgcactcgcaggaggaattggttctgcgatggcagatatattaactggatttgcagtatgggcagttccaacacttataataaagacaatcatgccaataatagcatgtgcaatatttggcaatatgaaaagcaagtttgacagatgtaaggttatttcagtgaaaggaattgctggtgcagttgttacattacttttcatgacattaggatatgttgtatttggtgcaataatagcaggcagctttgcagcaggattagcttcggcaccaggacttcttcttaaatcagtagttaatatggttgtatatctttttgtggcaacaggaatgtctaagattcttggcagaaataataattgattacaagtagaggagaatagatatatagtctgtagggtggtacttttgggtatcaccctttttcgtggttgatacacgaggaagttttacttcctctagaagatatttatcgtggaggtaactcaaagtcaaggaatcctcatatgcagacaatgttaagattagtaggatttggagataatgctggttctggcttcccaacaattcttgaggtatggaaatcagaagggtggattgaacctctattaatagaggatacaaatcttaatcaagtgacacttgtgatgaagatggaaaaggaatctgatgaagaattagcagaaaaatcagcagattcaaaaaacatgaataggtcagatttatcagcaagacacaaacagattttaacaaatatggatataggtgttgaatatagtacggaacagatagcagagaagattggattaaaaggtcctagaacaagacaactattaaatgaattagtgaataaggagttattagcttgtgttggaacaacaaaaagaagaagatatattaagactgttgattgaaaatcacatgatacctatcagtagtcgcaaatctaaagactttataggtcaaaaatcacatcaactactatattagttgcaaattacacctataaagtaactataatcatgaaccttataggaaatttaacttcaaaaccacattttagacagcgtaagagggaaaatcagcctataagatgcaatatatttattttcttataggaagccatgactcaaaaagccaagatttaccaccacatcccccaaaaaatgagaaaaaagccgccagcagttaagctggcggcttaaattaacacttacatgaggtatagccacaatcaccgacggtggaagagctgtttgtcagcgtacattgctgagtcagcattttttactatttcaataatatcgcttccgttgccggatgcaacaccgacagcacttttaaaaataatccgttaaatatacgaatgaacgcacaatttatatcttaacatttagttatatcgttttccagcttttttaattcttttaattctcttatagtaaagtatccgcatacgatagcagcggcagcgtctgctataggtccggcatacataacaccgtcaattcccatgaatataggaaatataatgataagtggcagcaggaaaataatctgccttgtaagcgacataaatacaccaagctgtgatttgccaattgagttaaagaaattggaagttacaggctggatgccattaacaattgtcagaaacatatatattctgaaatatctttcagagaatttaaagtacaggtcacttccgttaccaaatatgctgataatctgtcttgggaatatctggaagcatgcaaatgcgattaaagacagggcagaagctgcaccaagtgcaagaagataagtttttcctacacgggcgtacttctttgcaccatagttaaaacctataactggctgagttccctgagatattccaataacaaatgacatgaaaatcatattaaccttagttataattccggcgcaggcaagaggaatgtctccaccgtatattgactgtgcgccgtagtgtgacagcgtattgttcataacaatctgtacaacagtcattgcaatctggttaaagcaggcacttgctccaagaataaatattttcttacagtggtcaaatgatacaacaaagctttctctgtcaagtttgattgtcttaaaatgaaacatataacgcaggctgattgaaaatgaaattatctggcctgtaattgttgcaagtgccgcacctgtcattcccatgttgaaaacaaatataaataatgggtcaagaatagtgttcacaatagcaccgacaagcattgaagtcattgaatatcgcgggcttccgtctgcaagaataagcttgctcataccagtgttggcaattaagaagggaaagccaaacgcagtgattcttgtatatgcctttgcatatggaagtacatctttagttgcaccaaagaatttaagcattggtgttaagaatatagtggttacaaggaacagaaatattccaaacaatgccataagtacaataccgttaccggcatatttttcagattcgtgtttttcaccggcgccaagatgcagtgagaaattagtcgcacttcctataccaagaagaagcgaaatagccgtacatgttgttgacagtggaaatgcaatgttagtagcagcatttccaagcataccgattccctggccgataaatatctgatcgacaatattgtaaagtgctgtcacaagcatcgaaataatgcatgggattgcaaaaccgacaagcagagtggattccttcttgtaaccgagcggattatcttttgtgttcatagtcgctgactgattattcataataaaacctcataatattattaaaaactgataatagcataattgatatcataacacattatgttaataaatgtgtagcctgattttgtagcctgattattaaaatgtgctgttatatgctttgcgtttgtgatataattcatgtcatgtaaacatataaagccggagggaaatatggataattattcaattaacacaaaatgcgtccaggcaggctatactcctggaaatggtgaaccaagacagattcctataatccagtctactacatttaagtatgatacaagtgaggatatgggaaaactttttgaccttgaagcaagtggatatttctacacaagacttcagaatccaactaatgattatgtggcagctaagattgcagcccttgaaggtggaagtgcagcaatgcttacttcatcaggacaggcagctaatttcttcgctttatttaatatttgcgaagctggaagccatatagtagcatcatcttctatatatggaggaacatttaaccttattgatgttactttgaagaagatgggaattgaagcaacatttgttgaccctgactgcacagaggaagaacttaatgcagcgttcaaggacaacacaagagcagtatttggtgagacaattgccaatcctgcacttacagtattagatattgagaagtttgcaaatgcagcacatgcacacggtgtaccacttatcgtcgataatacattcccaacaccagttaattgcagaccaattgaatggggagcagatattgtaacacattcaacaactaaatatatggacggacatggagcagcagtcggtggagctattgtagacagcggaaagtttgactggatggcacatgcagacaagttccctggactctgcacacctgatgaatcatatcatggaattacatatgccgagaagttcggtaaagaaggcgcatttataacaaaatgtacttcacagcttatgagagatttaggctgcatacagtctccacagaatgcatttatcttaaatctcggtcttgaatcacttcatgtgcgtatgccaagacatgttgaaaacggacaggctgttgcagaatttcttgagaagcaggataaggttgaatttgttaattatccgggacttccttctaacaagtactatgagacagctaagaagtacatgccagatggcggctgcggagtagtttcattcgagttaaagggtggaagagaggttgcagagaagtttatgaagaatctgaagcttgcagctatcgaaactcatgtagcagatgcgagaacatgctgccttaaccctgcaacatcaacacacagacagatgaatgatgagcagcttaaagccgctggaattccagcaggacttatacgtatctcatgtggtcttgaggataagaaggatctgattgcggatattgcacaggctttggaagctatttgatttaagtaagaaatatttttatatgaataaagtcgttaaaatgatgaaatttttatggataaaagtcatcattttgacgactttttatttacaatgaggggataaagtaataaattatttataaatgttaatttaaggagcaattattatggtaaagcatgttattttatggaaattaaaggacgagcttgcaggagaagaaaaagagcaggttaaggcaggtattaaggaaggacttgaaggtcttgcaggacagattccggggcttatagaggtaaaagtaagaacagagtgtcttccaagttctacagcagatgtaatgttagacacaacatttgacagcgtggaaagtttaaagggttatgccgtacatcctaagcatgtggcagttgcagacagcaaggtaagaccttacacagcaatcagatcatgcatggattacaaaatttaaagatttatcatatacagcaatagtggaggacataatgatggaatacatttcaagaaacgatgcatttgaattacttaagaagtacaataaagacccatttcacattcagcatgcattaacggttgaggctgttatgaagtggtatgccaacgaattaggctacggtgatgatgcagaatattggggaatcgtaggacttcttcatgatattgattttgaactttatccagagcagcattgtatcaaagcaccagaacttttaagagagggcggcgtatcagaggatataattcatggagtagtttctcatggctatggaattacagttgatgttgcacctgagcatgagatggaaaaagtgctttttgcagcggacgagcttacaggacttatatgggcagcagcacttatgcgtccatcaaagagtactaaggacatggagcttaagtcattaaagaagaaatataagagcaagggctttgctgcgggatgttcaagagaggtaattgagcgtggagcagagcagcttggctggggacttgatgaacttctgacgaagactcttgcagcaatggcagcctcagaagacactattaatgaagagatggagaaggaaaatgtttaatactccaacagattgttacaattatataattgagaatgaccttgaaatgtcagtgcttggtgcaatgatgaatcatgttggcggatattcaatagcagagattgcagatggaagattccataacagagacggagcagtctcattttcatcaccaggttataagataaacattcctgttactgatgatgaaatagttacggcagtgcttaatgggctgtatgtaagtgcatttatatcaagaaatcaggataagtaccagatacattttcttgtatcgggatatcctgtcaatatgaaatgccgctacgaggagcatattgcaaaaggtgtggtaaaatacatgataatgtctactattgttgcgtgcagattagatagtgagaaaaaactgaaagaatatatagcagattaaataagagagccaggatatacggactgacaatggggttgaagttcgtatatcccggctctctttatgagggggaaaaatgtttttcaaacatccgatgactgctgtattgggagattagacagccatcttttttatgaaaaagtttgtctgttgtctttcgacattgttaatattaaatgggaaatgtgaaaatgagttggaaagtttgtgagaattttgtgaacagtgatattatttgataaaaataataaaaattgtaaaaaacaagttgataattttccaaactctgagtataataatagtaccaagagagaaatctcttcctgatgacaggacatgaagcataaggtgtttgcttccgttgcactggcaacgtaaaaactttgcatttactcttaagcatagaggataatcaagccagacgggtgagaagcctgtgattttggtggcaaagcaccataatgaaaccagtttttaaagatttgagttaatgaggaaccttcgatgggaaggttcctcttttacattaaggagaattatgaagtataaaatacagaatacaagaatgctgagtccaacagaattattaacgatattgtgtaaaagtgcaaaattgtattcagagtatgcagatactactttattatttatatttagagaaaaaaagtcagatgtatatgattattatgaagtaagatatggaaaaaataattttatgcatctggcaggaattaaaagcgaaacattgagtgcgacagcattttatgaggcttgtgaaaagcaaataataaaaagagaagattgtaaaccaagaagagattcaaatactatgtatgcaaaagcagctgttatggaacagatgttgaatttgcgaaacagcaagtgttataagataggcgcaaaagatttggtgacgcgggataatgattttgaaatggctacaggtaatgaatgtggagtaatcgggtatgattcaaggataaagaaaaaaggaacgcagattgtggacaataccaaggccccgattccaactacattattgaataatcctattacagattattgtacaagaccacagaaaataatgtttattctgcagaaatatgagggagagagtacatataataaattattttatgaaataaagaaagaattgtttcaaacagagaaagagttcttttcagatgaattaaaaaaattaataacaatgtagtatcaactacaattaaaatatcgtatagaataaggaggacacatttacatgaaagagttaagtaacagatcagcaaattttacagactctgtcatcagaagaatgacaagagttgctaataaatatggtgcagttaatttatcgcagggatttcctgattttgacccaccaaaggctataacagacaggcttgcaagagttgcaggcgaaggacctcatcagtatgcattgacatggggagctaagaatttcagagatgcagttgctaagaaatatgaacatttttcaggtgttaagattgaccctgagacagagattgttgtcacatgcggaagtactgaggcaatgatggctacaatgctcagtattactaatccgggagagaaagtcgtaatattctcgcctttctatgagaattatggcgcagatacaattctttcaggtgcagagccgatatatgttccattagttccaccggaatttcattttgataaggaaaagttagaagatgcattcagacagggcgctaaggcattaattctgtgcaatccttccaacccatgcggtaaggtgttcacaatggaggaaatgcagacaattgctgaacttgcaaagaaatatgacgcatatgttgttacagatgaagtgtatgagcatattgtatatgcacctaataagcatatttatatgcaggcgcttgagggcatgagagaaagaacaattgtgtgcaattcactgtctaagacatactcaataacaggatggagattaggttatgttattgctaacccacagataatcgacagagttaaaaaggtacatgatttccttacagttggtgcagccgcaccattgatggaggcagcagttgtgggattagagtttggtgatggatattatgatgaacttgccgcacattatgcacatatgaaagaggtatttgtaggcggtcttaagaagctgcgattaaaatacacagacccacagggggcatattatgtgcttgttgatgtgagtgaattcggagttaaagatgatgtgaaattttgcgaatggatgacacagttcgttggtgtggcggcagttccggggtcaagctttttcagggaagatgtgcataatcttgtgagatttcatttcgcaaagcaggacgatacacttaatgaagcaataaagagactggcaacacttaaagaaaaagcgatgaatgccaagaatgtggactggagataattcatggaaatatacttaaaaccgataatttcagcgtgttatgtgttcccggttcttgccgtgcttttcacactgccgtacataatatatgaatatcataaatatggctcgatacttgtaataagaacaggggttgtgtacacatttatattctacatgattacctcatattttatgacagtgctgccgctgcctccgattgattcagtgacaccggattcagcatgtatgctgttagtgccatttgatgcggtaagaagagtcattgctactgcgaatgttactttatcgaatccggcaacatatattaatctgttcaaatgtggtgacttctggcagattgctttcaatattctgctgttagtgccatttggtgtgtatctgagatactattttaagagaaaatggtggcaggtgcttataatgtcattctgctacagcctgttttttgagcttacgcagttgtcaggcttgtatggaatatatccttatccatacagattctttgaagtggacgacctgatatgtaacacacttggaggaatggtgggcttctgggttatgccggcggttgttttcatgcttccaaagcgtgacagaatggatgaagttgcttacaacagaggacagattgtgtcggaattcagaagaataatagcatgggcgttggatatgcttgtgataatggctccggttgccatattttttgcaatagataaagaaaagtttatgaatgctgtgtacgatgtaagatatctggttgccatagcggtatatatagttacagcatttacaatagttacagtaattaccaagggaagaactataggcaaggcacttgttaatataagactagtgagggcagagagtaagaaagctgataacaagactgctgattacgaagctgagaatattaaggctgatactcacagaagagtgaatgtttttaggcttatgggaagatattttattctgtatgttttaagcctgccttctcctgtatatgcatataatctttatcatgtggcacttaaggctgatggttggagattctctgtcagtatagcagtatgtctattgtgccttatggttacggcatattttgcgatagatttcatattatgtctgttcagcagtacacggcagatgttttatgacagggtgatgggaattacgcatgtcaatatggtgaagcagaaggaaaagatatcaaaataa

SEQ ID NO: 714 - DNA, 17105 bp, unidentified
  source 1..17105: mol_type = unassigned DNA
gtgttattggtatatgaaaataaaaatacgggattatcatccgagtggaaagaaccagtacatgtgccgccgcatctgcatgaagcaatagaagttgtgtatgtaacggatggagaagtagagcttggagtgggacctgaattgttccatatggatgaaggggattttgcaataatatttcctaatgtaatacatcattatcaagtttttgggaaaaagaagaataaggtaatatacttatatcttgatccaaaactatttccctcatactataaagaacttcagaattacagtcctgaaaatccagttgtgaaaaaaagaaaagtgcatccggatgtagtaaatgctataaaatatttggcagaagtaacagatggcaatccaatgctgataaaggcatatgcacagatgattttagcacatgttttcacaacaatgccattgattaataaaagtgcagtaggaagagatgatcttatttacaatgcggtggaatatgtagccaaaaattttagagaaaacatcagccttgaaaaaatggcatatgaattgtgtgtaagcaaatatgtattatcaagaatgtttgcgaagacatttcattgtaattttagtaaatatgtgaatggagtccggttaaattatgcagttgcagaacttgaaaacacgatggattctataacaaacatatgtcttgattgcggatttgaaagtcaaagaacttttaaccgtgtatttaaggatagatataaaattacacctagagaatatagaaaaaggatggaacatgataaataatattttatatgttgatggccaaattccccacaaataatatgcatattattagaaaaagcagagaacctatattctctgcttttagttatatgttttttctgtattcagatggtgataaaccttttaacttttgaaatattcggctgaaatacagagggttttcatagcccacaatcctggcaatttcgttaatgttatattgaggattctgcagaagtgcttctgcattgtatattcttttacgcataataaattgtttaggtgtaataccagtatataagcggaaattacgaatgaaccagcttgtacttatattattttgctctgcatagctatcaatattaattggttcattataatgttcactaaagtatgaaacagcattgtctatttcatcagctttatgtgtattatcatgagatacagaagataaaaaattccgatgtagtcttataaaaatttgtcgtagatacatttctagcatttcaggatatccattctgacacatctgcagttctttgatcatttcacgaaacagaatctgatattcagatccagaaccacagtagaaaactcttttgtcatcagttaatccataggaacgaagaagattggtaacattattcccagtgaaatgtacccagtaaacttctacattatcttttgcataatattcatatttttgaggttctttaggtctgtataataccatatgaccagcatgaacgatggtttcatctgaatcattattaaaatggaagtgggcttttccagatgcgataaaaagtaattggaaatccagtctgccacgcgggcgccatgtagggagttttggtttagtatatagcttataggtaccacacatggttataattagttcctttgatttatctttcctgtcaatagtggaattgttcaagtatgcgttattggtatacatataaagccccctttacgtgtaattaaaaaataatatgcatatatactgttgtaaatataggaaatcattaaatacacaatgttattttatcattttatgcatataatgtctatttactttaataaaacaagtcataaatgaaacaaactaatgtaatgttataaattatttgaattataggctttgaatgaaaaatcataatggattaggaaaataaaaattatgcttaactaggatgactaataatattgttttgtgcataatctgtacaatttatgatatggattttttgggctattttttgtatattatgtataacaagaatgcaaggtgattttacggataataaagaataacaataggattaatttctattagtaagtataattagatatgatcggctgataaaaattattcgttattatatattatccgataaatgttgatttaagtggggtgattgagatgcagacagatatattgatacaaagtttcctagatggcgtgtatgatgagagactttttgatgtgtatgctgatgagacgaaaatttattatcaaagagaacgctatatcaatgcaataaagaaattcgagcagtgctataagccgggagatgtggaaatattcagtgctccgggaagaactgagatttgtggtaaccatacagatcatcagaacggagaggttttggcagcctcagttaatcttgatactattgggatcgttaaaaagacgtatgataatgtaatcagattggtttctgataactatgatgaaatcattatccggcttgatgatatatctgtaaaggaaaaagaaaaggaaacaacaaaggctttgataaaaggtgtggtttctggatttcttgagagaaaatatgcagttggaggttttcaggcatatataacaagtgatgtgctgattggtgcgggactttcatcttcggcagcatttgaaactttgattgggacaattttatcaggactttataattgtggaacagtttcagcaacagagatagccattattggacagtatgctgaaaatgtttatttcggaaagccttgtggtctgatggatcagatggcaagttcaattggtaatcttgtacatattgattttgccaacccagaatacccatatgtagaaaaaattgattttgatatggaaaagtatggttataggttatgtattacagatacaaaaggttcacatgctgatttaacagacgaatatgcagcaattccaaaggaaatgaaactggttgcaaaatattttggaaaagaagtgttgcgcgacatatctataaatgatgtattggataatattactgatttaagaaaaaaatttggagacagatgtgtccttagggcattgcattttatctatgaaaataaaagagtacaaaaagaagtaagtgcattgaaagcaggaaatataggagcatttctagatgatgtgaaagcgtcaggcaattcttcttttaaatatctgcagaatgtttactcaaatcaggatataaaaaatcagaatgtatctttggcattatttgtaagcgaaatgtttttgggacaaaatggtgtatgcagggtacatggaggaggttttgctggaaccatacaggcgtttgtgaagaatggatatgtggagaattacaaatacgaaatggataaaatatttggtaaagattcttgtaaagatttgagaataagaaaatatggtggcataaaagtgttatgaattagaaagaaggtattattatgagaatcttggttttaggcggggctggttatattggttcacacacagtatatgagctggttgatgcaggttatgaagtaattgtagttgataatttgcttacagggtttaaagaggcagtacatcctcaggcaaagttttatgaaggagacataagggacaagatattccttgataatattttatcaaaagaaaagatagatggtgttattcatttcgctgccagctcacaagttggagagagtatgaaaaatccactgaaatactataataataatttatgtggaacagaagtgttgcttgaaagtatggttgagcatggcattgataagattgtattttcatcaaccgcagctacatatggagagccagaaagtatacctattttggaaacggatcgtacacttccaacaaactgttatggtgaaacaaagttgtcaatggaaaaaatgtttaaatggacatctaaggcgtataacttacgatatgtttcacttcggtattttaacgcttgtggagcacacccgaatggaaaaatcggagaggcacataatccagaaacacatttgataccgcttgttttgcaggttccgaacggaaagagagaatacatatctgtatttggaaatgattatgacacaaaggatggaacctgtgtaagagattatatccatgtaaatgatttagctcaggcacatatccttgcaatggaatacctctcaaaaggcggagaaagcaatatttttaatcttggtaatggggtaggttttacagtaaaagaagttattgagacagcaagaaaggtaacaaatcatacaattcctataagagaagaagaaagaagaactggtgatccttcagtgttgatagcatccagtgaaaaggcaaggaaagtgcttgggtggaaaccgcagtatgcagatctagagacgattatttcaacagcatggaaatggcatgtaaatcatccggacggatactaggaggtataacatgaatgaacttatttcagaattagtaggttacggtattgaaaaaggattggttgaggaagacgataaaatttatgtgattaacagacttttagagttgtttagacttgacagttatactcagacggataaagcaatcagacagttatcagaaattctatctgatatgactgattatgcagcggagcatggattgatacctgaaaatacaaatgtatacagggatttatttgatactaaaattatggggattttaacacctgcaccctctgtggtcagagcaaaatttacagatttgtatgtcaaaaatccaaaaaaagcaaccgatttctattatcaattcagtcaggatacaaattatatacgtaaggacagagttgcaagagataaaaaatggaaagcagacacacagtatggcaagatagatattacaattaatctttcaaaaccagaaaaagatccacgggacatagcgagagcagcaactcaagcaaagaatgattatcctaaatgtttgttatgtgcagaaaatgagggatatgcaggaacactctcacatccggcaaggcaaaatcatagaattattccactaaagctagatggacaagattattatatgcagtattcgccttatgtgtattataacgagcactgtattgtgtttaatgcaaaacatacaccgatgaagattgatgaagctgtttttgtaaagctattggattttgtaagacagtttccacattatacactaggctcaaatgcggatttgccgatagtaggaggttcaattcttagccatgatcattttcagggtggagcatatacttttgctatggcagaagctccatatgagtatatgtttgagattgcaggatttgaagatgtgacagcgggatgtgttaagtggccactgtcagtcataagattgcagggaagcagcattggaagacttgcaaaagtgtctgactatattttgcaaaagtggcgtgggtatacggatgaagaggcatttatttttagcaaaacagatggagtaccacataatacaattacgccaattgcacgtatgaatgggaatttatatgaaatggatttggttctcagaaataatattacgacagaggacaggccatggggtgtgtatcatccagaggaaaaactgcatcacattaaaaaagaaaatattggattgatagaagtgatggggcttgcagtacttccttccaggctgaaaaaagaaatggatatacttgcaaaagctattattgaagggaaaaatattcatgatatagaggaaataaaaattcatgctgactgggtagatgaatggctggactcttatgatattacaacagaaaatatagagagtattattcagaaagaaattgcagattgttttgtgcaagttctggaatgtgcaggtgtatataaacgcacagaaaagggatttgctgcatttaaacggtttttgtcagtactataaaaatcttcacagtggttttaatagatcacatcatagactttacagtgtaagaaattcgtaaaagtaagcagacacaaagctgaggaaagttgtaaaactgtattcagattttatttaggtactacggatataaacatttattgtaattaaagaagttccggcatcaacagaattaactgttacacatactgtatgtaaaaataaaaatgatgacagttattttaaagataatacgatagctgctgtaataaaaaccaatggagttacatttgaaatcaccaatactgccacacctgattttataaaaaatattatagagaaatttagtacaaatataaacagaaatgaacacaacctccagaaatggaggtttatgtttaacaaggtgttcacgaaaagaaagataagaaaaatcatgaaagaaaggaaatagaaaataatgaacaaacaagaaagcgatatcttgaatacgcttttattggaaccatttatcaatcaaaggattctagcagaagtatcaggtcattcattaggagtagtaaaccgttcactaaaggaacttatcaaagctgattatttagatgaatctatacgtccaacagtgaaagcaattacagaattcaaacagaaaactccacagcgtgcagttatcctggcagcgggattcggtatgcggatggttcccattaatacggaaatgccaaaaggtcttttgaaagtcaatggtgagccattaattgaacgtattatcaagcagcttcatgaagttgggattaaagaaatttatgtggttgtaggtttcatgaaagaaaaatatgagtacttgattgatgaatatggtgtagaactcgtggttaatgctgattatgcggcaaagaacaatttacattcgatcaaacttgtaaaagaacatttggagaatgcttacattattccttgtgacatttggtgtaatcgaaatccgtttcatcgccatgaattgtattcctggtatatggttagtgacatggtggtcaatgaaagcaatgttcgcgttaatcgtaaaatggaactggtaactgtgccagaaagttctggtggcaatgcaatgattggtatctgctatctggtaaaagaggatgcagatacagttgcgaaatgtattgaagagttatgtaaaaatcagcggtatgatggagcattctgggaggaagctctttataacaaggatcggatgatagtactagctcgcgtggttcattcagcagatgtagtggaaatcaatacttatgagcaactacgggaaatcgacagcaattctaatcagttgaaaacagatgcaattcaggcgatttgcaatgttctaaaagcaaagccggaagcggttacgaatattactgttttgaaaaaaggtatgacaaatcggtcttttctgtttacttgcaaaggaaaaaaatatatcatgcgtattccgggtgagggaactgaccagcttatcaatcgtcgtcaggaggcagcagtttatcaagttattgaaggaaagcacatctgcgatgatattgcgtatatcaacccacaaaatggctataaaatcacggaattcttggaaggcgcaagagtatgtaatccattgaactacgaagacgttaagaaatgtatgatgcggctacatgcgttccatgacttgaaattaaaagtaaatcatgagtttgatattttttggcagacggagttctacgaaacactgtgggatggaatgccttctatttataaggattatgagaaaacaaaagcaaatgttttgtcactaaagccttatattgatgcacatgtgggagaaaaagttctgactcatattgatgcagtaccggataatttcctttttgtggagaaggacggaaaagaagaaatcagactgattgactgggagtatgcaggaatgcaggatcctcatgtggacgttgcaatgttctgtatttattctctttataataaacgtcaggttgatcaattaattgcagcctactttactgaaggctgtagtgatgagattagaatcaagatttattgttatattgcagcttgcggacttttatggagcaactggtgtgagtataagagaaatctcggtgtggagtttggtgagtattcgcttcgacagtaccgatatgcaaaggattactatcgaatcgttcaagaagaattgaaaaagcaaggggaggaagagtaaatgccaaaagtagaaagagctattattatggcagctggtttaggaaatcgaatgcacccagtgacactgtcaacaccgaaaccgatggttaaagtgaatggggtgcggatgatcgacacagtcattgatggtctgcatgaaaatgaaatttatgaaatttatgttgttgtcggttatcttaaagaacagtttgtgacacttgaaaaggagtattctggtgtcaggttgattgaaaatccatactatgatacttgcaacaatatatcttccctttatgtagcacgagagcatattgaaaatgcaattattctggatggtgatcagattatttataatcctgaaattcttgcaccagaatttgaacgctctggttataacagtgtttggacagatggtgaaacggatgagtggcttcagactgttgagaatggcattgttacggcatgcagtcggacaggtggaaaaggcggatggcagctgtacagtatttcccgctggactgcagaggatggaaaaaaactaaaacgtcatctcgaaattgagtttgaacaaaagaagaatcaacaaatctactgggatgatgtggcgatgttctgctacccaaaggagtatcaattgggtatctgtcctatgaatagagacgatattatagaggtggataatctgagtgagctaattgctctagatgccagctataaaaaatatgtggaggaaaagtaaatgaatactaaaaaagaacatgcaaaaatagactggatgataacactggtgcccttggcaatcgtaattgcattatgtgttctattctttttggcaccagaacaatcgaatgcagtactgagccagattcgtttttttttaggtgatacttttggaacatattacttagtaattggattgggaattttcattctttctctgtatattgctggctctaagtacggtaacatagtttttggcgagcaaaatgagaagccgaagtattctttttttgtgtggggttcaatgatgttcacctgcggtcttgcagcagatattctgttctattcgttttcggaatgggtgttgtatgcaactgatccgcatctgacagagatgggaagtattcaggattgggcaggcgtatatccactgttccattggggcttcattccgtggggattctatctggtactggctgttgcctttggctttatgctccatgtaagaaaaagaaaccgtcagaaatattcagaggcttgccgtccgattcttggaaagcataccgatggctgggcaggtcgcattattgacctgttagctgtatttgcactcctggctggtactgctaccacatttagcgtggcaacaccgctgatggcaactattattggcgaactgttccatgttgccgttagtcgtactgtaatcaacattattattcttctgattatctgcgctgtatatacatattctttactgcatggatttaagggaatcagcaagctggcaaacatttgtatttatatgttctttggtctgattgcctttgtgcttctgtttggtggagaaacacggtacattattgaaactggtttttcttcacttggtcgaatgatacagaactttgttgatctgtctacatttactgacccactccgtacatcgaactttccgcagaattggacgatttactattgggcttattggatggtttggtgtgtggctgctccgttctttatcggaagcatttctcgtggcagaacagtgcgtcagacaattcttggtggctatatatttggtgttggttccacattgacgagctttattgtactgggtaactactctatgggaatgcaggtgaccggaaaagctgactttattgcacagtatctggagagcggtgacctgtacgggatgatcgtatctatcattaagacgatgccgagtgcgcctgttattatggtagttgttttgttgacaatgattgctttttatgcgacgtcttttgactcaattgcattgacagcatcctgctacagctatcacacattgagagatggtgagcaaccgaataaggtcattcagttgatgtggtgtattttgctgattttgcttccgattgcattgttgtttgcagaaagttctatgaacaatcttcagtcggtgagtattgtggcggcattcccgattggagtggtaattgtgatgattgcggttagctttatgaaggatgccaaaaaatatatgggaaatatggaagaaaaaggtcagcaagaggttgataatgttgacaacgaaaaataaatttgacaggagagcatgttgaattttaaaagtacaatataaaaatgtgttgatagtaatcagaatctttgcagttggatataaaagggtcaggttttataataatttttctcccgctaatttcagaaaatgtctattcaggtttatgtttttagaaaataaactgcctttgcaagatatacttgtaaccatgaatattcctatatgtaatattgtaaattatatttcggatgacgagatgattgctgggtgtacggataggattgggaatgggtggattaatgataatgaatgggatgaaatatataacataaatttataataagattgaagtcagcaaaggcaattgcgtcatggtaaaagccggtacgattcatgctatcggagctggcatcctgatatgctaaatccagcagaattcaaattgtacttacagaatgtatgattgtgaccgcagggacaagttcggaaataagcgcgagctgcatgtagataaggctcttgatgttgtggatactaaaagatatgtgccatatgaaagcagcattaatgcatatgatgaagctacgaatgaagccgcagcaactattgaggcggactcatcagaaggtcagttattagtaagctgcaaatattttgaatgttataaatatgatatatccgattcagtatctattaatgttgatacagcttctttccgctctgtgatatttacggaaggatgtggaactatacgcgtaggagaagatgttaaggcatataaagtgggtgatagtttctatataactgcaggtaataaaactgtggaaatagagggaaactgtgttgctattgttacgaaggtctgattgagatgcaggtatgtatttgtctagttctagttttgttatggacacaaaataatgcatgaatttttaattaaatatatgtgaaattgacctccgttggtgaagcatttgctttgctggcggagtttttttgatattctggaatgtggtttgtgattggagcagataattcaggtagagaattgcaatattgattgataaacggattataatatgttaatatttaggcaagtcggattgtgaaaataattgtttggattaattcaaagatacatagggtaaggagtaatgtactatgggtaaggttgggttaattcaagttgtaaaacgaagtccccttggggactgggatatttgatgggagagaggttgatgaggcctctcttgaagtgttgctattattaaatataaaattattgaaagagtaaaaaaattatatattaaatatgattatataaaaaggagaatttatggcttttaagacacgaaaaaaagaagagttttcatattcatcacctcaagagatgtatcaagataataaactaaaaaaaataatgggaccattagattatcaagcagtaatgctggataagtatatagaaaattatgatgaaaagacgttggcattagaattaccgacgggaagtggtaaaactttagtgggattattaataggcgaatacagaagacgtaaaaataaagaaaaggtggtgtttttatgtcctaccaatcaattagttaatcaagtggttgaacaatcaaatttaaaatatggattaaaagcaattgctttctgtggaaaacaaaaggaatattcgccaaaagataagagtagttttctaatggcagaagctattggggttacaacatatagttcgttttttgcattacattctttttttgaggatgtagatgtcataataatggatgatgtgcattcttgtgaagattatattatgtcaaattggactattcagattgatggtcaaggtacaacttttattgaaatagctgaattattaaaaccatttattagcgaaacagattataagtatttattagaggatgaatatattccagaagttgcatcatggtgtaatatgttgcctatgcctttaatattaaataaactagatgaacttcaatcaattttgcaacaaggcatagaaggtggttcttcaaattattatgcatatttgagaatgtctgaaaacttgaaagagtgtaatatatatattgcaaatagaaaaattcttatacgtccttggatagcaccaactatgtcctttaaaccatttgtagatgcaaaacaaagaatattgatgtctgcaacactaggaagaagtggtgaattagaaagaattacaggtattgaaaaaatctttcgtttgccaatagtaaatgattgggacaaaaaaggattgggaagaaaattttttgtttttccggatttatcattgggaaaagatgaacagtagaatataattgcagcacttcaaaatttgtgtaaaaaaagtgtctttctggttcccgattctcaatcggtagatgctattaaacaattttatgaagataatttaaacgacacaaaagtttttgatgcaaaggatatagaagaatctaaacaatcatttgtagatagccctgctgcaacagttattttagcaaatcgttttgatggtatagatttttctgatgatgagagtagattgctatttatttggaatttacctaaaacgactaatttacaggaaaagtttttaattactagaatgggagcttcaaaactatatgcagaaagaatacgaacgaggataattcaggctgtgggtagatgctcaagaaatcctagtgattattctattgtttgtgtaataggggatacaattcagaatgatttaactaaaaaggaaaaaattaagcaatttgcgccagaactgagagcagaaattcaatttggtttggaaaattctatggattattcaaatgtgaatgatgtgttggaacaagctgaagattttttgaatagaactgcagtgtggcaaagagcggaagaggatatagtacaattaagaaatgaatattggaacgaagaaaataatgcagaagagcagataaatcaaaagctacatcaatcggcaattcttgaattgaaatttcaatattcgttatggaaaaaagattataaatcagcatatgaatatgctaataatattgttcaaaatttaaatgcacctgcgctaaatggatataaatgtttttggaattatatgacgggatgtatggcgtattacttatttaaagatggacaagcagagtataagacatcaggcatacagtgtttatcggatgcagtaaaagaaaatatgggaataagatggttgcctggcttatcgggaaaattgttttttgctaaaagtgaagatgttaaagatacagattttttcgttgattgcattgaaaagatagaaagtatttttacattattgccaacattgcaaaaaacagagaaaaaaattgaaagtattttaagggatttaaattcgtccaatggaaatgaatttgaaagaggtcataaaggattaggagaattgttgggatttatctcagaaaatcctaatagtacaggtgcccctgatccatattggataattaatgaaaataatttagtcgtttcagaagataaaatttatgaggaaaaagaacaggtaaaaaaagtaccgatatctgatgttagcgaggctggaagacataaagcatggattgttgaacacgagaaaagaataacgaaaggcgctaatgtatatacaattctaattactaactcggatgggattgatgatgaggctcgtatatatgctgatgatatatattatgtgaatagaaaagaatatgttgactgggcagttaaagcacttacagtcattcgaagcgtatggaacacgttttcaggtgaaggggagagcgaatggagagaagcggttcacaaagaatttataatagcaggaataactcctaaagattatttgaattttgtatgtaataagaagcttaaagacatataaatatttgtcgcttattgttttatttggaacttggctgagttgcataaagttaaaatttgaaaccaaaggatttgttaaaaacattgagcttgatggaggcgctgtgatgaacagtctgattgtaacttatatgtgggttcagatggaatgtcctacgggtgtatgtggggttcgtagccagatgcttatatgaaatcaaacagacgagagaataataaaacgtaaataaacgaaaatacacctagagttttaacctctgaaccccaccaatagattattataaaaagtccgagacatatcccggactttttgtcgactagtgtatgatcttgtggctggcgaaccatttcgatgagtctttagattccagagccggtaatgagtccttatagggctagaacaaaccaccggttaagccgttggttctgattgttctttgggagattttatggctaaggtattgaagatttatgatgaacaaatagcacttttgaattgaaactaatattaaaaatctatgaaactctaataaattaataactaatttaatatttgatattcaatgtcagataagaagtcgggtttcagattcatgcatatctcattatttaaaggcacatgaatatattccattatggggcttaatattatattaacattaggaacaatcagcaatttttataaagttatgaatcaaaaagaaaaacaggagacatcaaaaatatttaaaatacaagataatgaacttgaaaatattttgatgaaatatatattgcaaagtaaacacaaaggagtcatatacgtctaaacaaaaagataaaaagatagttttttcggaagaaatagatagcagcattaatggtattgcattgggaacagcatttgttatgctatctatatttgttgtttattttaagatatttaatactacaatatagcagaaaaatttatagcagttattcttttgggattgggaatagctggaactttaactgaaatagggcggataaagaaggcagatatgaaagggctggatgatttaattgtagggttattattaacagttgtttctgttgttgttattttaaagtttcgaaatgtagcattaaatattggtttatttatagtactgttactaggttcgtatggaatgattagaggaatattagaaattctctattcattaaagcttcaaagaagaaagagtaataatgttaaaatagaaattatgaagattgttgtagctgtaactgaattcatttcattaatagttgtgattttacaacttgtaaaggaattagtatagataaacaagttaatctgtatttacaatttgtcaagaatttattatgaagatgctgaatatataaatactgatgatattgttttgttagagaggttctattttaaataaattattattttgagtacatgtaattaggaaaatgatgaatttttatattgaaaataaaaacacaaaatacgttgataaataaaaaaaacaatgatatattatatttgtatgagaaataaaaacgagtaatgtgtttataaatttggaggtagacatgaaacttcttcgtattacagcggaaggattgccgttatttaaagaaaaactggacttatcattttacgcacagcagagagtgtctgaagagcaaaagaatattctatatccattattttcaaatatttatgtaaattctgcaacaggctttattggcattaatgcgtctggaaagacctctgtcttaaaggttattttacttgcattggaaatactcaataatgagccaattaatcatattgaatctcgagatatattgggaaactcaagccagattaaattaaatatgtttttttattcaagtaatacaaaagaagtatgccgattggaaacaataattattgctcagaagaataaatcagaaggaataaggtatagcatcggttcagagtcattgtggacaaaatctgcggatgaggttattacccgtaaggcaatgcttaattttgaaggaagagagcctataatggttagaagcagccaggaggattttttatcagatgatgtaagtattatgattgcgaggaataaaaagactaaggataatatgcgtattgttaatcttctgaaatacacaaatgaaaacgttttgcggatttctgaagatattccagttgaagttatcacttttttggatccgacaattgaaaaattacactttgatgaaaatgacaataagatattaattcatttgcaattcagaggcaaagaggaaattcttttaaataatccggcagagcttaacaattatctttcatcaggcactgtgaaaggaatgattatttttacattggcaaaagaagtactacagagcggtggttatattgtagtggatgaagtagaaaatcattttaataaagaaattgtaacaacattgttgcgtttttttatggatagcaagctgaatagaaatggtggaactcttattttctctacacattatcctgaattattggatgaatacgagcgcaatgatggtatatttattaccagaaatagaaatggcattacagtagagaatctttcaaacatactgaaaagaaatgatatcaagaagagtgatgcataccagagtggatttcttgagggaacaactccgacatatgaggcttatatgcagttaaagaagagtattgcctcaacacttgggtag

SEQ ID NO: 715 - DNA, 24841 bp, unidentified
  source 1..24841: mol_type = unassigned DNA
tgtagttctgcacgcggatgaccgccatgtcacggcagcggctgatgtccagtgtgatgacccgcttagacgcatcgtttacctgcgtcagacactcaatggcattgtccagcgcattgcccagcagggagtaaatgtggtagtgcttcatatcctccagacagctgccgtctgccgagcagaccagctgaatacctgcctgcccgcagagtgccgacttttgggtcagtgtgatgtccagcgccttattcccggtgagatagcgcaggttcaggttgttcatctcttcttccagacgggcgcgttcctcgtctgtggcgcgggaatactgctgtttcaggtcatggtagcggatgttgattttttccatgtctttttttgcctgctcatactgctgcttgtcacattccagcagctgcgccagcgtttcattctcttgttccagactcttgatgctgcaatttgaaaattccagcgccagaatcgtgatggcaaacaggatgcagaacgcattcagcgccagataggcggtcaggtaggactctgcgctgctgtccaggacatcctccagcacaacactcaggtagaccgcggcaatcaggaaaaagccggagtaaagcacggtcttgacattgtcaaacagcaggcgcccgcgccggatgcgcagggtgaacagcaggtagatgaccaggcagaccacaaggttgctgaaaagcagaatgacaaagttaacgcgcccgtctgtgcgcccatgctgaatccgccaaataataggcatataggccagcttactggcaatgtgctgcaccgcgtaggcacaggttgtataaaacagggcgtgcagcgggctgcagtcaaagctgaaccatatcagaccaaacagcagcgtcgtatacagcagcaattttgcccactgcggcagaaatgtcagggtatccgtcagtgcgagaaagccccatacacccgccgccaaccgcggaacgaagcagctgcggcgctgcccccacgggacaaacaggccagcgcatagaatcatacccagctggatttgctggttcagtatccaatttatgaccggcacgggtcttcccactccttttttgccatatatcgggagaatgcttcggtgaaggcgtccttgtaagtgcgcccgatgggcagtgccgccccgccgatatagacattcatacggcttaccgccgtgatacagcgcaggttcacaagataactggcgctgcatcgcacaaagccgtagggcgtcagctgcgccgcgatttcctgcatcgaaccgcggtttttgatgatctcggtcttagcgtccccgccgcacaggttgtacagcaggtcgtgctggcgcacctccacataggcgatttccgctgcatccagcagcctcgtcacggtgccgtccttgacgacaatgtgcggcggcgcagtcttttggccgacgcgcttttgcagcaccttcagcgcccgcgtcagatacatatggaaggagtaccactgtatcggctttacaataaagcccagcgcgccgacactgtacccgttcagcgcgaattgctgcaaattcgtgcaaaaaatgaggatgacgtcttgatctgtctcccggattttttcggccagttccatgccggacatctgcggcatatcaatgtccagatataaaatgtcaaaatcacggtcttgcgccgccagatagactgccgcacagtcgaactcctgtacgttcagttctgtgccgttctccgcgccaaaccgcgccagtgcctgtttcagttggtctctttcttgtttttcatcgtccacaatgccgattcggatcatcgtgcgttcctccccccgcgcaaagatctatacaaatatgatatacccccgaacgcagccgcgtcaaccttttacgagcgaatcgtccaatttttccaggatattttcggaatactgcgtgctgcgcatggaagattcttgaccactacggtggcaaaggaataaaaaagcagcaaatacatcggcaaaataacagcacagcccccgccaaaaactcatagagcttggcgggggctgtactattttaataatcagccaatatttaaatcaggcccatcaggctgggcaggcccagagacagagccgggatgtaggtgacggccagaagggcggcaaccagtgccgcaaagtaggggatcagcttggacgtgacctgctcgatggagacatgaccgatgccgcagccgacgaacagaaccgagccgaccggcggggtgatgttgcccaggcacatattgaagatcagcataacgccgaactggatctccgtcatgccaaagctggtggcgatgggcaggaagatcggggtgaaaatcaggatggccggggtgatgtccatgaacatgccgatgaccagcaggatgatgttcatgagcaggaagatgatgtacttgttttcagtcaggctcatcaggccgttggagatggctgccgggatgccggagtaggccataacgaaggacatggcagaggaggcagaaatcaggaacaggatgatgccggacgttttggcggagttgagcaggatgccaaggaagcctttgaagtcgatgctcttatagatgatggaaagaatcaggcagtacagcacggcgacgccggcaccctcggtggcagtgaacacgccggacacgatgccgccgattacgataacaatcagcagcaggctgggtacggcgtcccagatggttttcagcacgctctggctgtggtcaatgccggtggctttcatgccagccttttttgcgccgatgaacgcaacgaccatgcagcacaggcccatcaggatgccgggaatgtaaccggccatgaacagcgtggagatggagacaccgcccgcgacggtggagtagacaatgaaggcagacgtcgggggaatcagcaggccggtgggggcggaggcaatgttggcggcggcggagtaggcggggtcgtagccgttttcttcttcaatggggctgatgcagccgcccatggcggatgcggcagcaacggaggagccggacagcgcgccgaacagcatgttgcccaggatgttggcctgcgccatggagccggggatcttgccgacgaacagctgggcaaagttgaccaggcgcttggcaataccgccgttgttcatgatgttgccggccagaatgaacaggggcacagcaagcagagagaagctctccacgccggagttcatcttctgcatcgtgataaaggtgatctggtcccaggacagggtggacatggcggtcacgatagacgacgccacaatgctgatggagataggcacgccgaggaacagcagcacgccgaacacggcgaacaggataacggtggtcatagtgatactcatttgtctgcaccctccttggattcaactttttcgccggtgacgtcctcatagatgttgatgatctgcgccaggacgatgaacacgccggaaatcggggcgatggagtaaaccaggctgcggggaatacccagcagggccgagaactcgcggctggcagagacagccagcttaaagccgccgatagtgaatacgaagatggccatcagcaggatcagaccatcaatgaccaccagcagggcggtgtgcgccttgccggtgaatttgtcgcggatgagggtcagggacatgtgctcccgggtggagaaggcgtaggccgcgccgatgaagccggtccagatcaggctgtagcggacaagctcctcggtgaaagccacggggctgttgaggatatagcgggagaaaacctgaatcagaaccagcaccgtcataaaggtaagcagtacggcgcaggcaatgctcaaaattttgtccatccagaatttgatggcagcaaaggtgtttttcatggcttactcctcccctcttgcggcgtcgatggtatccagcagcgtcttgacgccgggatactgctcctcgtaggcttcgatcatgggctgggttgcctcgcggaaggcttccttgtcgacgtcatagacgaactcaacgcccatcgtctcctgtgcttccttgacggcctcctccacagcggtgtcccacatgaccttgtgggcatcggtggaatcgtgggcggcctccagaatgatttcctgatcctcggggctgatggtctcccagaccttctcactcatgatgaggacgtcggggatcatggcgtgctggtccaccgagtagaccttgcagacctcgccgtgcttgccggtggtcaaggcggtctcgttgttctcggtgccgtcaatgatgccggtctgcagcgaggtgtaaacgtcgccgtaggacatggcgacgggaatgccgcccagatagctcatcatgtcggtctggctcttcatatcctgcacgcggatcttcaggcccttcaggtcggcgggcgtgcggatggcgcgatccttcgtgtagaaggagcgtgcgccggaggtgtaataggtcagcgtgacaaagccgtcgtcaccggtggagaggaagaagtcctgcatctcctgcgagtccatgacatggtagaagtcatcggtatcgttgaagatatagggcaggccgaaggtgttgaaggcatcgttgtaggtagccagaccgggtgcagaaaccttggtcatggcgataacgccggcctgcagctgctcaaggttctcgttctcgctgccgagctggccgttggggaagatcttgacctggatgcggccatcggtcttttccgcgacctcttccgcgaactgggtcatggcgatgtggacagtgtgggtctcggacaggccgtgcgccagcgtcagcaccagcggattctcggcgctgtagccggtggagtcggcggtggtgccggacgcgccgcagccggtcataacacccagactgagcgcagccgcagcagccaatgctgcgaattttttgaacatggtatttctccttcttgtatgtatgccgttttccccttggccccctctgagagggggctgccgccgcagcggctgggggagagaaccgtgccattacccgaaatatttcgggctgcggcaaggttcaacccctccgcccctacggggcacctcccctgccagggcaggcaagaagccgggttacatcccgatcaaatcaaactgttcgaacgagacaagtatctcgtgatctttcttggggttggggtacttgatctggacgctcttgaggcgctggctgtagtaccagccgctctcggcctcctcaaacttgcggcggtgcaggaagtgcggcagctctttgccgtccacctgcacatagaacggggacttctcgcggtggatcatatcgaggtacatgctctcgacggcggtctcgtagctgccctcattcgtgaaggtcacgacggtcttaacgcctgccttgacggcgatcttcgtcttgagatacgcgcccttgcggtaatcgttcgtgcggccgtcatcctcgtacagcgtgaactcggaatccacatcgggggccatcaggatgtccagcgcggtggtcttttcggtcatcaggttgtgcagcttgttgccgctcatcgggagaatggcaccgctgcgcacaaacagcgggatgctggcaatatcaaccggcacctcaatcgtctggccgggggcgtattcctcgcgggtgtagaagtcgtagaaccgctcgttttcgttctcggtcacgggcaggtagaccgggcggacggtctggcccttttcaacgacgttcgcaaccagcagagaatcaccgaacatgaagtccacgccctcatcgtaggtggccgggtcgttctggaaaacgctgaacgtcggctgccagatgggcaggccgttctcatgcgcgcgctccatcagggaatacagcgtcgggctgagcttatagcggaagtcaatagcgtccttgatgtactgctttttgtcgctgtacatccacggctcggtgacggtgttgtcggtgttcgtggagtggatggagaagcgcggctggaagatgccgttctgcacccagcgcacgaacagctcgccctccggcgcggggccgaagaagccgccgatgtcgcagccgtggttggacacgccgcagagcgccatgcccagaatcgtggcgatgttgtatttcagggtatcccagtgggtcaggttgtcaccggcccatacctgcgcatagcgctggatgcccgcatgaccggaacggcagaccgagaacgggcggcagtcggggtcatactcctcgatggcctcgttggacagctggcacatcaggttgctcatgaccggcttcatcgtgccaatcgtgctgcccttgccctcaaagtaaacctttgcgtccttgtcaacgagggagtcatactcgcagttgtcgttccagatggaacggcagccgtatttcagcagcgcatctttaatgtactgcttccagtgcagacgggtggattccttcgtgtagtccacaaacaggccggggccgccccaccaggtaccgacagccagaccgtcaagacctgcattgtcgtcggaggcgggcaggaacatgcccttctccttcatctcgttcagcagcggatggacgagcagcataccgggcttgatgttgggcgagacaacgatgccgcgcttttccatctgggcaaaccagtctgccgggtccttgaagcgcttgtggttccatgtgaaggtgcagcgcttgatgccctcggcagtctcaacggcgcagtagccgctggacagctggaagccgtcggcagggatgccttcctcgcgggtcgtgtcgatgaagtccagcacggcatcgtcgctgttctcaggcagctcggggtagtacatcgagctgccgaggtagcccagcgcggccttcggcagcatgacgctcttgccggtcaggtcggtgtagcgctcgatgatctcgcggatggacgggcctgcgatcaaaaacaggtcaatgtcgcccgcgtcggtgcggtaggacgagtagcggtgccagtagttgcgcttctcgcggcccatgttgaaatcgcactcggcggtattgtggtagaagtagccgacagcctgcttcgtgccgcggttcaggcggatatagaacggaatgtgcttgtagagggaatccgtctccttggcgttgtagcccatggcgtcgccgggagccatattcatgtatttctcggccttgttgatctcgccggatttctcgccgaagccgtagaagcagtcgtcggcctcgatctggctggcgtggatgcggcggtggttgctgtcctcgcggtaggccaggtcgggaatatcggcgtgcagcaggctgccgtccttatcatagaccatgatgcggaacggtgccttctcgatgacgaccttgagacgcgccccctggataacggcctgcctgtcgccgtcggtcagggctgcggcggcggactggacgcgcttgcggcagttcttcatcagctcgtcggtgcgggactcccatgcggtcatagtcaggctgtaggaggcttcatcccagtcgccgtcaaagcccgcgcggatgcgcagtatatcgtcggtcaggaaccagatgcgcagctctacagcgttggtggctacggaataatagcttccgcagtccttgacagcgccgccggtgtagcacactttcatagattttctcctttctattttgcgtataattgaatggtggaacttgttatttggcagacaatgtgcatattgtacaaaatagcataatatattttgttcaatctgcgcattgtgcccttcttcgcctttataataacaaatccttcacaaaatttctgccgtatttgtaatgcaaatgtcgcaaaatgtgatataatcgtggtagagacaaaattttacaggaggcgtcgctcatgatcctgcaaaaaatgccgcattacgtggattccattctgacgcaggaggatgccagtgccgccctgcaggacggtcaggttgtcgtgggcctgtatacaaaccgggagaatgtccagtcggtggtccactcccacccgtattatgagatgatactgccggtggcgggcagcagcgtgcgctactccgtcgacggcagtgtctacgatctgcacctgggggagctgatactgttcccaggcgagatgtaccactccggcaagttcaacatcacggacacgacctcggagcggctcgtcgtgcagatagctcccggcatctgggagcgtgcctgggcgcaaagcggcctgccgcggcatgtctggtcgggcgatcctgtcattctggacactgacgccgtcacgcagtgggacttccgcggtctgctggagcggatggcccagaccgtgtatcttgatgaaaaaatacgcgataccgtgcaatgctgcgaggtcacggagctgattttgctgatcagccaagttgtgacccggcggcacaatgccccgccgccctcggccaccagtctgctcgtcgccaaggcggttgcttaccttcaggccaactacaccgacccgcatctgaccgtggcccagctggcaaagtacacctacaccagccgggagcacctgtcccgcgtgttcaaagagtacacactggaaagtatacacgggtatctgaccaacctgcgtatgcagcactgccgcaacgagctcgccgacggcaccggcgtactggacgcctgcaccgccagcggttttgcaaattacagcagctttttaaagagtttccgcgcactgtacggcatcacccccgccgagtaccgcgcccaactaaggcagagccgcagaacgccataaagaaaaccacacattgcggtgtgcacgctatttcaggtagataagctgcgcttcatttcggtcatggcagactttaaggcgcggggaaaccggctttttccctgttcggtatcggctacagtgtctgttgccttgtaaaccaaaatcgccgcgatataaacaaaaatccgccggggagccttcccaaaaacgggaaggctccccggcggtattgccttaggtcgtcatcgcagacgattttagaatcggtataattattcaggcagttgaatctccggcatcagctcatcggagacgacttgcagcatttcctccaatttagccaggtcatcgggatcgaagcgctgtttagcgcgctccatgacaaggtgcaagtaggaataactgatgttatagtaatcaatgtacttttgggtcgggcgcaggcggtattcccgcttgtcgatggtggactgaatgcgctctacatagccttttttgaccagcgagttgatcttataggcggcgttgggggtagaaagattcatcatgtggctgaactgcgcaatcgtaggttcgcccaatgccatgatgacttccatgcagaaagattctaccgtcgtcagcgtggcctcgcgatcctcgaatcgactgaagatctgcttatagaagtgcagtttgaatttggtatatacccgtccgaatgtctggtccagcatagcgagaatccccctgtaggttagtggatttattatagcacattccgccatgtaaaaccagccctcaggcatccgtgagaacaaacgtcagctcggcgttggccgcgcgcacgccgtccacccatgcggtggccttgccgatgcctaccgggccatgctgttctatcagctcacattccaatatcagcatatcgccgggtatgacctgccgacggaaacgggcgttttttacgccgccgaacagggcgagctttccgcggttttccggcaggcttaacgcggctaccgccccggtctgggccagcgcttccagaatcagcacaccgggcataacggggtgtcccggaaagtgccccgcaaaaaacggctccgtgcgggtcacgcatttgacgccccgcgcccattggccgggggtgtagtccaggatcttatccaccaaagcaaacgggtaacggtgcggcaggatctcttcgatctctgccgcgctcatggctcggggcggctcatttggcgtatagttcatcctcatccctcccagtgtttgaataccacgcaggcgttatggccgccaaagcccagactatcgctcatggcatactccacctgcgccgcgcgcccatggttggggatatagtccagatccagctccggatccggctcctgcaaattgacggtggctggcaaaaaggcatcgtacagagccagcgcggtaaatacgccctctaccccgcctgcaccgcccagcagatggccggtcatcgacttggtagaagacacggccagcttgtacgcatggccgccgaacaccgttttgatggccgctgtctcgcagctgtcattcaggtgggtggacgtcccgtgggcgttgatgtagccgatctgttcaggcactaccccgccgtcggccagcgccagccgcatacaggccgcaccgcctgcgccgcccggtgccggggcggtaaagtggtaggcgtcgcagttagcgccatagcccacgacctcggcataaattttggcaccgcgcgctttggcggcctcgagttcttccagcagcagtacgccgctgccctcgcccatcacaaagccgctgcggcgggcatcaaaagggatcgaggcccgggccgggtcgtccgccgtgcaaagggctttcatgctggcaaagccgcccacgcccagcgggctgatgcagctttcgctgccgccgcagagcatgcggtcctcgtatccatcgcggatacggtggaacgcatcaccgattgcattggtgccgcctgcacaggcggtggtggggcagctgcacatgccctgcaagccaaaacggatggcgatctgccctgccgccatattgccaatggacatggggacaaaataggggctgaccttttcaaagccgcgctgctgaccgcgggtgtgttcttcctcgatggtgggcaggccgccgatgccgctggaaaggatcacgccaaaccgcgtatggtcgatttcttccagcgcaaggccgctgtcgcggacggcttcgtcggcggcagccacggcaaactgggtaaagcgtgccattttgcgggcttcgcgcttgtcgatgcgcgcggcggggtcaaagtccttgacctctgcggccagctttactttaaaatcagccgtatcaaaagccgtgatcggtcctactgcgcagcggccagccttaatgttcgcccagctttctgccaccgtattgccggtaggatttaccgtgccaaggccggtaataacgacccggcgtttcttttttgtgtccattgcacacctcacattcccattccgccgtcaacgcaaaggacctgcccggtaatatacccggcctgctcccctgccagaaaagccaccgccgccgcaacatcctcggcatggccgattttgcctgccgggatggccgcttgtgctgcggcacgggccggttctgacagcacggcggtcatatctgttgcaataaaaccgggagccacaacgttggcggtgatattgcgggcagcatactctttggcagcgcttttcgtcaggccgatcagccccgccttgctggctgcgtagttggcctgacccgcgttgccgtgcagaccgacaacactgctgacgctgatgatgcgcccataccgctggtgcaccataaagcggcaggccgctttggtgcagaaaaacgcccccttcaggttggtggcaagcacattgtcaaaatcagcctcggtcatccgcagaagcaatttgtcggcggtaatgcccgcgttgttgaccagcacatcgatccgcccaaaagcggcaacggtatcttctaccagcttctgacatgcttcggggctgcgcacgtccgcctgcagcgtgacagcctgcacgccaagggcgcggcaggctgcggctgtttcctcggcagcggcagcgctgccggcatagttgacggcaatgttcatgccgttttcggccaaagcccggcaaatggcacggccaatgcctttggccccgcccgtaaccagagcggtatggcgcaagttttcggtttgcggcatggtcaggctcctttcaaggtgcgcagcagctgttgcaactgcgcggcagtttccaccggatagcacgagatggcacttcccacagtctttttgacaaacccggtcaacgccctgccggggccgatctcaatggcggtgtccacgcccaattctgccagacggcggacagtcacctcccaacgcacgccggactgcacctgtttttccagcagcgcggcaatggtgtcggtttccgccatctcgtgtcccaggcagttgaacagcacagggaactgcatcggcgcaaagcggacagtcttacatttttcccgcagtgcatcccctgccgggtgcatcaatgaggtatggaacgggccgctgacattcagcggcaggcagcgccgtgccccggcagcaagcgccaactcggcagctttatcgacagcggccttgtcgccgccaatgaccagctggccggggcagttgtagttgcagatctgcacaatgccttcgtcggcggctgcattgcagcatgcctgcaagggggcttcgtccagccccaaaacggctgtcatcccgcaggtgcgccccgccgcagccgcagccattgccttaccgcggaaagcggttaaagcgactgcggtctgcacatcgaacacccccgcacaggccagggcggaatactcccccagcgacagccctgccgcataatccggtgtgacgcctgcctcccgcagtacggcagtaaggccagcggcaaacgccgtcatgcagggctgggtgtattgggtctcgctcaatacaccggctgcgtcggtaaagcagacttctttcaaatcaaaatccaccgccgcgtcggcttcgtcaaaagcagcgcggaaagccgggaaagtctcgtaaagatcccggcccataccggcgtgctggcttccctgcccggcgtataaaaatgctagtttcataaggtgatctccttgtacaccccggcgatgcagtctttggcttcgcttaccatcgcggcaaaaatttcttccaccgggcggacttcgtgcagcagccctgcggcctgtccggccatcaggctgccattctcggtgtcaccgtcaaacacagccttgcgcagactgcctaaagtaaagcgttccagcgccattttatcagccccggctttttcctggcggacatactcgcggctcatgcggtttttcagtacacgcacaggggtgccgccaatgcgcccggtcacgatagtatcactgtcgcgggcttttaacagggcggctttatagttttcatggatggggcactcggtgctcgtcagcagacaggtaccgacctgcacaccgcacgcccccaatgccagcgcagcagccagtcctcgtccatcggcaatgccgcccgcagcgatgaccggcacatggacggcatcgacgacctgcgggacaagtgccatcgtggtcatctcgcccacatggccgccgctctcggtaccttcggcaataacggcgtcaatgccgagcggttccagatgtttggccaaaatggctgccgccaccacggggatgaccgtgataccggctgctttccacgcggccatgtactttcccggatttcccgccccggtggtgacgagctttacgccctcctccaccacgattttggcaaattcatccgcctgcgggtgcatcagcatgatgttcacgccaaagggcttgtcggtcagtgcgcggcagcggcggatgttttcccgcagtgtgtccgcgtccatgccgccggagccgatcagccccagcgccccggcgttggaacaggcagcggcaaactcgcccgtggcgatattggccatgccgccctgtataatgggatattttgtacctaaaatttcattgagcagcttcattttctaccctcatacgtcagcagcatcccgccccatgtcagcccgccgccaaagccgatgcaggccagcgtctggccgggtcgcagcagatcactttccgccatttcatgcagggcaatcgggatgctggcagcactggtgttgccgtgacggcttatgtttttgtaaaactttgacggttctgcgtgtaaacttttgacacaatggtcaattatgcggctgttggcctggtggcagactacccagtccagatcggacaatgtcttttggctgcggtccagcacggcttgcagacagcgcggcatagcctccacggcaaagcggaaaaccgccttgccgtccatcgtaatgggcgcggtatcgcaggccgcagggccgcccgcgcggatcgcttcattgccccgtgcgcctaacgttacggcaaacggtgcattttcggccagctcaaaaacagccgcacccgcgccgtcgccaaacaacacacaggtcgtgcggtcagtcgggtccaccatgcgggagagtgcctcgcagccaatgaccagcgcataccgcccgcccagcgtgctcaggagcccgtgggccgcggcggcggcataaataaagccggaacaggccgcattcacatcaaaggcaggccggttttccggcagacccaaggcagcctgtacgcggcaggcaatgcttggggtagccgtcggggccgagagcgttgccacaacacagcaggcaatgtcgcttgccgccagaccgctgcgggtcagggcctgacgggcggcggtgacagccagcgtggcagcatcctcgttttcggtgcagtaatagcgctggcagatgccggtgcgggtcgtgatccattcgtcgctggtgtccacctgtcggcgcaagtcctcgttcgtcactacacggccgggcaatgccccgccggtagccagcagctgtaagcctttcatgcgcccctcatttctccgatgcggcgatattttttgtagcgctggtctgccaacgctttgccgctcatcttgcataaagcggcaaggtgcaccgcaatggcagtgtccaaccggctgaaaagcagctgccgtccacgctgtgcgccgcccagcggttcggggatgatctcttccacaatgccatctgcgtacaggtcctgtgccgtcagcttcatcatggtgcaggcctcgccgctgcgggaagcatctttccacagaatactggcaaacccctcagggctcagcacggagtacacggcattttccagcatcagaatgtggttggcaacgcccagacccagcgcgccgccgctggacccctcacctgtgacaatggccaacaccgggacggtcaggccgctcatctccatcaggttgcgggcaatggcttccccttggccgcgttcttccgcatccttgccggggtaagcaccgggagtgtcaataaaagtgatgatggggcggtgaaatttttctgcctgtttcatcacgcgcagggccttgcggtagccctccggtcccggcatgccaaagttgcagcgcaggttttcttccagcgtagtccctttgcggtgccccaaaacggtaacgggcatcccgtggaaccgtgcgatcccgcacaaaatggccgcatcctctttgcattgtcggtcaccgcactgctcaaaaaagtcggtaaacaagttgtcgatcatttcggttatatgcgggcggtcagggcggcgggccagaaaaacgcggtcctccggcgtcagcgaggtgcagcgctgtaaaagcgtgttttcctctgcggaaagctcagccagttcagccgcatgggtggtcgtgctcgccatttcggcgtcatcggcacggctgcacagcgcgtcgatctgcgcgtccagcggttccaactgctgcaaaacttctttgatcatctgtgcttcctcccctgtgtgtggagctgcaagatccgcgttaagacctctttcaactcggtgcgcggtacgacctgatccacaaaaccgtgttccagctggaactcgctgcgttggaacccgccgggcagtttttcaccgatggtctgttcaatgacgcgcggcccggcaaagccgatgagtgcccccggttcggcgagcgtaatatcacccagactggcaaagctggccgtgactccgcctgtggtggggtgggtcagcacgctgatgtacaacccgccgctgcggttgaatcgttccagcgcggcgctggttttggccatctgcatcaggctgaaaatgccctcctgcatccgtgcgccgccactggcagaaaaaatgatgagcggcaggtgcttgtcggcagcgtactcaatcgcacgtgtgattttttcaccaacagcggtgctcatgctgcccataaaaaaacggctgtccagcacagcgaccaccgcctgcacgccgccgatcctgccgattgctgtaacggcggcttctttcaggccggtcttgaccgaagcagcggccagcttttcctgataatcgggaaaatgcagcacatcgttgggcgcaatgtccgggttcagctctttaaaagttccgtggtccagaaccgtgctgagccgataataggcgccgattgccaaatgcaccccgcagttggggcagacatactggctcttgacccaaacctgccgcgtggcacggcggccacattttttgcactcgacaaattgcggcggcacccagttgggcgcagccgtgccggcatcgcggcgggctttcatctgaaagctgcgctcctgcgggctggtcgggaacagcttttcaatggcactcatcctgcaataccctttaggctgcccgcgcagccagatagttgaagatgtcgcccacggttttgagcgtccccaggtcctcgtcggcaatcgtaacgccgaacttgtcctcaaacgccatgttcagctctaccgcatccaggctgtccgcctgcaggtcgtcggtcaggctggcatccatggtgaccttatcagcatcgcagttcagggtgtcaacaaaaacttcttttacttcttcaaagctcatattacgtacctcacataatttaactaaataaattgacgtaattgtcaatgaggtcattataccacgtttgcttcgaatgtcaatattattaggtaaaaatatttatctaattgaatcgccgtttttctcatcgtccggtattataaaaggaaagcacacaaattatccccctgcaggggcagcccttgctgactgcgatttgaccgctgctgcatatcttccctgtgaaacatccaatcgtctttaaatggttttatttactttctcttttactctcccagattattttctattctgcaacatatttcgctctaatgtgctatactaataatatccaataaggatggaggaacttctatgaaacgcagcagcatccgactccaatacaatgcccccgtcacactgacctttttctttttgtccctcgcctctctggtattgggctacttaacaaacaactggacaacctcgcacctgtttagtgtgtatcgctcgtcgatgacggatccgctattctatgtccggttgttcggtcatgtccttggccacggcggttgggatcactttataaacaatatgcttctcttccttgttgtcgctccccctttggaagaacgatacggaagccgaacacttctaagcggtatccttatgaccgcgctggtatccggcatattgcagtgtgtgctgttccccacttctgctttgcttggtgcatccggtatcgtattcatgctcatcatgctctccagtttggccggcagtaagaatggaggtatccctatcaccttcatcttggttggcgtgctgtacttaagccagcaggtatacagtatcttctttatacaagataatgtagccaactttatgcacattgtcggtggtatttgcggtacagcttttggttttgccgtccggaagagataacgaatgattggaaagagaatcttatttatgatgagtaagcacatttttcagaaagaacccgtcctgagcattgccacttgtttggcgatcatttccgctttctttgtccccccggacgcagaatacctcggatatatcgatttccgtactcttgcaatcctgttttcgctaatgacagttatgaccggactgagagggcagggcgtatttgatagactcggccatgccctcctatctcatacccgcaccactttgcagctaacagttgttctcgttggcctatgcttcttcagcagtatgctgataacaaacgatgtatcgctgctaacattcgtgccatttacgtttgtcgttctgaatagtttgaacgcatctgttcgcagcaaactgctcctccctatcgtctgtatgcagacgatagctgccaaccttggcagtatgcttacaccactgggcaacccccaaaacctgtatttgtatggcaagagcgggatggctatgagctcttttgttctgttgatgctcccctattccatcatatcattagtgcttattgctatatgggcagtatggctatgccgtgaaggttccgacattgttgtaactcattctgcgataaactcagaaccagacaagaaactcattgcgttgtacggtattctgtttgtcgcctgtttattggttgtattgcgtgttctcccatacggtgttgcattcgccgctatcttggtgtgcaccttctttgccgaccgtcccacttttggccgcgtagactattctctgattcttacctttgtagcactgttcattttcatcgggaacttaggtcggattgaagcgttctctggatggttacagaatattctggccggccatgaggttttcgtatccgttctggcctctcaagtgaccagtaatgtgcctgctgccatcctgctttctggatttaccgataatttccgtgcgctgattattggcacaaaccttggtggccttggcacattgattgcatccatggcaagcctaatttcttatcgacagattgcaaatgaagtacctgctgaaaaagggcactattttgcgatgtttactatttccaatgtagtgtttctggccattctgatgggcgcttgggccatgacctgatatttccgtaattctattttacaaagtgcaagggcaataccgcacaattctaagtgccgatacggcgagcgaggcacggcagctgctaagccaaaagcgcagataatactttgtgtattatcgagcattttggcaacgcagatgccgtgccgcaaccgccggagcggtgcttaagccgtcaggcgggaattgtgcggtgttgcccaagctctttacaaacaaaaagacccgcagcagcaggatactaaagtaccattcccgtgtccaattatatccgcccgcacttttctgcaaaattcaggcaggaagccggagaaacgctgacggattttatagggaaacaaaaaaacggaggaggcaaaacgcctcctccgcgccaaaattttcggttgtagggaaacaccggggtagaaagtgtattactgccatcctcttgccgcagggtcgagcatctcggcggcggaatacaccagcgcgttgcagatggcggcagccacgttgctgccgcccttgcggcccatggcggcgatggcgggcacgccgtactgcgtgcaaaccgcaaacagccgctccttgctttccaccacgttcacaaagccgacgggcacggcgatgaccagcgcggggcgcagaccgctttcgatctcgtccgcaatcgtcagcagcgccgtgggggcgttgccaacggccagcaccgcgccggggtactcccgcgcggccctgtgcatggcggcggcggcccgggtcgagcccgccgccttcgccgcagcggcgacagcggggtcggccataaagcagagtgcctgccctcccaatttggccagaccgggctttgtgatgcccgccagcgccatgttggtgtcggtgatgaccgttgccccggcacgcatggccgcgacgcccgccgccgccgcgccgggtgtgaagcgcaggttctcggcgtagtcaaaatccgctgtcgtgtgaataacgcgcttgaccacggcggcgttttcgggcggaaccgtaagcccgcgagcggccagctccgccgtgataatgcccatgctcgtgcgctcaatatcggcgggcagatgatgctgcggtgtcatttttttcctcctctggggttgtgcagacccatggccgcgtagacggcgtccatgtccagcgcactgcgcacgccgtcggccagcaggtccagctgctgtgtgcggtagtcggccatcgcaagcggcgcggcggtctccggcgcgattcccttgcggcggcagaggtacgcggccagctgctccgtcaattcgccgctgtcaaacagaccatgcaggtaggtgccgaacacggcgttttgcacgcagccctccggtgtgccatcggcatagcggcagaacggagcgccgttcaccacggtgcggcccgtgtgaatttcatatccggtcagcgcagccccggcaaagggcgcggcagccgccgccgtgacctgtgcgcggcgcttttcggcggtaaagaccgtccgcgtcggcagcaggcccagcccgcgcagcgtctgcggatggccgctctcggtgccctgactgtcgtcgagcgtctcgcccaggagctgatagccgccgcagacgcccagcaccggcgtgccacctgctgccagcttgagcacagcggcctccagcccggactggcgcagccacaacaggtcgttcaccgtgtttttggtgccgggcagaatgaccaggtccggcgcgcccagctcccgcacggactgcacgtaccgcacacccaaaagcgggtgctgttccagcggcataaaatcggtaaaattggaaatatgcggcaatctcaaaacagctgcgtccagcggcttgaccgcgcttttgctttgcagccgcggcgcaagcgagtcctcgtcctcgatgtccacccgcaggtacggcacgacgcccagcaccggcagctgtgtcttttcctccagcattgccagcccggggcgcaaaatttctacgtcgccgcggaatttattgatgataagcccgcatatacgcgcgcgctcgtccggctccagcagcgccaccgtgccgtacagctgcgcaaagacgccgccgcggtcaatgtcgcccgccagcagaaccggcgcgttcacgagctttgccagccccatgttgacaatgtcgtctgccttcaggttgatctcggcgggactgcccgcgccctcgatgacgatgatgtcaaattcatcggcaagactgtcgtaggcacgcagaatatcgggaatcagcgactttttgcggcggaaatattcctttgcgggcatatcgccgcggacctcgccgttcacgatgacctggctgcccacatcgctgctcggcttgagcaggatcgggttcatccgcacatcgggctcgacgcccgcggcctgcgcctgcacgacctgtgcgcggcccatttcgaggccgtcccgggtcacaaagctgttcagcgccatattctggcttttgaacggcgcggttttgtagccgtcctgcgcaaaaatgcggcagagcgccgcgcacagcaggcttttgcccgcgccgctcatcgtgccctgcaccatgatgcaccctgcccggctcattccagcacctcccgcataattttcaacagctgttcgttttctttttgggtgcgcacagcggtgcggtaccacgtctcgtccagccccgggtagttgccgcagccgcgcaccaccgcaccgtgacggcgcagctttgccccaaagtccgccggtgcgcggaacagcaggtagttggcctgtccgtccacgacccgcaggcccagtgcccgcagtcccgcggccagccttgggcgctggtcggcaatgagtgtgcgcacgctgtcggcataggcggtctcctccagtgcggccagccctgcggcctgtgccagaccagacacggcccacggctggcccgccgcgcgcattttgtccagcagcgccgtgtcactgcacagcgcatagcccagccgcaccccggccatggcgtagagcttggtgaatgcctttaagattataaggttcggtgcatcgcgcaaaactgtcttagctgtcagggcatcccgcgcggcgaggaagtcgaggaagcactcatccacgaccagcaccgcgccacagtcggcacagcggcgcagcagcttttgcaccataacgagcggcgtgacctgcccggtggggttgttgggctggcagaggaacactgcatcggtgctgtcgtcgatggcgtctacaaagccgtccgtcacggcaaagtcgttttcctcccgcaaaagaaaccgctgtacgtcacaatccaccgtttccagcgcagcagcgtactcggcaaaggtcggcgcgggcagcaatgcgcgccgcgggcgcagggccagtgccaggcggtagatcaggtccgccgcaccgttgccgcacaaaatttgcgcagcatccacaccctctgctgcggccagcttagtgcgcagtgcccggcagagcgggtccgggtagcgatccgccatgggcagtgccgctgtgatggccgccgccacgcccgcgggcagccccagcgggctgacgttggccgaaaaatccagcgcgtcccggccaaactcggcccgatagcccgcccagtcaccgccgtgtaccagttccattccgcattccctcacaagacaagcatcagccgcacggccagccccagcacaagggccagcaggctctcggcgtacatcatgcggttggcacgcaggatgtcccgcggctcgatctcccgcagcgggtcgccaattgtcggcttatcgtaatattcgccaaagtaataggccgggcccgccagctgcacgcccagtgccccggcgcaggcgctctcggtctgggcgctgttggggctggcgtggcggcggcgatcccgccgccagatgcgccacgccccgcgggcgctgttgcccgtcagcgccgccgcagccacccagagcagcgcggccaggcggctgggcagccagttggcggcatcgtccaatttggcggcacagcgcccgaaataaagatatttttcgtttttgtagccgagcatgctgtccatcgtgttgatggccttgtaggtcagcgccagcggtgccccgccaaggagcatatacaaaagcggcgcaatgacgccgtcgctggcgttctcggccacggtctccacggcggctctggtcacgcccgcggcggtcaggttttgcgtgtcacggcccacgatgcgggccacggccctgcgggccgcgggcaggtcgccctttgccagttccttgtacacattgcggctctcctgtgcaagccccttggcagccagcgcctggccgcaccagagcatttgcagcgccagccccagcgccggatggagccttgccgcggcccaacaggcaagcccggtaacggccagcgtgcccagcggcagcaccgcggccaccgcggccccgccggccagctcgccccgcggcgttttgggcagtgcggtgcgcaggtgcttttccagcaccgagatgcaccggcccatgagcaccaccggatgcggcagccacgccgggtcgccaaacaaagcgtccagcaaaaagccgcccagcaccgcccaaaaaatcagcatgtgctctccttcgtgtactgcacggtcttgaccaagcgcagctcatgccgcgccgcccagtcgcgggcgtccagcacatagccgcccgcgttggggccgcaccaccggtaatagctgcggcgcggcacgccgtagcgctccaaagcggccatctgggtgccgccgtgggccaggatcaccagcatttcctcgccgtcggccagcgccttgtccaccagcgccgcaaacgtgcggcatacgcggtcactgaaatcatccttgcgctcaccgtcggggcagctgctctcgcagttggcggcgacccacgcctgatagtcggggtcgtgctccatctcaatataattgcggccttcaaagctgccgaagcacatctccttcagcccgtccacgggcacgagctccgcgtccgggaacagcacctccgccgtctgccttgtacgctgcagcgtggaaatatagacaaccttcgggtcaatatcagcccggcgcagctgggccagcccctcgggcgagagcgggatgtcccgctgaccctgatagcgcttctgggcgttgtactcggtcaggccgtggcgcagtaaataaatcagcatttcgggagttctcctttcaaaatcgtcggcagaccgcaaaacatctgcacaacgcagtccgcccgcgcggccagcagacaggccagacggcccgccgcctcccgcgcggcacgcgcggcggggtcaatcggcacaacgccgccgccgacctccgccgcggtcacaacatcataatctgccagctcgtcggccagccggttcaaatcggcggcgtcggcggccaaatcctgcacgtcgtacacctgccgcccgccgagctttcgcgcaaaggtgcgcttgccgctgcagagcggccctgtcacaaacatcatttacaacacccccagccattggcaggcggccagcgccgccagcatccagatctcgcatttttgcaggaaccacccggccagatcaccggtcacaccgccaaactgttttttggcaacaacgtagtaccgcgcaaaaacgcagcctgcggccagcaccagcgcccagccgcccagtgcagtcagccccacggccagcatggcgcagagcacggccagcacctgccgcacgcggacgcgatccgccgccgtggcaaaggtgtgggcaaggccggtgtttttcgccagcggaaacgccgccacggccagcccggacagcgctcgctcccccaccagcg

SEQ ID NO: 716 - DNA, 17683 bp, unidentified
  source 1..17683: mol_type = unassigned DNA
atgaaagtagtaatcctggctggcggccttggcacgcgcatcagcgaagaaagcatctataaacccaagccgatgatcgagatcggcaacatgcccattctgtggcatatcatgaaggaatattcctactacggtttccacgactttgtcatctgcgcgggctacaagcagcacatgatcaaggagtggttcgcggattacttcctgcataccagcgatattacgtttgatttcacccgcggccagaacgagatgatcgtccacaaccaccacaccgagccgtggaaggtcactgttgtggacaccggcctcaacacgatgaccggcgggcgcatcaaacgcatccgtccctatatcggcaatgagaccttcatgatgacctacggcgacggcgtctgtgatgtggacattgccaagctggtggcgttccaccgtgaaaacggcaaggtcgccacgctgaccgccgtccagcaggagcagcagaagggcgttctggatattgccgaggataattccgtctgttctttccgtgaaaagaaggccagcgacggcgcgctcatcaacgcgggctatatggtgctggagccgcagatcttcgactatctggacggcgacgcctgcgtctttgagcagaagccgctgcagaagctggctgaggagggtcagctgatgagctatatccacaagggcttctggcagtgcatggacaccgcccgcgagaagcaggtcctggagaaaatgcttgccaccggcaacgcgccctggaagaagtgggaggattgatgatggtacattacgatcctgaattttaccgcggcaagcgggtgttcgtcaccggtcacaccggcttcaagggcagctggctctgcaagatgctgctgatggccggggccgaggtcacgggctacagcctgcagccgccgacgcagccgaaccttttctccatcgccggcgtcgaggacaagatgcacagcgtcatcggcgacatccgcgactttgacgcgctgaaggccgcttttgacgcggcgcagcccgacattgtgctgcacctggccgcgcagcccatcgtgcgcgacagctacaaggacccgcgctacacctatgagacgaacgttatgggtacggtcaacctgctggaatgtgtgcggctggcccagcagcagggcagagcgccccgctcggtgttgaacgtcaccaccgacaaggtctaccacaacaacgagtgggcctggggctaccgcgagaacgagccgctggacggtttcgacccctactccaacagcaagagctgctcggagttggcgacgcactcctacatcaacagcttttttgccgataagaccgtggctgtctcgacggcccgcgcgggcaatgtcattggcggcggcgactttgccaatgaccgcatcatccccgactgcgtccgcgccatggccgcgggccgtaagatcggcgtgcgcaacccctactcgacccgcccgtaccagcatgtgctggagccgctggcggcctacctgctgatcgcccagcgccagtacgaggacaaccgctttgcgggctactataatgtaggccccgacgactgcgactgcgtcaccaccggcacgctggtggatctgttctgccgggcctggggcggcgacgccgcctgggagaatcaggccgaggccaatgccccgcacgaggccaacttcctgaagctggactgcagcaagctgaaaacaaccttcggctggacgccgcgctggcacatggccgagtgcatggaaaagaccgtcgccttcagcaagatctggcttgccaacggcgacgtcccggcggagatggaaaaggaaatcaatatttttttggaggagcaataattatgtggaagaacgaggcagaagcccgcgagcagatcaaggcgatggtcgccgagtattatcacgacttcaaggagaaaaagaccccctatcaggaggggaatcgcatcacctacgcagcccgcgtctttgacgagaaggagatgtgcgctctgaccgatgccacactggacttctggctgacaacaggccgctttgccgaccagttcgagaaggagttcgctaagtggatcggcgttaagttcgcccatctggtcaacagcggttcctccgccaacctgatcgccttcatggcgctgaccgcccccgagttgggtgaccgccagatcaggaagggcgacgagatcatcaccgtggcctgcggcttccccaccaccgtgaccccggccatccagtacggcgctgtgcccgtgtttgtggacgtgaccgtgccccagtacaacatcgacgtcaccaagctcgaggccgccctctcccccaagacgaaggctgtcatgatcgcccacacgctgggcaacccgtttgacctgtccgccgtcaaggcgttctgtgacgcccacaacctgtggttggtcgaggacaactgcgacgcgctgggcacccagtacaccatcaacggcgagacccgttttaccggtacctggggcgacatcggcacgtccagcttctacccgccgcaccacatgacaatgggcgagggcggctgcgtttacaccaacaacccgctgctgaaccgcctgatcctctccttccgcgactggggccgcgactgcatctgcccctccggccaggataacttctgcggccaccgctttgacggtcagttcggcgagctgcccaagggctacgaccacaagtacgtctacagccactttggctataacctcaaggtcaccgacatgcaggccgccatcggctgcgagcagctgaagaagttcccctcttttattgagcgccgccgccacaactggaaccgtctgcgcgccgcgctggagcccgccgccgacaagctgatcctgccggaaccggctgccaacagccgcccgtcctggttcggcttcctgatctctgtcaagccggagagcggtctggaccgcaacgccgtgacccgctatgtggagagccacaacgtgcagacccgtctgctgttcagcggcaacctcatcaagcacccctgctttgaccagatccgcggcaccgacgcctaccgcgtggcgggcgagctgaccaacaccgactttatcatgaacaacaccttctgggtcggcgtttaccccggcatgaccgacgagatgatcgactacatggccaagacgattatcgaggctgtgaatcagtaaaattttgacaacgaggtacagacccctatgatgcagcaaaaggtgaaaacgacccgcgcacccagactgcggttggacaaaaacaggcggctgacgcctatgcagatctactgctgggcaacggtggcctgtctggcggtgctgctgcttgccctgctggccagccgcggtacgctgctgcatcgattcttcttttatgatgtcaccgataccggtatggactttttccatagtattgagtatatgcgtggacgtatgccctacggacagttcgatacgctgtacccgccgcttgcaaatttgtttttctatgtgttgtatttgcttgtgccaaagacacaatcagctacgtggacggaatcgtttatctcgtctctcaacatgaagggaacagaacgggatttgcgtttgcagcaagcgacgatgatgctgtttatcgtctttgttatcgtggtggtcttaggaattgtatcgatgacagaacgcctgacgcgcagctgcggggggcggaaaaagctgctggcattctgtgcagtgttcagctatggggtactgtacggcttggaacgcggcaatattctgctgctgtgctggccgttaatggcattttttatcctgtaccgcaattcagaaaaaccacttttgcgggagttggcctgtctggcactggcgattgccgccggtttcaagctgtacccggcgtttctgggcgtgctgctgctgcgcgataaaaactatctggccgcggtgcgcacggtgctgtacggtgttgtctgcctgtgcttcccgctgttcttcttcaatgaaggattgtttggcctcacactgtggttccgtgtactgtttgattttagcggcagcagaggtgaaccgtggatcggcaacggtttctccaacattttggcagaggccggacatgcggtggacaagctgctgggcacgcagctgggctatggcagctacgcactgctgggcattgtgctggcagcggtgctgctggtgtgcagcttttttatggataaggagtggaaacgcatcacagcaatcattctggcgatgctgatgttccagtcccagtatgattatgtatggtgcctgtttttgattccgctgttcctgtttatggagcaggagcgtgagctgcgcagtgacaacgtgctgccctatctggccttgatggtgccggtgctgccgctgccgctgttccggcgggaccagatggagccgtcctttgtaccgcgcaacacgatttgtcatgtcatgctgctgctgctcattgtctggtgctttgtccaggcagtgcagggggtgcgtgtacgctgtgcggaaaagccggtcaagccggcacacggacacccggcggccacggtgctgctggccgtttgtgtggcggtggccggcgtgggaggccagcagctgtggcagcgcacccacaactggggctttgactatggctacaacggccgactggatgccgaggacatccagcagaaggacgtacaggatagcgacggcaacccgatagaggcaacatggagcggccgcggtgcgtatattatgatttacaaccacgcgccatttacgcaaaggatggtggtcacgttccagacaggctacggcatggatttgaagcgcgcctatacgatgacgtttgaagcaccgaatctggaagatgctgatggtacaaccgggaagcagaagcagacggatattaagattgaccatgaggggcagaccgtgtgctacacggtagatgtggttcccggccagacccaaatcgatgtgagctatgacggcccgatggcagtctatgatgcttcttcgcgcaaaaacggcaccttcacggtgacaaacctggcggtcaccagtgagggcgctgtggaggaaaccgaataacggaaggaaacatatactatgcagaaattgctggccctgctgggcgcaaaaaataaagaggaatttgtggagctgttcaagcagttcatcaagttcggcctggtgggcgtaagcaacacggctgtgtccatggcggtctactatatcttcctgtggatcagcccggacctgtatatggtcggcagcatcctgggcacgattctgagcattgccaacgcctttttctggaatgacaagtttgtctttaccggcaacgccaatgactggcgcagcaagctcaagcggctgggcaagacctatgtcagttacggcggcacatcgattttgtccaacgtgctgctctggattgaagtaactttctttgcagtcagcaaatctattgcaccgattgtaaacctgttggtgacaattccattgaattttatcatcaataagctgtggacatttaaggaaaagtaagaaagatgcgactttcagtttgaaaaggatgaaaaatgataaaacgcttgaattgtacgggtaaaagatattatatatttatggttctgactattgcagttgcaatattttatgttgcgctgatgtgtaacaaaacaatgcctttcgcggagggatggtatacatattatgcgcaacttataaacgaaaaaggtttgctgccttacaaagattttgaatatcttttttcgccgctctacatttattttattgcgtttgtcacgcgctttttcggatatgatattttgacactgcggtgtgttggcatcctaatgtttgcaataatcgccttaggggtatatttgtttattacagaaattgttggaagaaaaaaggcgtggattgctgcaattacttccgttacagcggttatgtatctacagtcagaagcagttcagattttttatgactacatccgacttatggatatttttgctgtttttaccgttttattcttgattcgcgctgtcaaagcaatgcagcacagcgaaaatcaaggcgtaaaagtaaatctttttctttgtggccttttcaattccctcttcataaatgtaaaacaaaatgttggattgattttttgggcatatacaatagttctaattatttacttaggcgtgtattttcaacagtccataaaagcaattgtaaaaaatttaatgcaatttttattgcctattgtagcagtaacaggtgcaatttatttgttgctggccgtaactgggggattgaaaggatatttgtccatgacgggcggaggcgcaattagcgcaaaaggcggtatgattgcaattctctttaactgggtgcccaataactggaacttattccaaaatgcgatgccggaggccagtgttgttttacttgttgtagtggctttgatggtggcccttgccatagcagaacataaaaacaaggtggcacgacatgatgcaaatggcgcatggagtaagattgcggatatacacggggggggtacctgctggcaataggattgctattggttatggctgttcgccacaaagacatggcagtggcaatttcggattggaagtcagtaacaccgtatttcttttttgagattgtatttccggcttttttgttgtttggtttttggtttctctataatatcattaaaaaacagcaaaacgcagagacatttttgctgtggtttacactggcaggctcttatgtggcaatatcttggggctgtggaaattccggtggattagcagagggacaggcaacaacaggagtggcatttgttgttgcatttattctgtatggactaagctatcagtggcttcagatattacaggtggtagcggtagtcgcttgcatcgtcttaacgattcaatcttgcaccaaaaagatggtgaatacctataattggtggggagcagatgaagcagatttttgggcaagtgagaacaatataggagatgttccgctgctgagcaaaattcgggcatctacagatacaaaggctgtgtatgaggaaatctgcaaggaaataacagagggagtgcaggaagatgaaactatctactgcttcccgcaaattcccatattttatagtttatgtgaccgctgggatccgggggtacgctctaaagtagaatggtttgatgtgtctacggatgaagcagtagaagcagacattgatattctaaaagaatcaccacccaaggcaatccttatgtacaatgtgggtgatgatgtctatgaggcccatgaaagcgcatttcgcaaggggcaagcatccggaaccagaaagatgagagactttttgtatgattttgcgtatgctaatgggtatgaatttatcggcaattacactacaggaaataatgaacttacactttggattcagaaagacaatcgtaatgtgaatctgattgatgcgtttgatggtggtgatggcacaattgataacccctataaattacatactgctgaacaattgcgcttgtttagtaagatggtaaatgaggggagaacttttggcggtcaatatatcgaacaaacagcggacatagacctcgccaatcaagattttacgccaatcggtgaatattccggtaacaactatttctgtggcacatacaatgctgccggccatgtgattcgcaatctaaagattgaaacgaatgataatgcagccttatttggacgacttggcggtaaagtatataatctgggaatagaaggtggaaatatcacaggcgcttatatcggtggaattgcaagccatgccgttaaagatacagcagcaataattaactgctatacagatatttctatggatggaatacgtgcaggcggtatcgccgataattttgtaggaactgtcggaaattgctttagcgtagggttgatacatggtacggatagtgcagatgtattgagctttaaccaatataaagaggtacaaagcgtttattccgttaaggaaaaaaatagtcaggacttcgatacacaaagtacagatgatgtcagaattacatattgtacggaagaaacaatgaaaaatggaatgttggcacaacgattgaatgattctatttattcgataggtacagaactacaaaagagcgatggtactgaagataatgaccaagaaacaacaattgagttggtacggtggaaacagggaacggatggacatccggttttcgatgtgccatcgtaattgaagcagacaaataagaaaggcagacaatcaaatgaaacagcgtttagcggattatgtggcggactttctggcggcgcgcggtgtgacggatgttttctccgtcgtgggcggcggcgctatgcacctgaacgatgcgctgggccataacccccggctgcatgtgacctacaaccaccatgagcaggcctgcgccattgcggcggaagcctacgcccggctggaaaataagatcgcggcggtctgcgtgaccaccggccccggcggcaccaacgcgctgaccggcgtcgtgggcggctggctggactccatcccaatgttcatcgtctccggccaggtgcgctatgacaccacggcccggtacgccttgcagtacaccggcacgccgctgcgcgccatgggcgaccaggagtacgacatcaccaagtccgtccagtacatgacgaagttcgccgccatgctggaggaccccaaggacattcgctacctgctggaaaaggcgtggcatctggctacaacgggccgccccggcccggtctggctggacatcccggtcaacttccagggcggctacatcgagactgacgagctgcgcggctatgaccccgccgaggatgacgcccagctgcccccgtcggtggacgacgccacgatccggacgattctggaaaaaatcaagaacgccaaacggccagtgttccacgcgggctatggcatccgcctgtccggcgggtatgcggcgttccgctccgtggcggaaaagctcaacatccccatcgtcacctactggaacgccgtggacctcatcgaggatgacaatccgctgtactgcgggcgcgccggcaacatgggtgaccgcccgggcaactgggctatccaaaacgcagacttgattctggccgtaggcacgcgcatttctattcgccaggtcggctacaactggaagacctgggcccgcgcggcagaggtcatcatggtggacattgaccaggccgagctgaaaaagccgaccctgcacgtcgaaatgccggtctgggccgacgcgaaggactttttgaccaagctggataaggtcgccgcggcccccgtgaacgcgggcggcgagtggctggccacctgccagcgctggaaacgcgactaccccgccgtgttgccccgccagtgggaggaaaacggcgagaccgccaacgtctacgcctttgtgcgctatttaagcagtcgcctgccggagaacagcctgaccgcggtctccaacggtgcgtgctgtgtcgtcggtaaccaggcgtatgtcatccagaagggcagccggatggcaaacaacagcgccattgccagcatgggctacggtctgcccgcagccattggcacctgcatcggcggcggacgccgccagacgatctgcctcgagggcgacggctccatcatgatgaacctgcaggaactgcagaccattctgacgaacaagctgcctatcaaaatcttcctcatcaacaacaacggttaccactctatccgcctgacgcagaacaaccttttcaaggagcactgcaaggtcggcatcggccccgagagcggtgacctgtccttcccggagtttgaaaagattgcaaaggcgtttggctacccctactacagcgcccacagcaacgccgagatgaagcaggctgtggacacggtgctggcactggacggcccggctttctgcgagattttcaccgacaccaagcaggtctgggagcccaagagcagcaccaagcgcctgcccgacggcacgctggtcagccccccgctggaggacctggcccccttcctgccgcgtgaggagctggaaaagcagatgttcatcccgctgatgccggaagtgtaagggagtgcgtgattcaaaaatggcaagcattcaaagacaaatccacaccgccatcatcaccggccctacgggggcaatcggaatggcgctgtgtgcaaagctgctggcggagggcgtgacggtttacgcggtcacccacccgggcagtgcgcgggcggcgctgctgccgcaggacgcgcggctgcatgtggtgccctgcgatgcggcggagttggccgcgctgccggagctgatcccggaaaaggccgatgcgttcttccactttgcgtgggcgcatacgatcggcccgggccgcaacgacatgccggcgcagatcgagaacatccgctacaccattgcggcctgccgcgccgcggcgcagctgggctgccaggtctttatcggggctggcagccaggccgagtatggccgcgtggagggtgtgctgaccgcgcagaccccctgcttcccggaaaacggctacggcatggccaagctgtgcgccggccagatgagccgcgtcgagtgccagaggctgggcgtggcccacatctggacgcgcattttgagcgtctacggcccgcacgacggtccggccacgatgatcagcggcaccatccgtaagctgctgcacggcgagaagcccgctctgaccgcgggcatccagcagtgggactacctgtacgccgccgacgcggcagctgcgttctacgcgctggccgtcagcggacaggacggcagagtctacccgctgggcagcggcacggcccgcccgctgaaggactatatcgaggcgctgcgcgacgccatcgacccggcgctgccgctgggcttgggggaggtcccctacggcccgctgcaggtcatgcacctgcaggcggacacgtcggccttacaggaggacaccggctggcggcccgcgaccccgtttgaagaaggaatccgcgaaaccattgagtgggtaaggaaagagacaaaatgagtgagaaaaagacgatttcggtaatgatcccctgctacaacgaggagcagaacgcccgccccatctatgaggctgtgcgcgatgagctggtcaagagctgcccgaactacgactatgagattttgttcatcgacaataagagcgaggacggaacccgtgccatcatccggcagatctgcgccgaggacaagcacgtcaaggccatcttcaacgtcaagaacttcggccagttcaacagcccgtactacggcatgatccacacctccggcgattgcacgatcacgatgtgcgccgacttccaggaccctgtggagatgatccccaggtttgtggccgagtgggaaaagggctacaaaatcgtcattggccgcaagacccagagcaaggaaaacccggtcatgtactggctgcgcggctgctactacaagctcatcaagaagatgagcagctgcgagcagatcgagcagttcactggctttggcctgtacgacaagagctttatccagacgctgcgcaacctgaaggatccgacacccttcatccgcggcattgtggccgagctgggccccgagcgcaaggaaatcgagtacacccagccccagcgccgcgcgggcaagacccacaacaactggtacagcctgtacgacgccgccatgctgagctttaccagctacaccaaggccggtatgcgcattgcaacgttcgcgggcttcctggtggcggggctgagctttctggtcggcctgttctatctgattgccaagctgctgttctggcagagcttccgcgccgggtacgcgccgacgatgatcgccatcttctttatgggcggtattcagctggcgttcctgggctttttgggtgagtacgtcatggctatgaacacccgcatcatgaaccgcccgctcgttgtggaggaagaacgcctcaactttgggccggacgaccagtgaccggcatgaagcaggagtttggttatttcctgaaaaacgcgaaattccgcgcggcgctggggctgaccctgctgctcagctacggctatgccatcgccacgacacgggtcagcattgactcgctggaaggggaccgctacatcggcacgggcggcgtcatgctgtccaccggccggttcggcatgaacctctgggccgcggtgctgggctacggcagggccgagccgagctatgcctttggcattgacctgctggcggcgctgctgctggcgctggcggcggtgagcttctgtgcgctgctgcgcaaggccgcgcaggatcgcatcagcatgttcggctatgggctgtttgcctgcctgtttgtctcctacccgctgatgaacgaaatttgggagtacagcggcgcgaatgtctgcgtctgcggcggctatttgctggacgccgctgcgctgaatctgctgtgggacgcgcgccagcccggcgtgccgtggcgcggcagggctctgcgcatgtgcgcggcggcgctctgcctgatggtggtctgttcgtcttatgagtcactggcggcggtgtttgtgctggctgtctttgcgcttttaacgctggagcagctactggccgccgagcgcccgcggcttgcggcagtcctgaccgagggactgtggtacgcggcggcgctggtcggcggtctctgcctgcgcgtgctggtgacgtcgggcatccatcttgtgctgccgcaggctgcggccaacggcgccaccgaaattttgtgggcgttctacccatttgtctatcttgcaaagctgcttgtcaagggcattctgattaactacgcactgcgcggctgtttctacctgcccattgctgaattggcggtggcggcgcttgtatttatcgtactggttatcgcgcttgctgtgcgcaaaaagcggcctttgctgctgctcaccggcgcggggacgctgttctcactggtgctgctgtcgtttgtgcaggggcggtactcgccctaccgcacctgtcaggtgtttgcgctgtttgtggcgctggcggggctggccgtgtatgagctgctgcgccgcgctgcggcccggcgggctgtgctgctgggcagcgtgcagctgctggcggtgctgctctgtctgcaccaggccatgtacctgaaccatctgctggccgtcgattaccagcgctccgagcaggaggccgccgtggtgcgcactctgggcaccgagcttgtgcgcgactacggcaccgataagcccgtggtgctggtgggccgttacacgctgggggagaatatcacccggtacacgacggctgacccgatgcagcacccgctgtaccgcttcttccgtgagcacacgagctgggagagcggcgacaccgtcaagtacgtcgagaccaactgcaactcggtgctgaactggtcggtcacggccttctccgaggtggacgacgtctacggccaggcagcggagcacctgttccgctactatggctttgctttggacatgacccacagcgctgccctgcatgagcaggcgcagacctacgccgacgcccaccacctgccgggatacccccgggcgggggcgattgtcgattgcggggactatgtgctggtaaatctgcaataagaataccgcggaaaagtttgcgcttctccgcggtttttactttctttctgtattttgccgatgttttcagccggtcacggtctcaaagggcttcgtcaggtgcccgttcctgtcggcctcgcaggtgcggcgggcctacttcaaatactccaccaaaaacgccactgtcgtctcccgcagcgctttgtccagcgcggcggcggtggcggtgtcctcggatagatagttgtggttcccctcggcaaacggctccagcacgaccctgccgtcgggcaggctctcgacggcggctatcgtctcggcctgggtcgtgtcgctcaaaatgccctcatggccggtgtaggtcaaaagtgtcggcagggcgctctcccgcagggcggcgttcgggtcggaatcgcgcatctcggtgaacagcgttccgctgacatcgacgccccaggtgctgatgctgccgctcgcctcggcctcagcggccagcgcttccacggcggaaaagtcgtcgatgttcaaaaactccatgccgcgcaggcccgcgccgttggcggggctccacagcgccagcgccgtgatgccgcccctgcgctgcgggtagaggctggccagccgtccgcccatgctgtggcccaccagcgctgtgcggcctgtgccgtaggtctgctgcatgtaggtgatggcgctctcgacgtcgtcggtcatgttggacagcgtgtaggccgtgaacggctcggtgctgttgccgcagccgggaaaatccagccgcaccgtcgcaatgccctgggcggccagatcggcggccagcggcgcaaagtggccgtcgccgctgcggctgccggtaaagccgtggcagagcacgacgagcggcagctcctccccgcgggccagcttgccgggcagctgtaccgtggcgtaaatgtccccgcgcgtaccgggtatggtgacgtcctgcgctttcggtgcgggcgtcagcagaaagagcgatgccgccacgcagagcgccagcgcggcaatgcagcctgcaagggtataaaaagcgcgtttatacgtttgtttgtgcatagaattacctccgtaatgcctctattaaagcctatgcggggcaaaaagtcaagacgcacagaatacacacaaaaaaacaggtgacaaacccggggcggatgtggtatactaaaaattacaaattggttaaaaagtcagacccggggcgcaggcgcagccttgccccggcttttgtcctgttttaccggaggtgcttgactacgaattctatagcgaaccgtatgccccgcctgctggctatgctgtttgtgctgctggggctgttctgcgcggcggcactgcctgcccatgcggaggactacgacacggtgatggaccgcctgtcccgcctgcaggcgctggcgcgggattactcggccagtcaggccgacacgcccgacccgatcgagctgacgctggcctacacccgcacgggggagtacaacaccacgatctggcagctgaccgccggtgtgcgcgacgccgggtttgagagctacgtcaacagcagtgaccccgatctggcgtcgctgcagaatatgaacaccgtcgtcctgcccaacggagagagcatcgactttgggcacctgctggcgtcgatgaaccttgtctacaacggcatacccatcacgggcagctggggcggcgactgtgaggagctggccaggcagtattacggccaggccggcgatgccgcgggctacgccgaggcgatgcgcgcttcctttaatatggacgatgacggcacgctgagccgcttcagcaacggggacctgcgggcggacctcgactccgtcgtcgtcggctccaaggtgacaaaggacaccgacctggccgaggcgctgcgcagctactacgcgaatctgaccgagtatgaccgcgtcaaggagttcatctcactgagcttcggcacggtggatacctcgagcacggcctttgcggacgccgtgtacagcgctctgctggaggattccggtatgcagctgctgttctacatgaacggtatgtggaccgtcaagggctggcagatcaaggacgactacgcccccgccgtgcgcggcgcaacagacctgtttgccgagtacctggccaacgcggtcaatcacgagaagatcaagagcgagacgaatgaccgtctggttgccatgggcgggcaggcactggccgacgcgctggaggcgttgggcgacaccgacgccgcccaggccgcactgaccgccgccgaggagatggccaataacgcccaatcgacggtttcctccggttcggatgtggtctccgccgcgcgggagaatttgcagacaaattttaacgtgaaggtattccagctgattttactgattgcggcagggctggcagcgttcatgctggtgttcagcatggtgatgtttgtggtgcaccgaaaagaaaattgagtttggactacgtgccgctctcttgtgggaaagagagcggcacgcttttttggttgggcgcggggcaggcgggcagaccgctttttctgttcacaccccgttcacattccgtatattcatcccgagttatccacggcgtataacggttatccaccgtggaaatgttgaaaactccgtggaaagcgtggaaaactctgccgcccggacccgttcaaaagcggaaaaccgggaaaatctacgtagaaaaaacgtttattttccacattttcaacagcggcactgttgaaaactgtggaaagccgggggaaaacgcgaattgcgctttttgcaacacaaaatacacattttgtaaataagggcttgcactcgccgcgcgacagcgctataataaacctaatcatcacccgcactgctgtgcggcggtgcgcttgagtataaaagggagagtgtgaaattatgttggacattaaaatcaccaaaacgacccatccgaaggaaaagccgcaggacgagtcgaagctcggcttcggcaagcagttcagcgaccacatgttcctgatggactataccgcgggcgagggctggcatgacgcccgcatcgtcccctatggcccgtgggagatggatccggctaccaccgtgttccactacgcacaggaaatttttgagggtatgaaggcctaccgcaccgcggacggcaagatccagctgttccgccccgactgcaacgcgaaccgtttcaacgattccgcggaccgtctcggcatgccccccatcccgccggaggacttcgtgcaggctgtcaaggcgctggtcgatgtggaccgcgactgggtgccccactccgacggtgcgtccctgtacatccgcccgttctgcatcgctaccgatgtgggcctgggcgttcatgccgccaagcattaccgctttgccatcatctgcgcgccctccggtgcctactacgccgagggcctcgaccccgtccgcatctatgttgaggatgagtacatccgcgccgccccgggcctgaccggctttacgaagtgcggcggcaactacgccgcgtccatcaaggccggcgagctggctgaggagcgcggcttctcccaggtgctgtggctggacggcgttgagaagaagtacgtcgaggaagtcggttccatgaacatcatgttcaagatcgacggcgagatctacaccgccccctgcgtgggcaccgttctgcccggcgtcacccgccgctccatcatcgagctgctgaaggactggggctacaaggtgcatgaggagcgtgttgccattgccgacatcatgaaggctgccgacgagggcaagctggaggaagtctttggcaccggcacggctgccgttgtctcccctgtcaaggagctggattgggagggcaaggttgcccacatcagcggcggccacatcggtgagctgacccagaagctgtatgacacgctgactggcatccagtggggcaagctgcccgacaccaagggctggatcgttcctgtggaataa

SEQ ID NO: 717 - DNA, 38431 bp, unidentified
  source 1..38431: mol_type = unassigned DNA
gcagccggaatccacgatggtctgctttgcggcgctggagttcttgtcgatcagctcgtcgttgtactcgcccatcttggtggcgcactcggtaatgatatcgcggtactcctcaggcaggccgttccaccatgctgcgttcacatagaaggggtccggatggaactggtagttgacctcggtgaagtacttctgcacttcatagaacttcatgccctccacattgacccaggggttctcctgaccgtctgcaacgccggtcttcaggcccatgtacaggtcggagtacgggatggtggtggtggtagcacccattgcctggaaggtcatgtcaatggtcttcatgccgttggtgcgcatcttcaggcccttcaggtctgcgggagccttgatggggtgcttggagttggagaactggcggtagccgcctgcatcgcacaggttaatgatgacagtgcccgtctcgccttcggcctcagcgcacaccttctgtgccagatcgctctgcagcagagccgtgacctgcgcacgggtgttggtcaggaagggcagggtgaacatcagcagacgggggctgaagtcgaactgaccgccgcgcatgccctgcacggtgccggccacgacctgctccagcatctccttctcggtgcccagctggccgttgccgtaaacttcgatcttcacatggccattggtggcctctgccacatcggcggcaaactgctccatggaaacaaagcgggggttgccttcgggctgtgcatgacccacggtcatggtgaaatcgcccagagatgcaaacttgtcctcaccggctgctgcggcacttgctgcagtgctggtggatgctgcgccggaagcagccggggtggatgcaccggaaccgccgcaggctgccagagcacctgcagctgccattgcaccagacaccttcaggaaattgcgacgagagatctttttcataatcttcttcctccttgtttcaggggtacctttttaccttatacgctagcaaagtttttggcggcccctgtatacagcattttcattgcacgctaatcgtaacagaaaattcacatccgcacaaaagccaaacttcaccaacttcgtaaagtttctttgtgcataactaacaatcttatccgtttctcgtggaaactgttacaatccggcgacactatttggttcattttcatctgatatatcaatttttgtcagatatgataaatttcggagcttttccaatacttgtatacaggctattgtatacttcattctcatacgttgacaatctctttttagcaggctaaaatagaaatgtcttatcatcaactatgtaaatggagtgtgagcacatggctgaacagctgcatccagaggacatctaccagacgctggaatatgagatcgttacgctgaagatcaagcccggagagaccatcagcgaaaatcagctgtgcaaacggttcggcatttcgcgcacaccagtgcgcgctgccctgcagcggctggaacagaacggctttgtgcagatcattccctgcaagggcaccatcgtcacccccattgatctggatatcgtggatcagatcgtataccagcgcaccgctgtggaaagcacggtgctgcgcgatttcattcaggtctgttcgcccaaagagtacattgagatcaagcacaaatatgacctactggaagagatggcccagaccatgaccgacccggacaatgtggatatcaatgccttcctgacgctggatctggaaatgcacgccatctggttttgcagcatgaacaagtggtatatctggcagaacctgacaaagccgcagccggattattcccgctttacccgtctggatgtggtgcgggcaaacaatgtgccggatgtgctgagcgagcaccgggaaattttgcgggtgatccgggaaaaagacctggatgccattgaaccgctgatccggcggcacctgtacggcggcctgcgccgcatgggcacccagctgtacgcagaaaagtacagctcctattttaccggcatctgaaccaatgaaaaacaggcgcatccgccagcctttcggcctttggatgcgcctgttttgttttttgtataatttactgcttgtggtacttgcggtcctcttcctcgtaaacagggtcacaggtcaggtacattcccagccggttcagggtgctggtatccacacccgaaagcagcacggtggagtgcacatcgcagcccttgaggttgggcagctgatgcatggccgctgcagcctgctcgttggaagcagccgagctggaaagcgcgatcaggatctcgtcggtgtgcaggcggggattcttgccgcccagatagttggtcttgagggtctggatgggctcaatggaagccgcactcacaaggtcggtctcctgcgggataccggccagcaccttgagagcattcatcagagcagatgctgctgcacccagcagcggaccggtcttgccggtaacaacggtgccgtccggcagctcaatggcggcagcaggggccccgccggtgctctcgctgcgggcatgagcctgcttttccacttcgcgctggcccacggtcaggtcggcctgattcatcagcagttccagcttgtagcgctcggtctccttgaccgtgccggtgatcttctgctcacacaggcacttgaagtagcggcgcaggatttccttgcgggaggcttcgcggcagaccgcatcgtccacgatgcagttgcctgccatgttcacgcccatgtccgtgggggacttatacgggcttttgccggcgatcagctcaaacatggcgttcaccaccgggaagatctcaatatcgcggttgtagttgacggtggtcacgccgtaggcttccagatggaacgggtcgatcatgttcacatcgttcaggtcggctgtggcggcctcgtaggccagattcaccgggtgcttgaggggaatgttccagatggggaaggtctcgaacttggcgtaaccggccttcacgccgcgcttgtactcatggtacagctgggaaaggcaggtggccattttgccgctgccggggccgggggccgtgatgaccaccagcgggcgctgggtctcgatgtaatcgttcttgccgtagccctcgtcgctgacgatgcgggccacatcgttgggatagccgggaattttgtagtggcggaaggtgcggatgcccagaccgttcagccgcttttcaaaggcctccacctccggtgcagcggcatacttggtcacgcacacgctgcccacatacaggcctacttcctggaaggcatcgatcaggcgcagcacatccagatcgtaggtgatgccgtagtcgccgcggatcttgttgctgatgatgtcctcggcgctgataacgatgaccacctcggcctgatccttcagctgcagcagcatctgcagcttggaatcgggctggaagcccggcagtacgcgggacgcgtggtaatcatcgaacagcttgccgccgaattccagatagagcttgttgtcaaatttcttgatgcgctcgcggatatgttctgactgcatcgagagatatttgtcgttgtcaaatccaattttcatcgttcgtttcctttttcctctttgctgtgcccggcacaccgcaccggaacttttccataacagaaacagtataccacactcaaaaaccgggtgcaatccaaaagggcggctgcaaagctttttccagcaaatgcggtgtttcgcgctgttctttgctgcattttttgtgaaaatggttcttgccgcgtttttgacagtgggtgtatcatgttatatccgattggattggaagtcgtgggcggttactttttctttttatccttctgatccttcgcgcgatcctgcgtaatacagcaagcccccgggtctccccgggggcttgctgcggctttatgaagtatctcgaatatggaaggaatggcgtttattctgcgtcggtacggtttttcttgagcaagctcaggatcacagcacccagcacgctgcccacagccagcgccacacagtacagagcggtatggtccacgactgggaacacgaagatgccgccgtgcggtgcacgcagagcgcagccgaaggtcatggagagcgcaccggccaccgctgcaccggccacgcagctgggcaggacgcgcagcggatctgctgctgcataagggatcgcaccctcggtgacgaagcacaggcccatgacgtagttcacgatgccgttgcggcgctcgtcggcagtccacttcttggggcagaaggtggtggacagggcgatggcgatgggagggaccatgccgcccaccatgacagcggccatcacctcatagttgccggaggcaagggctgccgtgccaaagacgtaagctgctttgttgaacgggccgcccatatcaatgctcatcataccggccacgatggcacccagcagcaccttggaggtgccgcccatggcgttcaggcaatcggtcatggcagtgttgatcatgcccatgaccgggttgatgccgcacatcactgcgccgaggatgagcataccgcccagcgggtagatgagcatgggacggatgccattcaggctggcaggcagcttttcggtgatctttttcagcagctcgacgatgtagcctgcagcaaaaccggccagcagtgcagcaaggaagccgccggaaacaccggtggtctcacccgctgcaatgcccgcaaagttggtgccgttcatggccagcacaccgcccacaaaaccgaccgccagacccggacggtccgcgatggacatagcaatgaaggccgacagaatgggcagcatgtaaccgaaggctgcgctgcccaccgtcttaaagaaggcagcgaccggggtgttcatgccaaagttggagggatcgatggtgtaatcgtccagcaggaacgccagtgcgatcatgatgccgccgcccaccacgaagggcagcatgtgggagacaccgttcatcaggttcttgtacagagcgcggccaaagctgtccttgccggaagcatcctcggcggcctgtgcgccgccctcggcgtggtaaacaggcacctcgccgtgcacgatcttcttgatgagctcctccggcttgtggatgccatcgtccacccgggtgaacagcaccggcttgccgtcgaagcgggcggtctccaccttcttttctgctgccacgatgatgccgtcgcagtttgcgatctcttctctggtgaggatgttctttgctccatccgagccattggtctccaccttggtgggcagccccagcttgtcaccggccttggtcagggcttccgctgccatataggtgtgggcgatgccgttgacgcaggcggtcacggccagaatgcggtagccgctctgggggatctcctgctgggtgaagctctccgcgccgaactgagcctcctcctgtgcatcgatgcagtcaaggaactctgccggggtctttgcggccttcagcttttctacaaagtcctcgttcatcagcatctgcatcatacgggccagcatgtccacatgcaggctgccgttttccggagccgcaatggcaaacagcaggtcggtggtaccgtcgtcctcggcattgtactgcacagggctgctcagccgcagcgccgccagactgggccgggtgactacattggtcttggcgtggggcaccgtgatgccgttgtccacataggtggagccctccgcctcacgggcataaagggcctttttgtaggcttccttatccgtgatgttgccatgggtggcctgcagctccaccagacggctgatgatctgctcctgatcggtcagagcctcatccagtgcgatggactgcgcggtgaataattccgtaatacgcatgatttttctcccttcctgtataactgcaaccctctccgtcacagagggtcagatttccttcatcagttcgtcgattttttctttggtggcaaggccaaggctgaacgccgttgcactgccgcaggctgtgcccagacgcagtgcaaaggaatagctccgggtctgcatccagccagccacaaagccggccaccatgctgtcgcctgcgcccacgctgtttacgaccttgcccttggggcagccgatgcggtgcacctcgccattttcgtccaccagcagggcaccgtcgcccgccatgcttaccagcacgttgcgagcgcccttttgctgtagggtgcgggccgcagcaatgatctcttcgtccgtagtcagcaccctgcccacgatctcgcccagctcgtggttattgggcttgatgaggaaggggtggtactgcagcacgttcaccagcaggtcgcgggtggcatccaccacagcacgcacgcccctgccctgcagccgggccagcagccgctcgtaggtatcctgcgaaaggcttgccgggatgctgcccgccagaatgaggatatcatcctcgttcaggctgtccagcttcttttccagctcctgcatggcgctctccgggatgtcgggtcctgcgccgttcagctcggtctcctgccctgccttgatcttgacattgatgcgggtcatgccctgttccagatgcacaaaatcggtctttaaaccctgtgcagcaagaccgcgttccagccatgcgccggtctcaccggccacaaagcccagcgccacgctctcgcagcccagctgtgccagcacaccggacacattgatgcccttgccgcccagcacgcagtcctcgcctttggcgcggttcacctcgcctacttccagcggtgcatccaaacgcaccacatagtcaatggccgggttgaatgttacggtataaatcatacttccgtctcctttaccagcgtgaattgtttgtatttggggttggggcagcggttggtgagaatggcaccgccctgcaggtcggcaatgactgccgggtagatgcgggaaaacttggcatcatccacaaggaaccaggcttcccgtgcacggtgcactgccgctgctttcacggcagcttcctcggggtccggcgtggtaaaaccggcatccagcgccacaccgttggcacccatgaacgccttggtaaaattgtagcgctgcaggctggtgactgtgggtgcacccacaatggcctcggtctggggccgcagcagtcctccgggcagatacacccggcagccctttcgggccagtgcccgggcatgggccacgccgttggtcacatagctggctttgagggcatcccccgccagtgcacgcaccagctccagcgtggtggagcctgcatcgatgaacacaaaatcatcggcgttgatgagctttgccgccgcctgcgcgatgctgcgcttctgctccacagcctgcgactccttggcctccatggtgggttcatccgccagaaaacggctgtccggcagggtggcaccgccgtgcaccttgttcagcttgcccagccggtccagttcggtcaggtcgcgccggatggtggattcgctggtgttcagcgcctcgcacagttcctgcactgtcacggtgcgcttgcggttcagctgttccatgatcaggctgaagcgttcttctgccagcatcggcatcctctcctttggtttgatcttatctttgacggtttatgaccgtttgtgcgttgttttggttgatttcatctttattatagcaaatgcagcgccaaaatcaatcgctttcagtcaattccattcattttcgttcacaaaaaattgtctttaaatttgtgcagggagcacaaaagctgggatacaagcattttgtgcaaacaaaaaagccgccgtgcgtaccaatcgcacagcggccggagagatggcttattgagaaatcactcggcagtccagtagaaatcgtcgccgggcattgcgccgcccactgccttggggtcggcatcaaacagcacctgcagataagcggatgcgttggtcttgagctcgtcgccggtcaggcagacgatgttgcagttgggcagggccttcttggcaatggcagccttggccacaacaccctgctcctcgcacagagcggcagtgccgtccaaatcggcgttggcagcttccacgctcttggcgtagtcggtaaggaatgcggccacaacatccgggtgttcctcggcatactccttgcgcaccacggtcacgccggtgatgagctgcgtatccgcgaccttgttccattcctcggtcaggtcgagggccacacgcagggtgtcgtcctgcaggccggctgcagtcacatagggctggggcagaactgcaatggcatcctcggtattggccatctgggccgtgacctcggtggcctcgctgtagtattcaatggtcacgtccttgtccgggtcgatgccgttggcgttcagaagatagcgcagcacgtactccggcgtggtgcccttgccggtggacaggatggtacggcctgcaaggtctgccatggactggatcgtatcgccgcctttttccactacgtacagcacgcccagcgtgttgacggccacagcctgaatgccgccctccgtcttctgatacagggtggcggccagatttgccgggatggcagccatgtccagctcgcccttcatcagcagcggcacgatctcatcggcagcaccgtaaagctgcaggtcgtaatccatggaagcggtgccatcctcttccatgctcagcaggttgacaaggcccatggtggtggggcctttcaggccggcaatgcgcagagcatcggtggtggacagttcctttgcttcctcactggaagcggcttccgaagcagcctcggggacagcttcgctggaagctgcactggatgcaacagagctggatgccgcaccgccgcaggcggcaaggctcagcacaagggccagagccagcagcatggatgtcagttttttcatgcggggttccctctttcctcacaagaccgcgccattttgtgcctgaaaattttgcacagaaccatgggtcggtcttttcatattttttacaaggcaaatttgcaaaatcatttgctttgcgggtctaagtttactataatagagtcaaaaataccgttgcgtgtgcaacggaattgcaggagggctgtgggaagccggatctttcccacggaattgtgatgaaaaactttcttccgctgttatgctccacctctttattcaatggtctgacccctgaagagctgcagaccctgctggcccagctgggtgccgttatgcgcagctacggcaaaggcgaagcgcttgttctggcaggcgaacccaaccgcagggtgggcatcgtactgtccggtgagctggaagcctaccgtcccgggccgcagggtgcgcgcattcccatcacccacatggaaccgggcggcgtgttcggcgatgtgctgagcggttccagtctggcaagcccggtcacggtgatggcttcggggccctgcgaggtgctgctgattccctacgagcggctactgctttcggatggcagtccggcgcaccagcagacattgcgcaatctggtgcgcaccatcagcgataaatatttttccctctcccgccgcatcgacctgctggtgctcaaaagcctacgggccaaagtgtgcgcctatctgctcagtgaagccgagcgggctggcagcctgaccttcagcatcccgttctcccgcatccagctggcagattacctgaactgcgaccgcagcgccctcagccgcgagctgagccagatgcagcgggacggcctgctggacacctacaaaagcagcttcaagctgctggagcctgcggtactgaagcaaatggtgcagtgaccatttgaatagccgccgcgtgcgctttggctgtattcagctgaaattttatttttatatttgagttttagaaaaatctacggatttttctaaaactctttttcgctggaaggccgtaaccgtcagcggcatcatcttgttatttttaatataggagtatttttaaatatgtcaaaaccgattttatggatcgtgatcccctgttacaacgaggagcaggtgctgcccattacagctcccatgtttctggaaaagatcagcggccttgccgcacagggccttgtgagtgaaaagagccgggtgctgttcgtgaacgatggctccaaagacaagacatgggaactgatccagagttttgccgcacaggacgagcactacatcggcatttcccagagccgcaaccgcggccaccagaacgccgtgctggcaggcttgatggaggcactgcacagcggcacctgcgatgttaccatttccatcgactgtgatggtcaggacgacatcaacgccatggacgagatggttaaaaagtatctggacggtgccgaggtggtctacggcgtgcgcagccgccgcgatacagacaccttcttcaagcgcttcaccgccgagggcttttaccatgtgatgaacgctctgggcgcagacatcgtgttcaaccacgcagactaccgcctcatcagcacccgtgtgctggaaagctttgccgactacagggaagtgaacattttcctgcgcggcatggtgccgctggttggcttcaagagcgaggtagtcacctatgagcgccacgaacgccttgccggtgagagccactatccgctgagcaagatgctggcccttgcctttgacggcatcaccagtctttccaacaagcccatccgccttattaccggatctggcatctttgtgagcctgatcagctttatcggagtcatctgggccatcatcgaagctgccatgggcagcgtggtggccggctgggcctccactatctgcatcgtctgcttcatgagcggcgtgcagctggtgtgcttaggcgtgatcggcgagtatatcggcaaaatttatatggagacgaaagcccgcccgcgctacatcatcagcgagcgcacctgggcaccctacgaaaggaagtatcacggatgagcaaacagagctggcggggcagcaccctgctgaacccggaaccgccggtattggtgtcctgcggcgggctggaaaagcccaatctcatcaccatcggctggacgggcaccatctgcacccagcccagcatggtgtccatcagcgttcggccggagcgctacagccaccacctcattcaggaaagcggacagtttgccatcaatctgcccaccgaagcgctggtgcgttcggtggattggtgcggcgtgaaaagcggccgtgatgtggataaatttgccgcttgcggcctgcattctgctcccggcagcgtgctgaccgactgccccattctggaagaaagcccggtcaatctggaatgcaaggtaactcaggtgatcccgctgggcagccacgacctgttccttgccgaagtggcagcctgcgatgtagacgaaagcctgctggacgaaagcggcaagctgtgtctcgaaaaggcaaagctcatcgtctacagccacggcgactatctggctctgggcaaaaagctgggcacctttggctacagcgtgcgcaagaaaaagccggtaaggcgtaaaaaataatttgcatttcatcgcttgacttttgcccaaaactgcatatactaaagataggcaatgtagagagattgaatccatcgggttcatgccgaaacacgaagcccccggtagtgtcagtaccgggggcttcttttagtgtttgctgcccttgccgatcttaccgtcgatccatgtgcacagatagtaggcgactacctgcgcggcaacggtttggataaatgtagagagagtttccaaggggttcacctcctttccgcggttaggggaatggagaagggccgcaggaaccgtatagcataaaaaccggtatcgcgcaattttgacgcaataccggtttttgtgcatttattcgtgctttacgcgctggatctcgcccagatcgtagggggtgttctggtagacgtagtagttcagccagttctcatacagcaggtgggcgtgggcacgccagcggaacagcggcggtttggacgggtcatcgtccgggtagtaattcaccggcacatggatgggcaggcccttatccacatcgcggcggtactccgaatccagcgtgtatttgtcatattccgggtggccggtgacaaagatctgtcgtccgttctcggtgctcatgaggaaaggcccggccacatcgctctcggcaaggatgcgcagagccttgcagttgtccacatcctcgcggctgatgccggtgtggcggctgtgaggcgcatagaacacctcgtcaaatccacgcaccagcgggttcgacgggcgggtgacccggtgctcgaacacgccgaacatcttttccggcagcagctgcttgtgcacgccgtagtggtagtacaggccagcctgtgcaccccagcacacatgcagggtggagtagacattcgtctcgctgaagtccatgatctcgcacagctccggccagtaatccacctgctcaaagtccatggtctccaccggcgcgccggtgatgatcatgccgtcgtagcggttgttcttcacctcgttgaagttcttatagaacgattcgaggtgtgctgccgaaacgtgggtcgccgcatggctggccgtctgcagcagggtcatgtgcacctgcagcggggtatttgccaacagacgggcgatctgggtctcggtggtgatcttggtgggcatcaggttcaggatcaggatctccagcgggcggatgtgctgggcaagggcgcgctcacgatgcatgacgaagatattttcgttgtagagggcatcgtaagcaggcagggtcttggggatgatcagcggcatagttcgtactcctaacgatttagaatagcctccgctgacgctctggctatcttcagcggaatttatttttatattttgcgtttgtcgcgccctgcggggcgctccaaacgcgtttttacgagaagggccggaaccgatagatgctgctgaactcaccttttagatcttatccagcgcttgcgcaatatctgcgatgaggtcttcgctgctttccaagccgcagctcatgcgcaccagctctgcgggtacaccggcggctttcagctgctcatcgttcatctggcggtgggtgctggatgcaggattcaggcaacaggtgcgggcatcggccacatgggtctcgatggctgccagcttcaggttcttcataaagatgcttgcagcctcacggccgccggccagaccaaagctgaccacgccgcagctgccattcggcagatacttctccgccagtgcatggtacgggctggactccaggccgcagtagttcacgtaggccaccttgggatggctctcaaggaactctgccacggccatgccgttggcgcagtggcgctgcatccgcacatgcaggctttccagaccgaggttcagcatgtaggcgttcatgggcgactgcatggagccaaagtcacgcatcagctgcgcggtagccttggtgataaaggcaccctctttgccgaaacgctcggcgtaggtgatgccgtggtagctgtcgtccggggtgcacaggccggggaacttctcggcatgggccatccagtcgaacttgccgccgtccacgatggcaccgcccagcaccgcgccatgaccgtccatgtacttggtggtggagtgggtcacgatatccgcgccccactcaaaggggcggcagttgaccggcgtggggaaggtgttgtccacgatcagcggcacaccgtgggcgtgagcagccttggcaaacttctcaatgtccagcacggtcagggccgggtttgcgatggtctcgccgaacaccaccttggtgttgggctggaatgcggcgttcaattcttcctcggtgcacagcggatccacaaaggtggcatcgattcccatcttcttcatggtgacggagatcaggttgaaggtgccgccgtagatggtactggatgccacgatgtggtcgcctgcttcgcagagattgaacagggcaaagaagtttgcagcctgaccgctgctggtcagcattgcagccgtgccgccttccagctcgcagatcttcttagccacaaggtcgcaggtggggttctgcagacgggaatagaagtagccgtcagcttccagatcgaacagcttgcccatgtcctcgctggtggcatacttgaaggtggtggactggataatggggatctggcggggttcgccgttgccgggggtataaccgccctgcacgcagatagtatcacgattcatactacatactcctttactgggtttgtccatatagcacaattccccgcaggagtgctgcagcctccggcggggaattgaaacgttaaattttagttcccgttcgggggcaaaatgaggagaggactccttccgtcaaagcctttcggctttggcaataccgaaaagttttcctcttcgccagaggctccctctccgtgggagctggcgcacgaagtgcgactgaaggagttacttccgcagccgcttatcgcttctggtggcccaagcagtgcccaaagtctggaacacctgaaccatcagcaccagcaaaatgacacacacgatcatgatatcggtctggtagcggtaatagccgtaggacaaagcgatcttgcccagaccgccgccgccaatgacaccggacatggccgagtagcccagaatggtggtcagtgcggtggtcatgctggagatcaggccgggcaggcattccgggatcatcaccttggtaatgatctggaacggcgttgcgcccatgctctgggccgcttccaccacgccctcgtccagctcgcgcaggctggtctccaccagacgcgccacgaacgggaaggctgccaccaccagcggaacgatggtggctttggtacccaccgtggtgcccacgatggcacgggtaagcgggaatacacagatcatcaggatcaggaacggaacactgcgcaggatgttgataacgatgttgagaatgtgcatcagccagccgggcagcggcagaatgccgtccttatcaccggccaccagcagcacacccagcggcaggcccagcaccagcgcaaacgcggtggaaaggaccgtcacataaaaggtctcccagatggcaaaaccgtaatctgcaatactcattcgccggtcacctcctctaccgtaatgccgggctgggcgcgcatataggccgcagcctgctttgcctgctccacatcagtgggcagcttgagcagcatagagccgtagcactggccgctcagatcacgggtgtcggcactgagtaccgacaccagaatgcctttttctgcggcaaggcttgccaccaagggcttagccgtggacgaaccgttgaaggtgacgcgcaccacatggtcgtccggggcaaagctggacagatcccgtgcggcgctgccgccgttgggtgccaccagacgctttgctgcgggcgttttggggttcgagaagatctcctgcacagagccttcctccaccacaacgccgccgtccagaatagcaacgtgatcgcagatctcttccacaacgctcatctgatgggtgatgaccacaaccgtgatgcccagcttcttgttgatgtccttgatcagggtcaggatagcatgggtggtgttgggatccagtgcgctggtggcttcatcgcagagcagaactttgggatccgttgccagtgcgcgggcaatggcaatacgctgcttctggccgccggacagctgtgccgggtaggcgttggccttatcgggcaggcccaccacttccagcagctctctggcacgcttttcggcatccgcctttttcacaccggccagctccatggggaagcagatgttcttcagacagctgcgctgcatcagcaggttgaactgctggaagatcatggtgatatcgcggcggcgctcacgcagctgggctgcgtttaaagtctccatagcggtgccgtcgatcacaacgctgccctcggtggggcgttccagcaggttgatgcagcgcaccagcgtggatttgcccgcaccggacataccgatgatgccataaatggaaccatccgggatggtgaggttgatgtccttcagcgcattcactgcgccgtccttcatctggaaggtcttggaaagatgtttgatctcgatcacagaaattgctccttgctgttgaataaactccttcagtcaaacccctgcgggtttgccaactccctcatggagggagcctgaaacagaacggtcaggcaaaggcccccttcccgagggggctgtcaccgcaaggtgactgggggagtttgcttaaccctcgatcggtgccagactgtcctgcttgccgccgtagatgcccataggctccacgtggatgccggcaaccgtcaccagatgggtgccgtgctctgcattgaagtcgtccagatacggctgatgctggaaatagttggtatcgcactggccgtcctcaacgatgttgttgggaatgatgtagtcgtcgtactcctgaatatccagcgtgatacccttttcggccagaatgtccttgcagatctccagaacctcgcagtgaggagccggagtagcagcgcagctgacggtctcgccgttcagtgcatcgtagtcgatggaggagtcatagccgtcggtggggttctccacaacggacaccacagcgcccttgtagttttcatccatgaagtccttcaccttctggctctgcagagcagcggccagagccttgatcttcggctcttcctgattgccgtccttgcagaccagaatattgacgtaagcagaggtgccgtcctccattgccagagcatcggtcatggggtccagaccagcggagatggcgtagttggagttgatgacggcgtagtcctcgtcctgcaggacgttgggcacctgagcagcctcgacctcatcgacggaaacattcagggggttctcctcgatgtcctttgcggttgcggtcaggcctgcatcagccttcagcttaaagaagccgttcttctccagcagggtcagggcgcgtgcctcgttggtggtgtcgttgggcacagccaccttcaccttgtccagcttagccacagcagaagaagctgcggaagaagcagtgccggaagcagcggaagatgcggtggaagaagaaccgccgcatgcggtcagggcagctgcagctgctgcagctccggtaactttcagaaaatcacgacgagtaatcatagttttgttccctctctatttgcttattataatgtacagcggcccgcacggcacagttccgtgctaagggcctttgacggatgcatgaaaaaagctcccgtccttgaccttgagccaacgctcagacaaggacgggagcataacatacttccgtggtaccaccttggtttaccgcacccttgcgggcacagcctcaatgctgcggcagctttgctgcttacagccggacgctgtaacgggcgcatcccgttgcgaacttagcgctcatgcacctcgcccgcacagctccgagaccattttcagcttcctgtttcctgcccttttccatcgcccgggctttctggtaaggatcaatgcgaaggcctactcttctcttcacagccatttttgtgatattgcatttataataatccaatcgaccggatttgtcaacacctacaacgaagttttttagtaggaaattgcgtttttttatcttgtgcgccagccgcggacatggtagaataagacagcattatttataaaggaggtgcggcaatgaacagccgcgaggttttcccggatgaagaactgcgccgccgcatcatggattttatcatggcggcgggccagacattgctggaaaacggtgccgaggtgttccgggtggagcagaccatggagatcatggcccggtcgttccatctgcgggagttccacgtttatgtgctgaccaacggcatctttgccagtgcgggcaccgccgagatcagcgaggtgcgcaatgtgcccaaccgcaccacccatctgagccgggtggcggcagtgaacgccctctcccgcgagatcgccgagggcaatatgactctggacgaggccgagagccgccttgtgctggcacggcgcatccccttccccaaggactgggtgcagctggtctccggcatgtgcggcgcgttctgctttgcgctgatcttcggcggcacgctgcgcagcgcattggcggcggcgctggcaggctttcttgccaacgggtatctgctgctgtgcggccggcacgacctgcccggcggcttttgcaagatcagctgtgcggcgctcatcacgctggcgtgcattctgggctgcagcctgctgggcacatccgccagccacgccatcatcggttcgctgatgatcctgacgccgggcatcgcctttaccatgggcatccgcgactttgtgcacggagattacctctccggcaccatccgcatgatcgatgcgctgctcattgcagccagcattgccattggcaccggccttgtgctgagcctttatacattctttacgggggtggtcgtggcatgatgttgaccagtacacaaattggggagctggccgcgcagttctttattgccggcgcaggcaccctgagttttgccgttctgttcggctgtccgcgcaaaagcctgcccttctgcgggctggtgggtgccgtgggctggtttgtctacgagctggccgtgatgctgggggcagacagtgccgcagcctccctgctggcggtcattcctctcaccctgctcacccgggtgtttgccattgtgattaaaatgccggtaacggtgttcctgctgtccggcatcttcccgctggtgcccggcgctggcatctactactgcgcctactattttatacagggcaacaatgcgctggccctttccaacggcatcagcacctttaaagtagccgttgcgctggccatcggcatcacgctggtgctgtgtgtgccgctgccgaagcggaagtaagaccctctccgtcatctcgctttgctcgatgccagctcccccgaaagggggggggagcttttttgctcctaaccggcagatgcttaaaattcccccttcgggggagctggcgaacgcagtgagcctgagagggttcatccgttcccttggggaagctggcaaagccgcaggctttgacggaaggggttgcccgctgccgaaaaaacggtggaactgactataaacgtaaaagagcggcagtcgcacgactgtcgctctttttgtacttaaaaacaggacggtagccgtgttgactaccgccctgttggtgctatttgagttttttcaaaaaacttctgtgccaggaaatcagagcttggtcacaatgaagacagtatcgaagggacgaaccttcaacagctcttcctccgtgtcgtagtcggtgctcagcttgtagccgtccggcagctgaatatcagcagcgctgacgccagttgcatcgactgcaacctcagccttagccttaatgtagttgttcggcagctccagcagtttgacatcgatggtcttcttggtcggagtcacagtcacatcagtcacgaagacgatgatgtactcacccttgctgtcgtccttgcggatttcaacaacagcgttctcgttctccagatggtaatcttcgggaagcagcttcttatcgatgtcagcaaccttcacagagttctcggtcttcagaacatcaatcttggcagtctcacccacaacgttggtcacaccattgccttcgtccttcatgaagataaccgtaacaggacgagtggtcacaccggggacatcggggacatcggggccagagcagccagccagaacaccggcagcagcaacagccagagcagcgacacctgcgcccttcaggaactgacgacgagagatattagacataataatcaacctcacaatcttttctgcatgcccccatcacttttttgtggagcctgcttttcctatataatacccccccccgtaacagtttgtcaagtggtttttggcatctttttccgccggatgcagaaaaacaggagcgaccaagagaaaatcgtaagttccgtcaagcccggcaaaaagggccgctgcacagcatcccgtacagcggccctttttgttctccgttattttcattcattctcaacatgtcttgttttcatcttctgtctgctcatgttcccctcttgccgcccgcatcagcccggcaaacaaaaaacccacattgacccccagaataaaacccacgatgcctgccgccaataccattgcgccgtctccttttttctaccatattttaccatatatcatttgtcggatgcaattgcagcccgtcgcaaaaggcaagatcactgcccaacgtgcaagcttttttgcgccggagcgttgcaagactctgccgcatctgctatacttttgacaacacttatatataaaggaggtgctctttatgtctgttatggatactcttgtcagccgccgcacctaccgccgctttgcacagaaagctgttccgcaggatgtggtggatgatatcgtcgaggccgtccgcctgtcctcctgcggagccaaccgtcaggctgtgcgtctggtggtggtgaacaagcccgaggcggtggcaaaggtgcagccgctggtcaagtgggctgcctatctgccgccggagcagggcacgcccaaagccgacgagctgcccaccctgtatgtggccgtggtgcaggacacttccatctccggcgaccttgccaccgataccggcatcgcccttgccaacatgacccttgccgcatgggacaaaggcgtgggcagctgcatcatgggcgcgatcaacaagcctgccctcaccgaactgctgggcattgaagaaccgcagaagctggcattcatggtggcgttcggctacccggcccacaaggctcacattgtgccgctgacggctgagaccggcgtaaaatattatctggacgagaaccgggattactgcgtgccaaagcggagcaaagaagagatcgcaaaatatctataatttgtatatatacatttcttcaacgcattttttgtataattgttttcaattcggtttcaattgatgagattttttgcacaagtattgacttttcaatttgtacaatctatactaaattcgttcgccagatgttcgatgaatcgcatcgttctggcgtaccgcaaaaacatacagtacatttgaggagtgtttgaatatgaaaaagatctctcgtcgcagctttctggcagctgccggtctgtccgttgccgctctggctctgaccgcctgcggtggttcttccgcaagcaccgcttcctccgtggcaagctctgctgcttcttctgaagctgcttccaccagcgctgccgctggcgagctgaccaccgttgaggccggcaagctgaccatggccaccaacgcagccttccctccgtacgagatgaccaccgatgcaggcgagttcgagggcatcgacattgagaccgctcaggccatcgctgacaagctgggtctggagctgcagatcgatgatatggactttgacgctgctctgctgagcgtgcagcagggtaaggccgatatcgtcatggccggcgttaccgttaccgacgagcgcaaggctgtgatggacttctccgacagctacgctaccggcatccagtccatcatcgtgcccgaaggctccgatatcgcctctccggatgatctggcaggcaagaagatcggcacccagcgcggcaccaccggctacatctactgctccgatgacttcggcgacgacaatgttgtggcttacgacgacggtctgaccgctgtgcaggctctgaacaatggtcaggtggatgcagttgtcatcgacaacgctcccgcccaggagttcattgctgccaaccccggcctgaagatcctggataccagctacgccgaggaagattacgccattggtatggcaaagggttcttctctggaagatgccgtcaacgccgctctggaagagctgaaggctgacggcaccctgcagtccatcgtggacaagtacatcaccgctgaataatcagctggctgataacggaaccacggggaggcagcccccaactggggcacctccccttttttggaaaaataaggttacaaaattctaacaaaacaggaaagtgaggatgcgaatggctgctcaatacgaactgctcaaagagctgctcaacagcggcaccaagctcagcttcgggcaggagtttttcttcaaattttatcaggccttcatcctgaaagaccgctggacgcagtacatcaacggcgtgggcaccaccctgctggtcactgccattgcgctggcactgggcatcgtgctgggcagcgtggtggcactggtgcgtgtggcacacgatcagcagcgccccggccgcagaaacccggtgttgggcttcttcaacatcatctgcgaaatttacaccaccatcatccgcggcacgcccatgatggtgcagctgctcatcatgagcatggtcatctttgccaacagccgcaactttaccatggtgggtgcgctggcactgggcatcaactccggtgcctatgtttcggagatcatccgcggcggcctgatggccgttgaccccggccagatggaggccggacgcagccttggcctgaactacatgaccaccatggtggtcatcatcatcccgcaggccatccgtgcggtgctgcccgcactgggcaacgagttcatcgtcctgctgaaggatacctccctgatcacggtcatcggcggcaaggagctgctgtacgccgcgcagggcatcatgaaccgcacctacgaacccatgttcccgctgctgggtgatgcactgatctaccttgtgctggtcatgctgttcacccgtctgctggcaaagtttgagaggaggctggctcaaagtgaccgataaaattctggaagtccgcggcctgacaaaaacctacggcggcgaaaagaagccgggcgcaaagcagcccacccccactctggacgtgctgaagggcatcgatattgatatttaccgcggcgatgtggtctgcctgatcggcccctccggctgcggaaaatctacctttctgcgctgcctgaaccggctggagattccctcctccggcagcatcaaatttgagggcaccgaggtggacgaagcccacatcgacgctgtgcgccagaagatgggcatggtgttccagcacttcaacctgttcccgcacctgaccgtgaagaagaaccttgagctggcccccaccctgctcaagctcaaggataagcaggccatttccgacaaggccgacgaactgctggcccgcgtaggcctgtccgacaaggccgacgcctaccccaagagcctgtccggcggccagcagcagcgtattgccattgcccgtgcccttgccatggatccggacgtaatcttgttcgacgagcccaccagcgccctcgaccccgaaatggtgggcgaggttctggaactgatgaaggagctggcccacaccggcatcaccatgctggtggtcacccacgaaatgggcttcgcccgtgaggtgtccaaccgcgtcatcttcatcgacgacggcaagatccaggaggacgagccgccgcaggaactgttcacgaacccgaagcatcccagactgaaagcattcctttccaagatgctgtaatacttttccacatagaaaacgctccgctgtgcaaaacacagcggagcgttttgttgtacttcgtcaaaaattatggtataatgcaaataaggcgctgattgcaaaattggtggtcatgctttctatcccgtatcgctgcttcttttcacatagaacgaagcagaggttccgggaggaaacttttttggggaagtaccctgcccggagccttgaaggcgaagggagggatatcggatgactctgttggaaactctcgcactgcttacgttcattctcacgctgctgggtctgatcgtggatgtgatccgcctgaccgtcgaggttatggcaaagttttcccagacgaaaagcgatgataacaaaaaagattgaccgcctacagttaccagccgagcggtcaatctttttgactaacgggatggaaagctgacctttgcagtcagcgccccttctgtttgtagtataacttttttctgtcgctctgtcaagggcgaccttttttacgtgttacagattattttctccgtttccgctttcgccctgctcgctggtatacagcaccatcagatggttggcgctctcttccagctgggtcttggcctgacggagattggcttcctcgttttcattcatcttttcgggcttatccttgcgcaggcagcggcggaggttggcaaggtccgttttgatgcggttcttctcgtccttgtccagctcctttttgcatttggaaagagcctcgtccaccttgtaggccagcacctcggcctgattgtgcaggtctaagcgctccttgcggcggctgtcctcggcctcgtaggcggcagcgtctgccatggcgcgctggatctcattttccgaaaggttggtgctgccggtgatggtgatgttctgctcccggccggtgccaaggtctttggcagacaccttcaccacgccgttcacgtcgatatcgaaggtaacttcgatctgcggtttggaggagaagcttgcccgaatgccggtgagcttgaatttgcccagactcttgttgtcgcgggcaaagtggcgctcgccctgcagcacgttgatctccacactggtctgcatgggccgtgcggtggtgaagatctggctcttgcgggtggggatcatgctgttgcgggtgatcagcggggtggccacgccgcccagcgtctcaatggagagggtcagcggggtcacatccatcagcacaaggccctgcgccgctgcgccggtggcaccggccagcttgccgccgccctgcagcagaccgccctgcacagccgcacccatggcaacacactcgtccgggttcaggctgtggctgggttcgcagcccaacagctccttcacctgacgctccaccgcaggcatccgggtgctgccgcccaccagcagcacctttcccagctggctggcagaaatgcctgcatcccgcagcgcattctgcacgggagccactgtgcgggccagcaggtcgccggtcatcatttcgaactgcgggcgggaaagcgagatatccaagtggtgagggccgtccttgcccactgcgataaaggggaggttcagctgtgccgacggcgcggcagaaagctccttctttgccttttcggcttcctctttcagtcggcccatagctgccgggtcgcgggagaggtcgatgcgatccgactttttgaactcggccacggcatattccacgatgcgctgatcgaagtcgtcaccgcccagatgggtgtcgccgccggtggcaagcaccgtaaaggtcccgtcctcgatctcgatgatggacacatcaaaggtgccgccgccgaggtcgtagacgaggatcttctgcgatgcttcgttatccaaaccataggccacagcggcagcagtaggctcgttgatgatgcgcagcacgttcaggcctgcaatgcggcctgcatcctgcgtagccttgcgctggctgtcgtcgaagtaggcgggcaccgtgatgaccgcttcggtcaccggctcgcccagatagctctcggcatcgcggcggatcttggccaagatcatggcgctgatctcctgcggggtcaggtctttgccgtcgatgtgcacccggtagtcactgcccatatggcgcttgatgctggagatggtgcgcccggaatttgtggcgatctgtcgcttggccgcgccgcccaccagacgttcaccgtccttcgtgaaggccacaacgctgggggtagtgcgctcaccctccgcattggtgatgaccacgggcttgccgccctctaccactgccacgcaggaattggtcgtgccgagatcgatgccgattactttgctcatactgtctgtttcctctccggtgctgtgcatcttgggcgcagctcttcaaatcatttccgagtatatcttaccgtcccgatatgacgattttttagtccaattgtaaagattccatgtcgtaagctgtggctcgggcaggcagttcactggtcagttcccggatgagctggtcggcttcggccagccactgctctgcgtccggctcgtgctcacgggccttgatggaaaagccctgccttgcttctgcggccagtgacagcgcctttttgcggctggtgtagcgcgtttcggtctgggccacacgcaggcacacctgcggagtgtactcgatatccggcatatgggctgcgttggcgcgggcacggcggtaatacaaaagtgcccggccattgtcgccccgggcagcgcagtcatcgcccagtgcaatgttggataagatctcgccgctgtctgctgcttccttccacatgcggcgggccttggcacggttcgtgcgggtgccgcggcccttataaatacagtctgccagcagggcaagtcccatggcactgccaagctcggctgctttttcaaagcattccacagcctgcgcccagttgcccttgcgggcggcttcctttccggcatccgctttctcatcaccggggtcttccggcgtatggcctgcgtgcagcaaaccgttgagcagagcgccgtccagcgtagccgagtggctccacgggtccagcaccacgccgtcgatctcctcagtggaaagggccagctccatggcatcctgcagggtgtaatctgccattggccgggcagaagtgctgcggtcggcgcaggccgcagctgcagaggtgaacataggcagccatgtgcggcccttctcgttgcgcagggtccacagctgcaggtccttagcctttgccgtgggcaccggatgctccgtccacggtgcaggcgtgttgtgcaccgtcagtgccgtgcgcagcggcaccagaacatgggtctccatttccagtgcatagttcaaagcgcccatcagcgtccagaagctttcttcgttctggcctttatataaattttccactgcctgctcaaaggccgggcagccggtgcccgccgggctgtaggccggagcgttctgccgatgcttgcgggtgcccaccgggcgcagccggatgccgccgtcttgtctttttgccatctgctcaccattcttccagtttctagtcaatttttagtatagcaggaaatggctttgggtacaacgcctatctgtatgtatccatttttccctgctcaaaaaaagcggggtgccagatcagcttcttctggcaccccgttaaaaatacatttttcctgaaacgccttattccgcgtccagatcttcttcggtctcagcagcaatatagatcggtctgtgctttgtttcaagatatgttttggcaaggtactcgcccgcaatgcccgtacacagcagctgcacaccactgcacaaaaggatgatgcagacaaggctcggccagccggaagtagggtcgccgaacatcagtgcacgcaccaccacgatcatgatgcctacaaacgccaatacgcaaaaggcaaggccaaggcccgccgccatcagcagtggagctgtggaaaagcccacaatgccttcgatcgaatatttgagcagaccccagaagttccactttgttgtgcccgccacacgctctacgtttttgtagtcgatccactttgttttaaagccgacccagctgaaaatgcccttgctgaagcggttatattccgtcatgctcagcacggcatcagtcattttgcggctcatcaggcggaagtctcttgctccatccacgatctctgtatccgagagcttattgatgatctgataaaactttttggcaaaccagctgcgaacgggcggttcaccctcgcgtgtggtgcggcgggtggccgcacagtcatattcgccggagaacagcagctccagcatttccggcagcagcgagggcgggtcctgcagatccgcatccatcgttgctacataatcgccctttgccgcttttaatccggcataaatgcctgcttccttgccaaagttccggctgaaggagatgtaccgcacacgggcatctttccggtgcaattcccgcgcgatctgcagtgtgcggtcttttgagccgtcatccacaaagatgaactcaaaatctgctctgtgggatattcccatctgctgtgcgatcttgctggcctctttataaaaaatgggaagtgattcttcctcattgtagcacggaacgaccaaacttatcagcattcctgtttccccttttgtgcaatatttaaaatcattgtagcatacccccaccctggtttcaaccgttttcggcattttgcccggcggttttcagcacacttttgcaataaaaacattttctatggctttttaagtttttgtacgctataataagtaggatttcataaaccttataatgcaagaaagaaggagtatcgccttgaacaagatgctaggctatctgaaggactacaagcgcgagagcgtgcttgcaccccttttcaagatgctggaagccacgttcgacctgttcgtgccgctggtcatggcggatatcgtgaacatcggcattgccgcccacgacttccactatattcttgtgcggtgcggcattttgctgctgctggccatgatcggccttgcctgcagcctgacggcgcagtatttttccgcaaaggcggccgtgggctattccacagctctgcgccacgccctgtttgagcacatccagaccctgagctttaccgagatggacaccctcggcaccagcaccctgatcacccgtatgaccagcgacgtgaatcaggtgcagagcggcctgaacctgtttttacgcctgttcctgcgcagcccgttcgtggtgatcggtgccatggtcatggcctttacggtgaattcccgtgcagcgctgatctttgtagtgaccatcccgctgctgagcgtggtggtgttcggcatcatggctgctacccggcccctgtacaagacggtacagaatcgccttgaccgggtgctgggcctgacccgcgaaaacctgaccggcgtgcgcgtggtgcgcgcttttgataaggaaaagagcgaggtagagcgctttgagaatgccaacgacctgctgaccaagatgcagctccatgtaggccatatctctgccctgatgaacccgctgacctatgtgctcatcaacattgccattgtggcactgctatatgtgggcagcattgagatcaatgtgggtggcatggcttccggcgacgtgattgcgctggtgaactacatgaaccagatccttgtggagctggtcaagctggcaaacctgatcgtgcaggtgagcaaggcgctggcctgcgcaggccgcgtgcaggctgtgctggacaccacgcccggcatggccttcccggaaaagcttctgggcgaggtgcccgccgaaaaatccggcgatgccgtgcgctttgagcatgtaagcctgacctatgcgggtgccggtgcacccagcctttccgacatcagcttcactgcaaagcgcggccagaccattggtgtcatcggcggtaccggcagcggcaaatccagccttgtcaacctgattccccgcttctacgatgccaccgagggcacggtggagatcatgggccgcgatgcccggaactatccccgtgaagaactgcgcggcaaggcagccatggtcatgcagaaggcccagctctttggcggcaccatccgctccaacctgctgtggggcaacaagaatgccaccgatgcggacctgtgggccgcactggaaacagcacaggctgcggagttcgtcaaagccaagccccttgggctggacgagcctgtggagcagggcggtcgcaacctgtccggcggacagaagcagcgcctgaccatcgcccgcgcccttgtgggtaagccggaaattctgatccttgacgacagcgccagcgcactggactacgccaccgatgccgccctgcgcaaggcactggctgctctgcccggcagcctgaccgtgttcatcgtgagccagcgcgccgccagcctgcagtacgcggatcaaattctggtgctggacgacggccatctggtgggcatcggcacccacgaccagctgcgccagacctgccccgtctacgaggagatctacgagagccagttcaagaaaggggatgcgcagaaatgagtgcaaaagcaaaaacaaagctgaccccgcagcagcgcaaggccaccttgacccgtgttctaggcaaaatcaaaccttattccctgtttgtggtgtgcagccttgtggtggccgctgtgagcgtgggcgcgcagctgtatatccccatcctctgcggcagcgccattgatatgatgctgggcaagggtgccgtagattttggcggtgtgatgcgcattatcatcgaggtgctggtggttgccggtgtggccgctcttgcacagtggctgctgagcgtgtgcaacaaccgcatcaccttccttgtcagccgcgacctgcgcaacgaagccctgcgcaaaattcagaccctgccgctttcctacctcgacagccatccctccggcgatatcgtcagccgcatggtggccgatgtggatacctttgcggacggcctgctgatgggctttacacagctgttcagcggcgttctgaccatcctcggcaccctgctgttcatgctcagcgagaatgtgcccatcacgctggtggtggtgtgcatcaccccgctgagcctcgtggtggcaagcttccttgccaagcgcagctatggttacttccagagccagagcgccgtgcgcggcgagcagaccgcgctggtcaacgagatgatcgagggccagaaggtggtgcaggccttcggccacgaggccgagagccttaccgcctttgacgaggtgaatggccgtctgcaggacgtgagcctgaaggccatcttcttttccagcctgaccaaccccgccacccgctttgtgaataacatcgtgtacgcaggcgtgggccttgtgggtgccgtgtacgcggtgcggggcggcatcaccatcggccagctgagcgtgtttttgagctacgccaaccagtacaccaagcccttcaacgaaatctccggcgtggtgacggagctgcagaatgccctggcctgcgccgcccgcgtgttcgagctgctggatgccgacgatcaggtgccggaagtcgagaacgcccccgtgctgcagccggacggccatgtgcagctggaggatgtttccttccgctacctgcccgaccgcccgctgatcgagggcctttccctcgacgtaaagcccggccagcgcatcgccatcgtcggccctaccggctgcggcaagaccaccctcatcaacctgctcatgcgcttctatgatgtgaacggcggttccatcaaggtgtccggcaccgacatccgggatgtgacccgcgcttccctgcgcggcagctacggcatggtgctgcaggatacatggctgcgggccggtaccgtgcgggaaaacattgcctacggcaagccggatgcaagccttgaagagatcgtggcagcagccaaagccgcccatgcagacagcttcatccgtcgcctgccggagggctacgataccgtcatcgccgaggacggcggcaacatcagtcagggccagaagcagctgctgtgcattgcccgcgtgatgctctgcctgccgccgatgctgatcctggacgaagcaacatcctccattgatacccgcaccgaggtgcgtatccagaaagcttttgcccgcatgatgcagggccgtaccagctttattgtggcgcaccgcctttccaccatccgcgaggcggacgtgatccttgtgatgaaggacggccacattgtggagcagggcagccacgacgagctgcttgctgcaaacggcttctacgccaagctctacaacagccagttcgagggcgtggagacctgagagttcctgataataataacaaaaagagcgatgcagcgcatcgctccttttgttattatttgctttcaactttctgcacgatgggttcatcgggcggcggcgtgagggtagagtgctccacaatgaactgctccgccctctcccgggccagacgctggcgcaccttgcgtgcatcgttggcggggaaggtgcgctcgccgtccagcttggcatcccagtgcgcagcggctgcttccacctcggcgtccgtgggtgcaaggccctccttttctgccaccagcagaagccccagccagctgcgcagcttgcgctctgcctgcgcgtggagccatgcacggaactcttccaccgtctggccgcgcactttaaggaactggtcaaagttgatgccattggcctgcaggctcaggttgaactggcgctgctcggcaaaatagttaccgcccaccagctgctttggcagcgggcctttcactgcatcgcccagctgccataccagcttcttgcgtgcccgctgctcagcctgggcacagcgctgtgcccagatctcgcgggccacctgctgccgcagcgccgccttgcccgctgcatcggctgcacgttcttcgtcgccgtggtggcggttgatctccagttcaatggtcagctgccggatggggtgcggctcaatgggctgcacgaaaccggtgtactgccccacttccagcggcggcagcgcgtagaactgcgcccccgcccggaagccctcggcccggttcaccgccagcaattcaaaatccgggtcggtcaccggcaccacatggtactcctgcaccagctgctcatacagcgccgaaaagccgccaagaatggtgcgattcaccgcctcggtcagcagaccgtcctcttcctgcggcgcgtccggctccgcctgcacctgtgcaacggctgccgccagctcctcggcaccggctgtgaataccagccggcagtcgcccggctcagccatgccaaaatgttccagtttcatcctcttttcccctttcagcgggcaatgcccacggtcagcaccagcagggccacacccagcacggcatacagcacctcggctcccagcgtggcccggtcgccctctacatacattttttccgggttttcggggtcataatataaggtgacggtgtcccccaccgcaaagcttttgccgtgcgcaggcttcgggtagtgcagccgatggctgccgcctgcggtggtaaaggccagcacataggcaccgccatcccggctccgcacggtgccctccaccgtggccgtgaccttctgcccctgcgtgcacagcctgcgccgtgccagcacgctgcgcagagccataaagaacatgatgcctgctcccagcaggaaaataatgatattgaacattctgcatttccctcgttttctcagtctgcgcgcaggacaccctcccggcgcgtcctgtttattgtatcacactttggcaaaaatttcgccctgcagctgccattcagaatgcatcaattttcaagcaaaattttgtcgagaaaaattaaaaataatgcttgacaattctgccatatctggtataataactatcgttccgagcaacacagctcgcaaacaaaacagaatatgcggatatggcggaattggcagacgcgttagattcaggttctaatcggggcaactcggtggaggttcaagtcctcttatccgcaccaaacaatgaaaatccgaaccttttctcgataggagaagggttcggattttttgttttcttcggaaagcaaaatgaaggctccttcccgacggctgtgtgtccaaaaccttatcagaagaaccgtataacaaaagtcacaactgtaaaggtgccgtaaggcagaaaggacacaaacatgaagtacgatgcaagagcctgccatttcaacatggataccggctgcgtggagctgctgctccgggatgggagaatgatctccattgactgcactggggtcgaggatgaattggacgtgaccatggcgcagaggtcggagttagattatctcatctacaatgacccgcttggctatgcagacttgattctgaacggcgaaccagaggagtatctgaagaatgtggcgggaagtcacggattagaagattaagcataaaagggtatgcggctataaaccgcatacccttttatgctttatcgcttccagaccgctgcggcattggaacgtgacatcagttcttcgaccgggattccggctgggcagatgtcctggcacgcaagagattttccgcagccttcaaaataaagctgacgatacgcatttgcgagttctgtctgatgggcaatatcctgttcttcgttcagaatacggtaagcgttgacgggcagaacagctccagcaaattcactgttcgggtcaaagttcgggcagacctccaagcagcagccacagagcagacacttagcagatcgataccgctggctgtgcgtatagctggtctggaacgcatctccttccagccacagctttgtccgcttcagtgcttcaaagatcacggaacggtctacgaccagatctttcaccagtgggaatttgctcaaaggctccagagtaacaacgcttcccttacagtcccgcagaaaaacggaacaggcaagacgaggcagaccattgatccgcatggcacaggcaccgcacttgcgtatcatgcagccgcattcccacgcaatgggggaaacgaccgttccgctcttttcgcacagagggctgcggtgattcagctcgttcaacaccgaagcaatcgaggtgtccgcacttccctcaaaggaaaactcctgccagcagggtgaagcctgcgggttttcctgccgtttgattcggatggtgtagttcataaatcatgccgccttttggggatggattcaaagctgatggcgatatgctgcccgttccagtgtgccacggtggttttgcagtaaacggcatcgttgcgttggggataatctgcccgccagtgcgcaccccggctttcttttcgggcgagggcactttccagcatggcacagcccagaagcggaagggtgccagacagtttgcggatttcctgaatgcccgcttccaatgtctgtgcatcccgcacgacaccgagtgcgttcagcagaatacgattcatctgcatttgagcgtccggggaaagttcgggcagaagggattcttcggcacagggcatattgggggaactgactgtttcccggcaggcagtttccgcagcaatctgtcctccatagatcgcacccagaagagaatttccacccagacggtttgcgccatggtactgagcgcagcattcaccggcagcgtacagattccgcatcgaagtgcggtgccgctcgtccacctgaatgcctcccataaagtagtggatacccggcaaaatcggaatgggttctttgcgaatatctttgtgcagataggtctgacaatcatccaccagtccggcaagtttatgctccatgacttctttaggaagctctgtcatatcaaggaacacctcatagtcacggctgaccgtccagacttcccgcgcggtgatgtcacgcggcatcaggttgccgagttccggatatttttcttccatgaaataccacggcttcccgttccgtaatgcaaacagccgcccgccctcaccacgggcggcctcactcaaaagcatccgtttttcgcccagttcgaccgtggtagggtggtactggatcatttcaagatttgccatcggaacgcccagacggaacagttctgcggtgacttctccggtattggcaagagagccggtcgtatcaccgaataagccatgcagcccgcctgtggcaatcaggacggcatcgcatacaaaccgcagcagttcgccagtataggtgtcctgcactgtgcagccaccgcagatgttcccggaaagcagcagggtgcggaacttatggtgtggaaagcgttcgaccgttcctgcgctttcttctcggcgcacagcatcaatcagagcggtcattagctgctttcccgtatcgctttgtgcaaaggccgtccgctttttcttctgtccgccaaaattccgcaggtcgagttcgtcgtcatctgtcacgttgaattgtactcccagatggtgcaggctgcgcaccagttcggacgcagcctgcgtcatcccccagactgcattcgggtcagcaagtccgcaggcagcggtcagggtatctgtataatgctgctccgggctatcctcctctcccttggtattcaaggctgcattgattccgccctctgccataacagactgcgctcgctcggaggcaagggaggacaccagctttaccgtccagccgtttttcacagcagtcaaagcagcggaaagccctgccagccctgcacccacgatcaccaaagtgtgtttcatacattgttccacccgatataatatagaatgatcgaaccggcagcaaacagcaccagtatagaaagaatcagatagaggtcgccgcgctgctccttatcccggacgatgcccagcgataccagaaggggtcggagattgagcagaagatgcacaaataccgaagcaaccagtaaaagctgcgtcagcagccggaccgttgtgaacggaaacagaatgtatacgccgtcctgcactctgccgaacacgccaatatggaaaaagagcatgagcaaaatagcaagcccactggtgcgccttgcccagaacagagcattctgctttccgtagagttttccgccggaccgggaagcccggaatgtctgtgcggtcagcaaaagcccaaggacggtgtgcgccgccagaatgccaacaccgatccatgccagaaactttcctgccccggaactgatgcccagcaacataaaactgcccatcagcccatgaagcagacagatgaaaagtagcagaacggagagaatggtgttcagttttcgcatgaggggtcctccatttcttctgcggagagcagaaggatgtctgcatccggcaatgctgttgcatcaagcgtattttccgaaaccagcagcagttgataccgcccattgattgcacgggaacgcagcatggtttcgctgtactgcttcaacgtaacatctgctccggcagcagtcaggcgttcacaaagagccgttgcatagcaaagcaagggatagtctgtttcgcagaccgaaagcgtcatgtgcggcagtccggcatcggaaaggacttctgtctcaccggaaacaaatgctttcagatcattccggaaatccgcatcggaaaacggttccagcgcagggttgatgcagaacagatagttgccctccagcggtgcggccatctgtgcggcacgtttcgctttcggggtcgcaccggtcagcccatccagaatagagggcggcgagtgcataaatacgccaaacgcggcaagaaatcccaatgtcagaaccagagtgatgaattttcctttcacaggcagacctcttttatttattgcatggttgttcaaatgaaaaatcttctgcgcaaaatacggcagttgagtaaacgctcaactatattgtatgcgaaataaggaggctgtcaaggtctgttagacgacaaatcgcaggaagcagatgctaacttttcctcttgacaacggaggaaaagcagatataatatgattgaacggttgttcaactacaaaacaaggagaacgtctgatgtcaaattctttatacacctgtaattgcgatgtgatccatgaggacatcgtgaacgatgtaaaaggcaaaatgcagccgaaagacgactacatccagcttgcatcgcttttcaagctgttcggagatggcacaagagtgcagatccttcatgctctggaacagagcgagatgtgtgtatgcgaccttgcggttctgctgggcgtcaccaaatcggcgatctctcaccagctgaaagcactccggcttgccggactggtcaaattccgcagagaggcccagatcgtgtattattcgctggcggatgatcatgtaaaggagatcatcgacaagggatttgagcatttaagaggatgatcgcgcaagcgattatctttttgtcttttaagttgagcgattgaacaattaagaaaacgtggtggaggtcaaaatgaaaagagtattcatcctgaaaggtctggattgcccgaattgttccgccaagatagaaaaagaggtcggagcattgccgggagtggaatcctcggttgtgaatttaatgcagcagacagtgaccgttcagtcagaaaagtctgcggatgcaacactggcggaacaggtcgaaacgatcgttcacagccatgaaccggatgttgaggtgtcgg

SEQ ID NO: 718 - DNA, 7253 bp, unidentified
  source 1..7253: mol_type = unassigned DNA
atgataaagaatttagctggtagactaaaagaattgcgtattcagaataaattaacacaaaaacaggtttcagagctattaggcatatcaccaagcatcatttccggttatgaaaccggagaacgcacacccagtgcagaaattcttctttctctatcgtatctgtataaatgcagcacagactacttacttgggaaaagtaatgatatgcccgcaattttactagacaccaatggactgacacctagccaaatcaaggccatttctgcactgattgaatctatacgtcaataattcttaaacataaaaataagcgtggagcccgatcattacagactctacgcttattaatttatagttaacaccctcctgttccaagtgatatttcagatattgacatcaaaaatggtccttttgacaatgatggtattagtcatgtttcatttgtggatatagattttgatgaataccgcggtatttgcatgaacgatcgattagaatgccgctctgtaaatttccacaatatcgtcctttctaagcggtacaaacgatccctttgaaccctcgcaggccttctttgccatcacctcaaagttcctgtcgtctgtgattcccacagctcttagatttgcaggaatgcccattgtctcaaagaagaatttcttcaacgcatcaatgcctgcgtgtgcaagtgcatagtcatcatcaccggaaagtccccagacattttttgcaaactccacaaacatcggaagtgtgtcatcatttagtatgtgctccatccacgccggtgtgagtattgcaagtccctctccgtgagtaatatcatagaaagcgctcagctcatgctccataggatgtacgcaccatgccggtgaacagccatcgcccacaacgccgttgattgcatgtgtgcctgcccacatcaggttggctctggcctcgtaattatcaggctgtgcgagagcagccggtccatttttaatcattgtgcgtaacaatccctctgccataaatttctggcagtcagcattctccatagaaaaataattctccattgtatggctcatcatatctgcggttcctgctgcggtctgtttttttgatactgaaaaagtatattcaggatttaatattgacatagttggcaccatatacggtgatcctgttccccacttttcatttttagacatatcagagataacagcaaaaggatccatctctgttcctgttgctgaaagagtaagcacatcaaatatcggaagtgccgccttgacctttgagccatcaagcaccagatcccatgcatcaccgtcataccttgcacctgctgcaacaacctttgagcaatcgattgtactgccgcctcctattgcaagcaccatgtcgataccctcatttttacagatttcaacaccctttctgactgtctcaatctttgggtttggctccactccgctaagctcaaacacggtcagccccgcatccttaaggatcttcattgcggtatcgtagagaccgtttttctttatagagccgcctccgtacactaaaagcaccttgctgccatatgccttgagctctgataagctcgaaatggtatcctttccgaaatgaatttttgttggaatgttaaatgtgaaattgtacatatataatacctcctgctaaataataatattttttaatctctccatatcatctgcatcgggatgcgacaaagccttgtcaaaattttcaatcagcgtatcaatattatccggatgctccgggttttctttcattttcacatagcgctcccgcacagactgtggcattttgccctgacacatatattctcctacaatagtgttgcttgaatcaatggcgcttttaacattgccaagaatcctttgaaaatatgcatcacttcctccaaaaccggctgttccgaacagaaatatctttttatttttcaatttagataagaaatctaatgtatcgctatccgcgtttcccttgtccgtccaaaatccaatgtatagcaattcggattttatcccctgcgcatcagccgtgccaaaataatcacagctctcctttggcaggatttcatgaattttatcagccagcttacgtgtgttgcctgtcatactactgaatattattgaataattttcgttgtacatgcaatatcctcctttaaattaaactaatatttgggcatttacactttaaattcatcttcatgttttttgaagaaattataaaaatatcgtacattatccaaatcactccattttgtaacatcatactctttcgtatcaagattgtatattttagcatttaatgttccaagcataaatggtgaatgcgttgcaataataaactggcattctaacaaccttgccattttattaatttcctctgctaacataacctgattcgcaagtgaaagcgaaacttccggttcatctaacaaatacaatgcatctggttgtaaatactcctcaaaatattgcattgatgtctctccgttagaatatttttcctgtgcaaattttatatattcttcctgcttacacccttctttagatgctaaaaatttttttgcttcaagtaaagacatacctctcttaacgtaatcatactccatgccatctgataatatctgcttttgttgtatcttcttaatctcatacaatatatcttcacttttaatatatcggctattttccggtaatttatttattgtatttccataatcgtcttcccccaaagtatacaagcattctctggaaaacgaaccacagtaatcaacgcttccaaatgaattgcttgttgcatattctttcccttttagttgtaagcaattggctataatatttaagagtgttgatttacctgagccattgttgccataaagtacagtgataggtctaaaaacaaatggttcaatatacttatcccggaatacattgtagggataaatattaggattattcacttttcttttacttaatctaaaactacttaaatatatcatatcttttcattatccctttcctgataaaagagctccaacaccattatttctcgaatatgtgaaaatgaaggattattcactaatacatctggtttagttatgaattggtgagacactgtcacacttttccaaaatcatgtgcagtatttatataactaatttttaagtattttcttattttcaaatgacaaacacattatattaaagattttgatcaatccgattttcctatctgtactcaacgatttcttccaatggtttccttggccttttagccggagcttcatcggcaaagccaaccgcaacaattcctgtcaatcttatcctgcttatattttcttatacttcttctattctcaatttctcgtatcataatttttctctccattaggttcttaatcccaagactctttttaacttcacgaattgaggttgaactaataattaggcattttcacttttaattcatcaaaactcaatttgttagcgttaagtaaagaggcaattcgttgtatgtaaagaattttttatattaggaaatcttcctttgtgatagaacatattactaagtttttacgttctcctgaagcaatatcaattcttctgtttctaagctctccatcaagttgaaagcccagctttttcaataaatttccagaagccaaattacttatattatattttgcttcaagcatatacatatctcttttcatcaaatattctttaataatacactgtaatgcctcaaatgcatatcctttattttgaaaacgttcaccaatcacataccctatctctccaattccaagctgtatgtacggtatatcaatcgttacatatccaatacaattcttactctctttttccaaaataagccatgcatttttatttttcgaccaggcatctacaaatgcttccatctgcttttcttctgccggataaccaagtatatattttccaagctttttatctttcccccatccctcaaagcaggaatgcgtatcttctgctacaaaattccgtattaacaatctatttgtctcaagcatatttatttcctctaaagattttggtcaatcaaaatttataacattccttctgcttttacccgaattgcataaaactcccggaatgtatccggttcttccattattgtttctttcataatctttaatctccgtttgccaactcgtctatccaatacagcaaatatttttacgattaaattttcgcttttaaggctcgtttcaatatcttgattatcaaactctgcaaatgcattataaaaacagcgttggtcaaaaattcccaattttatagctgtatcgtctatatacgcattttctactttcatgcgtttctcgtatttttcgtctttgggaaacatgcctgctttcgaccaattgttccaatagcatcccttgatgatttcttttccatcatatcttatcgctgcccgcccctcatggtcgtgactcctgctatatgttgttgcataatactgaatatgaccttgcagactttgagccagatattccgtttccaacttttttcttataccactccatgttgccattcattattcctcaactgcttttctacttttcatcaacgacctggtagataaaaaatttaagataatacgactccggtacattagcagaattagcccacagtatcggatgatccggtccctgtgtgcggaactccacctgacgcagcctcttgtgagtggcctttgctgcttccttgaccgttttggcaagaagctcctgcgtcatgaagtgagagcatgagcaggtcgccagaaatccaccatccttaacaagcttaagtcccttcatgttaatctcgcggtagccctttatggcatttttggtggcctcacgcgactttgtaaatgccggaggatccagaatgactacatcatatttttcaccatctgcagcgagccgtggcagctcatccagcacatttgcaacgcgaaacttcactgtgtctgagagattatttctcttcgcattttctgtagcctgcttaaccgcatactctgatatatcaagtcctgtgacctcacttgcccccgcaattcctgcattgagggcaaatgtacccatgtgcgtgaagcagtcgagcactcttttccccttgcagatacgctgcatagcaagcctgttatacttctggtctaagaagaagcctgttttctgtccattttccacatcgaccatatagtgaactgcgttttctacgatttccacatttgtgtcaaactctgcgcctataaagccttttaccttaggaagtccttcttttttgcgttcatttgcatcactgcgctcgtatactccacggatatttattccgtccaccgccagcacttcctttaacagttcaactattttcaccttaaactgctccattccaagtgcaagacactccaccacaagcacatcagcgtacttgtccactgtgatacccggcaggaaatcagcctcgccaaatatcacacgacagcagtttaaatcaggtctgccggttgtaccaatgcctgccacacaagcctcacctgcagtgtctgtttcacctgctgcaaacacattgtcattgcctcctgccatcacctgcttgcgataatcccaagcattttgcactctcatcctgaggaaattgtcatcaatcagttggtctgcttttcttgtcatcattctgatacggatttttgaattctggtttatgaagccgcgccccatcggatatccgtcgaaatcgtgcaccacaacaatgtctccgttcgtaaatgtgcctgtgattgtgtctatttcattgtcaaaaatccatgcgccgcctgcttttatagtgcgtccttcgccttttttcagtgttacaattgtatgattttccatatttgttcctcttctaaattacttcattattccttgctaaaatctgattatatagtttatctgaaattctatagcctttagaaataagtttatctgtcgacattccatttcaattatatgaaatcccggcaatatttacaatacacaaatatttctgcaaaacatgccgatatatatattataatataatcgtaactattataacatccgaccggtaaatggagataaatatgattacaattagcttatgcatgatagtaaaaaatgaagaagaggtgctcgaacgatgcctgaacagtctcaaagggctgatggatgaaatcatcatagtggacaccggctcgacggacagcacaaaggagatagctgcacggtatacggacaaaatctatgatttctcatggtgcgacgattttgctgcggccaggaatttttcgttttccaaggctacgcaggaatacatatatgcacctgatgccgacgaggtgctcgacgataccaaccgcaggcgtttcatgatgcttaaggctgcgctgctgccggaaattgagattgtccagatgaaatacattactccaagcaaattcaacacagtgcaaaattcatcctcagagtatcgcccgaagctgttcaagaggcttcgcacgtttacatggattaatccggtgcacgaaacggttcgcttagagcctgtagtctatgacagcgatatctgtatacaacatctgccgcagggcactcacggcaaacgtgattttaccatattcaagcgctcctttgaaagaaacggcaccctgccaaaaagtatagcgactatgtatgccaaggagcttttaaaatgcggaagccccgaggattttaccaatgccctgccatattttcagggtgaataccgcaacagccccgacatcgaatccacctgcgtgctatcacgctactatcgcatgaatggcgactatgacaaatttttttctgttgccctaaaaaatgtagcagttgatggctgcagcgaggtgtgctgtgagctcggtgcgtactatttcgacaaggcagactatgaggaggcaagcctgtggtattacaacgctgcattcgagacaaagccagtactcgatgtggagtgcggcggtggcaaggcgcttcatgccctgtctgagtgctactcaagatgggctgatgagaagcagaaaaagcttgattcgcttcctcctaaatcaaggaatgtatttaaaggcgataaggagctgattgattcactgcgcagccaggcggccgattaccagaagcaggctgaggaatggatgcttccggagggtgactag

SEQ ID NO: 719 - DNA, 19214 bp, unidentified
  source 1..19214: mol_type = unassigned DNA
tcagtcaccttggtcgtattgagagaagttttcttcattttcataataattttcctccgggtgtttttctaagtagtcgagctgttcgtacatttcttcggtgatttcgggtgctgtcgctgcggcaacagcgtccattgtgatagtgacggcgtcacccatatagtcgggcggcattacataaggctcacctcctgcatcgggtgtatattttacattcgggtggtggagcagattatactttttgtcgatgacagggtcctcgcttcgcatcagcagcaggcactcatcgtcacgcatacggcgaatttcatctggcatacacagttcacgaccagcggtttgcaggctgtcgctgctgctgccccggctgcctttgccaatgctttggcttttggtgcgttcggtttccttgccgagaattttggaaagatattcgtaggtaccgtactcgttgccgccgaggtaaagcagggtgtcacagtttccgattatgccttcccaatcgtctttgaacaggctttttagctgggcgatgttctgcaaaataatgtcgcagctgatatttctacttctgcaaacagcaagaatattcttgaaattcttcggtagtgcaacatttgcaaactcgtccatcatcagccgcacatgaaccggcagcgcaccgttgtattccggcgtggaatctgccaaacgaaaaagctggtcgaaaagctgcgtgtagagcatcgtcgcaatgaaattaaaagttgtgtcattgtcgggcaaaacaataaataatgcccgctgctccagccccatacgcggcaggaacatttcatcgcgcgaagtcatttctgcaaacttgcgggagttgaacatgtacaagtttgccgctgccgaaatcaaaatggattgcagcgtctttttcgcacccaacataaaagacttgaattgcaggacagcggggtgctgcgggtcgcggcgctccagttctccaaacagcatcatcaaggggttctcgaccatttcattttcgctgacttggcaattcagaatcatatacatcaatgtggaaaaattctgctcactggcaggggcttcgtacatgagatagagaatcagtgcggagatcagcagcacagaagaatcatcccaaaacttatcaccgctgctgggggcatccttgggtttggtgttgttgacaatggcgaacgccagcttgatggcgtcctcatcggtttcgagataggccatcggattgtaatggccttgaaaatgcacaaggtcaagcactgtcacgctgatacctttcgtttccatgattctgccgagggtgcgtgtcaactcccctttggggtccagaaaaagataagagccaatcagttgcagcgcgttgggcttcacataaaagcgtgtcttgccgctgccagatccgccgattacgataatgttgagattatgtttatgcgcgtggctgtcggtgctgaagcgtacattctcggtcaagatgtaattttctttggagtctttggtgttgcggtacttgatgtttagtctgtgggcgctgccccacttggccgtaccatgttccgcgccggggtggcggtctgcttggtcgagcatatagcagtagacggccaacggataaagcaccagcaccgccagcagaaattttggagtgctggcgcaccagcgcagcatggatggggtgttcagaatttcggacaacactgcggtaatttttgccagtccctgtgcctgttcagttgcctgtgccagcgctgcggcagtaaacagcagcggtatcagcaacagcccgtacagaataatttctgtgcggcggtctttattcggacgcatggattaacgggcctcatcccgctgtggtgcgctctggccgcgctgcaggccatgtgctttttcaacggtgtctccaatagtcacagacagttcccggatttcttccagtgttttgcgttcctcaccgggtggaatgtgggcatccatcccttccaaaacagcggcagcggtatcgggcatcggcagggaaaaacgcccgcaaaactccactgatactgccatagccgtttttcgtagatagggcgcttgggagatacccggcgtgtgctgctctgcggttgcaatgacgatttcggcgggcagtcgtgccagcacttcacgctgcggcatggccgttgggaacacaatcgcgtgttgctcggcatcgtacccgacaacgccctcattttgaaatatgatgttgaccggggaaaggcgctccagttccttgatggccttgtccatctgctctggcttaatttcaggaatcggatacggcttattgccgtaggtcatggacacatcgaaaattgagccgacattataataaccattgacgcgcacaagctgcgggatgccttttgcccctttgtttacgcgccgcccgaatttatcccagtctttggcggtcaatacggcccgcgcttgcggcagggtttgcagcacaagtgctgcattgccggatgtgatatgactgccaagccgccccctgtcgtacagatagtcggcaaggcgctggccatcctgcacaacttcctgcaatacggatttttgcgccgcaatggtttctttaagctcggcttgctttttggctttccactcctcgatgggcaatcgctgttcgtacatttatcgctcctccttcgcagtaatatcctgcactttttcctgtgcctgtgctgctgtccgggcagcgcttttcagcgccataatggttgcccgcacagatggccgggggtcaatatccaaaggattcttcccgcgcgtcagcaagctgtcgccggattgacggcgggttgggtctttttttcggtctgccgtggtgactttggggatggcgtacccaagctgctcatagatgcggttcagcttagcgacatcttcagctttgaacatgacgtcaactttttcgttctgtgccttatctttcacaacagcaaacagaacgccgtactgcttggccaattccttaaactgtcccacgtctttgctttgcagggcaataattttcaattctttgccctcccgcagcagacggtcaaggctggttttgcctttcactttaggattttccttggcgtaggccagcgataaggccagtgcgtttttaatacccagcgcagacagcttaatggccacctctgtaacctgtaaggcttcccgcaccatctgatcggctgcttcgcctccgttgttcatcctgtttcacctcatttcgttcttcctgtgcggcaagttctgcttgccgtagtttttcctgcacctcggcagcatctgtttcgatgtcggaacagatgtaaacctcatggcgcagggctttcatttgctgggtcagtgatttgattttttcttcccgcgcggcacgttccggctcacgtttttggcgatacagaactttgcgctggcgggcaagctgttggatttggacttctgcattttccttgtaggccagcaattcatccatagtttcaatatggttttcccataggaattttgtctgctgctggtatcggctgaacagcagaaaatcctcacgcagcaaaaagtagcagcgctttgtgctcttgccgtggtaggctttccgcatcagggcgcagtagtgatagtagcaagccataaagccggacactttgggataccggcgcggcagcttgccgagataccgcgctcgccgcacagtgggctgtaattctgtgggctgccatttcggttttgccggggcgttttcctgccggtattcctgctgcatttcggtgggcatacggtgcagttggcggtaatactcccgcagcgctgtctcggaaaagcgcgggtcgagccggtcaatgcggatatttcgttgagcgtctttatggcgcacggccatgtgttccacacgcgggccgtatttgaccgtgtagcccatgttctgcaattcgagaataaaaccatcaaagctgtcggcggcagcaatagcctgttccacatctttgcgtaccatacctcggatggtaggcttgccggcctgaccgcttagccactcgtcataagattttcccttgccgtccgtttctatgacggacagccgattttctcggcaaagttcatcggaagtttcgcggattcctttataataggtattgaaatcgcttcggaacattttgccgtcagcataggacacagaattaacaactatatgattatgcagatgccctcggtcaaggtgggttgatacagtacattcaaatcgatctgcgagaaagcgctgcacaaactcgcagccgatttgatgcacttggtcgggcgtggcttcgccgggcgcaaaactttgtataatatgataggccaaaatgttgccgtcttttacaggcttgcgccagcgtgttttggtttcaatcataatttcataggcgttttgcggtatacagttaaatccgcttacatatagttggtgttcggttttgtcattgttttgagtgtagttaagcagcttgttcaagtcctccgcactccggcgctcggttttcattggattgcttgtgtagtctaaacacagattcaagttcgacttcaccttaataattttggtatatgccatatcaaagactatccctcacacagcgccacatatttctcttttgtgtttcctgctccatgtccgcagcgctgtgtagctggcattgcggataacaattttacaaaaagcgtggaatgtgtactcgatatgctctttgtattcttctgtgcaagtcataggaaatccccccttccctccgcaaagagttgtggctggttgatagttgctttttatgatgacaaagggcggcagcactttttgctgtcgccccttgattacccatttgcgaaaccgggcggggctgtcaacggcgggctttagcccgttcatcttgaccgttgactgctccggctgggtttgctatttgtgttttaatcacttacctaaagaaattatttttctttccacgacttttcaagaaaatctgttaattctgggatttccatctgttttagaccagttatatttccatttctatctctttctgtaataatgccaatatcaccgtttgcagagtgtacctcagttccttcaaaagttccatcggtagcccggttatcagcaaaatagcagactgacttaccattaaaaaacagctggttttcgtcagaattataggttaaaccgtattgctcatactgttctaagttattagcagtttcttcgtaaatctgtttgttgattagttcattaaatgccttttgttcttccgtaagccctttttcatagtcttggtcagtggtatcccgaacattttcagctttgcttttttcaggttgagttgaagaaaaaacagcatatacgccaccaaccatcaaaagcattacggcaagagtgagaataggaacaattatttttttctgtttcatcataatattaaatcccttctttttgcaagttgataagtatagtatagtgttttcctcctttcacccataagagcagcaccatcacagaatgttacacatgatttgcagttttttaagctctaaagtataaagagtagctacctcacacaaagatagctaccctcaaattttatgcagctttactcgaaaatatcttttggtgcagtaggtaataaatcgcctttcttccaaataagctcacaattattaggtgtaccataatatacagcaatgtagtcctttttttcatggttaaacccataattcattatttcggtttctccatcggataattcttctttgataaccgttcttaatacagaaatatacaagtttctattttcgtctgtgtaagtcttaattgttcctccacagtatccgtcaagtagttctaatctaaaagtaatctgttcatcggtcagtgaatatgccgagattgaaatttgctctgggcttaccatgctattttgtcttataaacaaggcataatatgttccaaatatcgctgtaaggacgatagtcgttattacaattcctatgataaatgaccttaatagtgaacgtttccatgaatgtgccatcttccccatgacactgctttgtatgctttcagcattttcctttgtatcaaccacacattctgtttttagcttctgaaaaatattggaacacttttcacattcctgcaaatgctcctcaatcatttttctgctgtctgctgaacaaacttcatcataatacagcggcaacatatcttgaatgatgtcgcatgaaattttactcataactttcctcctttacttgttcaatgatttttaatttagctctatgaaaggttactcttgcccaactttctgttttaccaaaaagttttgctatatcctgataacttaattctcctaacacccgtaaagaaaagacttccttatatggctctggtaaattgtgtagcagtttatgtattccaaacgcctgctctctttgtcctaacaaaatctctatggaattagtatcaactatttcattctctacagaattaaggtcgatatttcttttcctgtgcttctcatacaagaaaaatgaatgcttcgcaatttggcacagccaagtcgttattttacagtcacctcgaaagttctcatagcttttcatagccttaaaaaaagtatcttgcgctaattcttctgcaagttcttcatcgtggcaaagagctaacagatatttatatacatcttcaaaatataaggtatatatgtcactaaaattaggggtattcaattatgcacacctcctttcagcaataagagtaggcaagtaacattttgttacaaaaaatatttgaagataacatcaacaaaatatattatagcgtgaccgtgtttgattttcaatttctgtaaatgcagaaacatggagtgttccccaaattatacggaatagcaggggtactgtcatatctaatttattgttgcttctttaccaaccatgagcatttgttgacggtttctcgcaaatgtgctatcattataacggattagagtgacattaaatggaaggacggcaaattgttaggggcttacatggaaagaaacaatcgcaaacgcgggttcacattggttgagcttattgttgtgctggtaattctggcggttttagcagctctgcttgtgccatcgcttaccggatatatagacaaagcaaaaaagaaagctgtgataacggaggcaagagatgtgtggacagcgtcgcaggctgccttgtcggagtgctatgccctgtacccggagagttttaccgccaactctgcaaacaataaaagcaactgcaggttttctgtctacataaacaataaatgggtagacaatgtgggcaaaatttctaacgccgcgctgaatgcattgcaaaagaacccaaaggatacggtggaagcggggacggcaagccgcagagtttccgccatggtgttggcgtatttggacagtgcaaacaaaaacaatccgcgctatacattttacgatggcaaggtaatcaccaacggtacaaagccaagtacgtattttgataaaacaccaaagtccacggacataatcatacagctttttcatacggttgatggcaaagtcattgcgttgaatttcggaaaagatggctatatggtaacaatcgttcccggacaggaaattatctgtgagtatgatgggaaatgtctgaatttcaaaggatgatccggcgcctatcagccgcgggtaacccttttgctactaaaatcgtcaaatttgcgtaaaataaaaaacaatcaccgcataattatagacaaaacgaccaagtaatgctacaatattcctattccggggcgaaacggccccgtcaagaaggagcattgccgtgaagctgaacaaccgtcgcacgattctggtgggcctggcgtttttgtcgatctgtacgttctggcagatgtacgacagcgtgatgaccctgatcctgaccgacacctttaaactgaacgagaccctcgccggggccattatggcggcagataacgtactggcgctgtttttgctgccgttctttggcgcgctgtccgataagaccagcactcgcatcgggcggcggatgccgttcattgtgggcggcactgcattggcggccattttgatgaacctgatcccgctgctggatgaccgctatgcggcaaaccccagcaccggtacgctggtgctgttcattatagtgctgggtctgctgctggtttccatgggcacctatcgctcgcccgcggtggcgctgatgcccgacgtgacccctaagccgctgcgcagccgtgcaaatgccatcatcaacctgatgggggccgtgggcggcattttgtatctggggctggcggcgctgatgtatccggtgtccaaaaccaagggggtcgggcatgtcagctaccgcccgctgttcttcatcgtctcgatgatcatggtcgcggcggtggcaattttgtacctgaccatccgggagccgaagctcggggaggaaaaccggaagctcgaggccgcccaccccgagtggaacctggccaccgatgacggcgccggccatgaggtcctgcctgcgccggtcaagcggagccttgcgtttctgctgctctccatttcgctgtggttcatcggatataacggcgttacgacgtggtttaccaagtacgtggaggccgtcatgggcgagggcctgggcggcgcgtccacatgcctgctggtggcaacggcgggtgccattgtctcgtacattcccatcggtgcgctggctgcaaaaattggccgcaagcgcacgatccagtgcggcattgtgctgctggcgacctgctttatgctgggctatctgctgacgacgatgtacacctcgatccagccaatcatgtacgtggtgtttgcgctggtcggtctggcctgggcggccatcaacgtgaactcgctgccgatggtcgtcgagatgtgccgcggcagtgacatcggcaagttcacaggctattactacaccttctcgatggcggcgcaggtcgtcacgcccatcgtggcgggctccctgatgcgggccatcgactaccgcgtgctgttcccgtatgccgcgctgtttgtggcgctgagctttgtgacgatgtgcttcgtcaaacacggcgacgccagagccgaggcgaagaaggggctggcggcctttgaggacatggacagctgacccgttgaaaagttgaaaaagcgctgccgcacggaagaactttccgtgcggcagcgcttattttgttggttatttgtttttcgggtggccgttctcgacctcgcttgtgccctgctccatcagataggtggcggtaaggtcggcgatatgcagcttgacggcgaggggataggtgttgtaggcgtcactgacggcaaagctgccgccgcgcacggcatcgtcaaagccgcccatgtgccagcggatggcaatggcctcggcggttttcagccgcatgaaatgctcaattaaatacacgcttttctcgccgtggccgtagggcagctggtcagccacctgataaaatgggaccttctcccactggccggtaacgtcgttcttgacgttgcgggtgccgaccttgtaaaagttcgccttgcacaggtcgtgcagcaggccgcagatggcgtagctctcggcgctttcaccctcggtgaaaaaatgctgcatcatcgcattgtagacgttgatgctgtgcatgaccaggccgcactcgcacgcgccgtgaaagcgggtggatgcgggtgcagtgaaaaaatccgtcgtttccagccagttcagcaggcggtcagcgccggggcgggtgatgtttttgttgtagatctccacaaattcggcgtgatagtcctgcatacgaacctcacagttccatgtcgtccagaatgcccttcagggtcttcagctcctcctcggtcaggctgatgcccttggccatgcggctgccgtcgggggaccagtcgcggatgtcgtacttcggcgggttgccgttccagctgaccatgttcagctggcgctcccagccgcgggcgttggtggaaagaacggcgatgcgttcggtaacttcataggtgaattctgccatgattacagactccttttatcaataatactgggtcaagcaacatcatagccgattctgccggaaaatgcaagagcaaaatcaatcgatccgcacggccagcagggcaaagcgcgcgtcggtgtcggggtgggtgtcgccgcaggtcgagagcgtcagcagctgcgcgccgtactccggcatgacgccggtgtcatacagcgccttttcggtgatggccctgacgcggtgctgccagtccagcttggtgtcggcgtcaaaaaaggtgtagtagggcagcgcgtccgcgccgagcgcggtatccaccgcggccacgacctgccaggtgccgccctcgtacagtgtgtcaaacgtgaaggtcgggtgggctttgtaaaaatcttcgtcccggtagcgcacgagctggccgaacatcgaaccatcgtgcatattgtggccgtagatcagccagttggccgtcggcgcgtcggcgctgaccgagcagcgctcatccagaaacaatgtgccgcccacggcgtagaaacggtcaaagccgcggcgcaggtagtattcgttgtcgccgggcgtctgcacgacgggcaggtcgatgtccgtcccgtcgatgcgcagccagccgatgaggtcggggtttttctcgtagagtgcccggtaccggggcagaatttcgcctgcggctgcggcagggactgctgcggtctcgggcgtggcgtgggcgcttgcgtcggcgcgctgggtgtcggccagggcgtcccgcgtcgcggccagcggctgcacggtcacatgggtgggggcgggcagggccgtgactgccggggcggtgggcaccgccgcgggggcgtccggctgcccgccgcggaaaaccgtctgccgcaccagcagcacggcggccagggccagcgccgccaggcccgcaccgcgcagcacccgcacatggcggcgctggcgcgcgcgaagccccgtgcgggctgcaaaggggtagtaggcggtatccccgcgcagcttgcggtagcgcttgggcatggcggcggctcctttcgtagtttcctggccccccagagggagacgaggccgtcaaaaaattgcgttcctgcattattgcgtgtgtaggggcgaccattggtcgcccgtcagcttaccgcagcaacgcattttccgggacagtttgtttacaaggcaaacaggtgcgggcgagcaatgctcgcccctacaagagtttttcgacagtttgacctcccagagggaggcaagagggcggacaacttcttttttaaaaaaaacaaaaaacgccccgcagggcgttcacagctcaaattttacgcagcatcaaaagaccggcagagcagatcaaaatcagcccgacgacaccggccagatacataacgggaaaatcgcccgtggccggggtctcggcaggggcaggagccgcggtggcgctgggcgtcgcgctgctctgcgcggtgacgacctcgaccttggcggcagtctcattcaccttgacggtggagtcggacttctgggtgcgggaggtggagctggtgggggtggccgtggcctgtgctgcggcagaggatgtattcagtgtgccgcaggcagccagcagcgcgacgacgaccacaaaaaaggccgcacaaaaaaagcgcttcatcgagaaaacgcctccttaatttcagctttttatctgtatggaaaacgatgcagtaacgtgccatcgtgatttgttctttttgtattgtagcacagcgcagggggttcgtcaagctattgcaaagaaatagtaacaaaacggcaacaatttgggcacgcaaaaaggcttctccctcgggagaagctgcccgcggagcgggctgatgagggcaaagtctgccaacgctgcccgctcacaggagtttgtgggaagcccgccctcatccggccctgcggggccgccttcccccgaaggggaaggctcagactgtcgaaaaaggtgcgtttaccccttggccccctctgcgagggggctcccgccgcagcgggtgggggagagaactgtacggcaacccgaaatatttcgggctatggcaaggttctctccctccgcccctacggggcacctccctcgcagagggaggtttttcgacacgctgcgccttcccccgaagaagaaggcttaaaccgctctatttcccctcttgcgtgcggccccgaaatgcggtataatacccttaatcgtattgtgtgagattatgccccaatgggatgggcggcgcgcacggcaccgagaataaaaaaggagttgtaaacgatgaaaggtattatcctggccggcggcgccggcacccgactttacccgctgacgatggtcacatccaaacagctgctgcccgtctatgacaagccgatgatctactatccgctgtctaccctgatgctggcgggcattcaggacattctgatcatctccacccccaccgacaccccgcgctttgaggcgctgctgggtgacggcagccagtacggcctgcatctgcagtacaaggtccagcccagccccgacggcctggcccaggcatttatcctgggcgaggagttcattggcgacgactgctgcgccatggtcctgggcgacaacatcttctacggcgcgggattctccaagcgcctgaaaaatgccgccgccaacgctgccaatggccgcagcaccgtctttggctactacgtcaatgaccccgagcgtttcggcgtcgtcgcgtttgacaaggacggccacgccaccgacattgaggaaaagcccgctaaccccaagagcaactacgcggtcacgggcctgtacttctacaacagcgacgttgtcaaaatggccaagcaggtcaagcccagcgcccgcggggagctggagatctcgacgctgaaccagatgtatctcgaccagggcaagctggatgtccagctgctgggccgcggctacgcctggctcgacaccggcacgatggactccctcgtcgaggcggctacctttgtgcagaccgtcgagcagcgccagggcatcaagatttccgcccccgaggagatcgcctacaagtacggctggatcaccaaggaaaagctgctggaaagtgccgcccgctacggaaaatccccctacggccagcatctgaagaatgtcgccgacgacaagctgcaatactgatagagtaggggaatacgcatgaaaattctgattaccggctgccgcgggcagctgggcaccgagctgcagcaccagctttccgcggagggctgcgccatcggcccgctgcctgagcgcctgcgcaaggccaccgttatcccggtggatgtcgatgagctggacatcacggaccgtgaggccaccatcaactacatccgccgccaccagcccgacaccgtcatcaactgcgccgctttcacgaacgtggacggctgcgagaccgcccgcgacgcggcctttaaggtcaacgccatcggcccgcgcaatctggcgctggcgtgtgagaaggtcaacgcgcgcctgatccacatttccaccgactatgtgttccccggcaccgccaacggcggcgtcgcactggacgagtgcgccgtgcccgcgccgatttcggcctacggccagacgaagctgctgggagaacagtatgtcgagcgcttctgccgccggcacttcattgtgcgcacggcatggctctacagcagctacggcaaaaacttcgtcaagacgatgatccgtatgggccggacccacgataagatcaccgtcgtcaatgaccagctgggcaacccgacgaacgccgttgacctggcctaccacattctcaagctggctgtcagccacgattacggcatctaccactgcaccggcaacggcatttgcagctggtatgactttgcctgtgccatcatgcagggcgcagggcttagctgcaaggtcgaacctgtgaccagcgccgggtatgccgccgccaaccccgccagcgccagccgcccggcgtggagcgcactggaaaaccggatgctgcgctgcaccgtcggcgacgagatgcgcgactggcaggacgccctcaaggacttttttgcaaactggaatggagaactttaatatatgaaaacctatcttgtgaccggctgcgccggtttcatcggctcgaactttgtccactacatgctggaaaagtatgaggacatccgccttgtcaacctcgacaagctgacctacgccggcaacctcgagaacctgcaggacatcgaggacgatgcccgccacatctttgtacagggcgacatctgcgacaaggcgcttgtgaccgacctgatcgcaaagtacgaccccgactacgtcatcaactttgcggccgagagccacgtggaccgcagcatcaagaaccccgagatcttcgtcgagagcaacgtgctgggcacggtcaacctgctgcagtgctgcaaggatgcctggtatgacgccgccgccaagacctggaaggaaggcaaaaaatacctgcaggtttccaccgacgaggtctacggcgcactgggcgccgagggctatttcatggagacgaccccgctgtgcccccacagcccgtactctgcctccaaggccagcgccgatatgttcgtcaaggcgttccacgacacctacggcatgccgatgaacattacccgctgctccaacaactacggcccctaccagttccccgagaagctgatcccgctgctcatcaacaacgccaagcagcacaagacgctgcccgtctacggcgacggtatgcagatccgcgactggctgtatgttatggaccactgcaaggccatcgacatggtcgccaatggcggcaaggacggcgaggtctacaacgtcggcggccacaacgagcgcccgaacatcttcatcgtcaagaccgtcattgcccagctgcatgaccgcctgaaggacgagggcatcagcgaggagctgatcacccacgttgcagaccgcctcggccatgaccgccgctacggtatcgaccccaccaagatcaaggaggatctgggctggtaccccgagaccccgtttgagaagggcatcgtcctgaccatcgactggtatctggcgcaccccgactggatggctcacgtcaccagcggcgattaccagaaatattacgagcagatgtataagaataagtaagcacacgcagccttcccccttacagagaatgtaggggcgagcagtgctcgcccgtgcccgtttgcggcagcggaagcctccgcgggcggatatggaatccgcccctacgtgtaggggacgatgctcgtcatcgccccgggagccttgcggctgccgatcggctcctcacccggccctgcgggccccctcctctccgggagggctttttcactcaatcccccaaaaggagcaacacatccacaatggcaaattacagagaagaacatatccacaataaccgccgtctggcacggcaggtcgtgggcgcagcggcactgctgctggcactcatcggcctgttcaccgtgctgggctggatcgtcgggcttgtgcgcgcagcgctggacgacacggacctgcgcaatgaataccgtgaccgcctgtacggcatggtcatgctggatcccgtcgcttttgacgacgtgaacagcgtggacgagggcattttcaaacaggccgccatctggggcactgtctatcaggtgcagaacagcggcggcagcctggaccagtacgagcgcgaccccgacaccggctcggccctgatcccggcgctggagatcgacacctacatctccaacctgctcgggccggactaccaggtgacggagggcacgttcagcacggcggagttcgtctaccagtacgacgaagaaaagcaggcctatctggtgcccgtcaccagttcggtggcgctgtacacgccgacggtggaaaagatcaccaagaaggacggccagcgcatcgtgaccgtcggctatgtgccgacgtcgtcgaacaacgccaccggtgagctgtccctgaccgcgcccactgagccgacgaagtatatggactatgtctttacccgcggcgagaaccgccagtggtacctgaccgccctgcgcgacagcgatatgcaggttgaggtcacgccgatccccgccccgacggatgctgttgtggataacatgcagaacgaggaaatgggcacgtcggatgccgcgagcaccgagcccgcgcccgtccccgaagaaggcgctgaggccgccccggatgccgaaaacctcgacgataccggcgacgccccggcagaggatgccgccgcagaggggtaaatcctgaatttgaaaagtgcccgcttgtgccatgcgcatgagcgggcgctttttttgcggcagtgccgcaggggccgcacatgtacggcccgcagccttgccatagatgaccttttatgggatggcccctgcagttctgctgcaaaaatccgccggacactagtgcaatccgctgcggaatatgctataatacatctatatatacttgagtgaggtgtacctactatggaagaactgcttcgcattctggaaaagaacgcccgtatgccgattgaggacatcgcggcgatgctggataaaacgcctgaagagatcgccgccatgatggatgaggccgccgcaaagggctatatccgcggctatgagacgctcgtggactgggaacaagccggtgtcaacctcgtcgaggctgtcattgagctgcgcgtgaccccccataaggcccgcggctttgacgacatcggcatgacgattgctcagtttgatgaggtcgacaccgtgctgctgatgagcggcagctatgatttgcaggtcatcatcaagggccgcagcttccaggaaatcgccatcttcgtggccaagcgcctttccccgctggacgacgtgctctccaccgcgaccagctttgtgctgcgcccctacaagcgcggcggccgcctgtacctggccgaagaacccgatgaaagagagtgtaccgtcctgtgatgaactacgatgagctgcttgcccctgccgccaaggccatgcgcccgtccggcatccgcaagttctttgatctggcagccgatatgccccactgcatctcgctgggcgtcggggagccggattttaaaacgccgtggagcgtccgcgacgcgggcatccgcagcctggagctgggccgcaccaagtatacggccaactccggcttaaaggagttgcgcggcgagatctgcaattacttacagcgccgctttgatttgcactataaagaggaaaacgtcctggtcaccgtcggcggcagcgaggccatcgacctgaccatccgtgcggtggtccagcccggggatgaggtcattatcccggagccgtgctttgtctgctatgagccgatcacccagctgaccggcggcgtgcccgtgcatattgccacccgcgccgaggatcagttccgcctgaccgccgaccagctgcgcgcggccatcacgcccaggacgaagctgctgatctttccgtatcccaacaaccccacgggcgcagtcatgagtgccgccgagatggaggagatcgctgccgtcctgcgcgagacgaatgtgctggtgctgtccgacgaaatttactccgagctgacctacggcctggaccgccacgtttcgattgcgtcgctgcccggcatggcagagcgcacgattgtggtcaacggcttctccaagtcctacgccatgaccggctggcggctcggctacgccgccggtccggcaccgcttgtcaaagtcatgacgaagatccaccaaagctgcatcatgtccgcgccgaccacgagccagtacgcggccatcacggcgctgcgccagtgcgacgaccagatcgagatgatgcgcgacgaatacaaccgccgccgccgctacgtcgtcaaggcgctgaacgagatgggcctgacctgctttgagccgcggggcgcattctacgtgttcccgtctatccagatcagcggcctgaccagcagcgagttctgcgagcagctgctgcgggaaaaggaggtcgccatcatccccggctcggcgttcggtgcctccggcgagggctatgcccgcatcagctacgcctacagcgtagaccatttgcagaccgcgatgaagcgcatccgcgaatttttgaccgaacacggctggataaaaaagtaaaaacaggagtgacccctatgcaataccgctcggtaacggtgctggccccggccaagctaaacctgtcgctggacgttgtgggcacgctgcccaacggctaccatgatttggatatggtcatgcagacgattgatctgtatgaaaaaatcacgctgcgccgcagcaatgatctgtccctgacgctgcccggcagcttcgtgccggtcaacgacaagaacaccgccgtcaaggcagcgctggccttttttgactacacgggcctgctggccggtgtggatatgacgatttacaagcgcgtgccggtccgcgcgggcatggcgggcggcagcgccgacgccgccggcgtgctcgtcggcctgaatgagctgtacggtgcgcacctgtccatgagcgaactgtgtgccatcggtgcgggcatcggcgcggacgtgccgtttgcgctgctgggcggcacctgccgcgtgcgcggcgtgggcgacctgatgaaggccctaccgccctgcccggactgccggttcgtggtggcgatgcccagcgtcggtgtctcgacgcctgaggcgttcgcccggtatgacacgatgggcagccctgtccaccccgactgcgaggcgcaggagcaggccatccgcgactgcaatttggccggggtctgcgccgccggcggcaacgcgctggagcactgctccggtgcggtggaaacgcccgctatctgcaagacgctgcgggagcatggggccgtcatggcccagatgaccggcagcggcgcggcggtgttcggcatttttgacgacgagaacgccgcccgcagcgctgtagccgccttgaaaaacggctacaagcaggtctatctctgcaagccgacccacggcggcccccgcgtgacggtccgccgcctgtttggagcaaaaaaataa

SEQ ID NO: 720 - DNA, 19087 bp, unidentified
  source 1..19087: mol_type = unassigned DNA
atgaaaaaaggaaataaatacggaacgcatagagtaatttcaccgaaaggagtattaccacaaccggctgacaaactggataacaatatggacgaaatctatgataacgagattttgatcgatgtgcaaactctgaatatcgattcggctagttttactcagattgaagaacaagccggaggggataaagctaaaattgccgagatcatgctgggaattgtagagaaacaaggaaaacaccgtaatccggtgaccggttccggtggtatgttactgggaacggtggaaaaaatcggagatgctttagttggaaagaccgatctgaaagtgggagataaaatcgcaactttggtgtctttgtcgctgactccgcttcgtatcgataaaattaaagaaatccgggcagatgtcgaccaggtggatatcgatggtaaagctattttgtttgaaagcggtatttatgcgaagattccggcagatctgccggaaaagttggctttgtcggctctcgatgtagccggtgctccggctcagactgctaaattggtgaaaccgggagatacggtattgattatcggtgccggtggtaaatcgggtatgttgtgttgctatgaagcaaagaaacgtgctggtgttaccggtaaagtaatcggtttgtgccatagccagagaagtaccgaacggcttcagaaattaggcttctgtgattatgtattctcggccgatgcaactcagccggttccggttatggagaaaattgccgaactgacgaatggtgaaatgtgtgatattacgatcaataatgtgaatattacggatactgagatgaccagcatcttgtgtactaaaaatgacggattggtctatttcttctctatggcgaccagttttacgaaggctgctttgggagcggaaggtgtcggcagcgatgtgactatgatcgttggaaatgggtataccaaaggacatgctgagattacactgcaggaacttcgtgaaagcgaggcattacggaagatatttacagagttgtatgcctgaatggtcgggattttataatcccgacgaattaaaaatatgtttttatggctagcagaagaaaagagtttttccctgaagtgaccgatgaacaatggaacgattggcattggcaggtgaagaacaggattgaaactttggatcagctgaagaaatacatccggctgacaccagatgaggaagagggtatccgtgagtcgctgaagacattacggatggcgatcacaccttattatctgagtctgatcgatcccgataatccttattgtccgatccgtaaacaatcggtgccgaccattgaagaattacaccggtcaccggctgatctggaagatcccttgcatgaagacggtgattcacccgtaccgggactgacccaccgttatcctgaccgggtgttgttcctgatcaccgatatgtgttcgatgtattgccggcattgtacccggcgccgctttgccggacatcacgattgtgccactccattggaaagaatcgataaatgtatcgaatatatcgctaataccccccaggtgagagatgtcctcctatcgggaggggatgccttattggtcagtgacgaacgattggaatatatcatcaaacggctgcgtggaatccctcatgtcgagattatccgtatcgggtcgagaacaccggtggtgttaccccagcgcattacgccggaattggtaaatatgcttcggaaatatcatccgatttggctgaatactcatttcaaccatccgaacgaaattaccgaagagtcggcggctgcttgtgcccggctggccgatgcgggtatacctctgggaaatcagtctgtcctgctccgcgggatcaacgattgtacacatgtcatgaaaaaattggtgcacgagttggtcaagatccgggtacgtccctattacatctatatctgtgatctttctgtgggtatcggtcatttccgtacccctgtatcgaagggaatcgagattatcgagaacctgcggggacatacttccggttatgccgtgcctactttcgtcgtggatgctcccggtggaggcggaaaaattccggtgatgccgacctatctgatttctcagggccccaatcgggtggtgttgcgtaattttgaaggcgtagtgactacgtataccgaaccgacggattacagagacgaatgccactgtgaagagtgtgagaagcgccgtaaaacagaaggagtggctgagttgctgagcggagaacgcttgtctctcgaaccggcgaatctggatcgtaagacacgtaatctattggcgaaaggataaattatttgtgattttggatttaccgtttcattcgattgaaaggataaatccggaatcataaatgaaaatgctgaacagatgggttttgttgatgacatatccgattacaggagtctggcaattgtcggattggagaaaaatacagggaaaacagaatgcctgaattacatccttcgcaggataaaagattcggcagatcggttcgctctgacttcgatcggaattgacggagaaaaccgggatcaggtatgtcaaaccccgaaacccgagattatcgtgccggaaggaatgatattcgttacttcggagaaacattaccgggagaggaggttggtggctgaaatcatggaaatcgatgatcatcggactgctttgggacggttggttatcgccagggctaaaacttcgggaaaagtattgctttcagggcctgcggatactgccgggttgaaaagtctgatccggcatatgaaagatttcggggtacgaacgaccttggtcgacggggctttgtcccgtttaagcctggcgtctcccaccgttacggaggcgatggtcttagcgacgggggctgctgtttccgggaatattcgggaattggtgagacgtacccgttatgtttgtgatttgatcgatctggaagaggtggacgaagttttacaagagaggttggatgccattcaacaaggtgtatgggcggtcgggccggagggagaatgtatcgatctgaaattgccttctgtgtttatgctggagaaaagtggaaccgatctgctgcaatatgggcatcggatctttattgccggtgctgtgagtgataaagtatttcagtttttacgcgtacagaaacagaccgtagaattgatcgtccgtgattttacccgtgttttttccgcacctgagtctttttatgcctttttacgtaagggcggaagagtacaggtgcttcatcgtagccggcttttggccgttacgatcaatcctcagtctccgggaggattacttttggattcgttgcgtttgcagcaagcattggaagaaagcttgcaaattccggtgtatgatgtgaaaaaaatagaaaaagtcggtaaaaaccgttgaggatatgattttaagggaagcgataagacaagtcaggggattccgttatatgatcgaacaattggatatctgttcggctgtaggccggagggtattgtatgatctgccctggctcgattcgaaatctcggttggaggccgaatttgaacgtattcaaaagatcatggtactttttgaacaacctgaaaatgaatcccggctggaacgtttgactggtaagctgatgcaggtgagagatatccgggggacgatcgggcggatggcgatggagcaagtgttggatgatcttgaattgttcgaattgaaaacttttgctttgtgctcggaagaaatcaggggacttgtcgaagaatggcggattgttttactcccggaactggagccggttgtacgtttgttggatccggaagggaatcggattcctcatttttatatttatgatacttattcggctgagctggccaggctgagagctgaaataaaacaaaagagccttcaaggggcagaagaacgggaattagaagcgttgtatgtacaaagtgtggttttggaagacaaggtacgcgaagagttgtctgtgcagttgagaccttatcacgacgatttgaaacaggctttggaagcggtcggattgctggatgtcgtattggcaaaagccagacaagcaataagaggacaattgactttgccgcaaattccggaagagggggaaatggtgttcgaaggtcttttccatcctcagatccgggagattttagaacaggaaggaagagcgtttcaggctgtagatttgaaattggaaaagggaacgacggtgattaccggagccaatatggccggaaagacagtgttgttgaaaagtgtgcaattggcgcaatacctgatgcagttcggtttttatgtacctgcccggcgggcgggtatgccgctcgtggaacaagtcttgaccagtatcggggatgatcaggatgaattgaacggtctctcttcttatgcggctgagatgttgcgggtggatgaaatgatccggcaagtcaggcagcgaagtaaaattttggtgctgatagacgaattggcccggacgaccaatcccgtcgagggacgggcaattgtgaatggggtagtggattttttgactactcaccgggtgatggctatggttactacccattatagcggaataacggccgaatgccgtaaattgagagtgcggggatttgtagagaatcgggttgaagggaatatgaccctgaaaaatatcaatgagtttattgattattcactcgaagaagacagcggagaagaagttccccaggaggcgatgcgtattgcctggatgctggggatcgaccgtggagtgttggaacgggtggaaaattatttgcaggaagaaaatcctgattggaaaaagacagtacagtagaaagaaaatatatatgaaaagtaaattaggaatagattttgataaagtcggacatgcccgtgaaatggcccgtaagattgctgaccaggtgcaggattttgtggatggctatacgacagtggctgtcgaaaggacattgtgtcgtttgctgggtatcgacggagtggatgttcatgctgtccctctgccgaacattttggtagacgagctgaaagaaaagaacgtgttgggagaaggaattttattctttctgggtaatgtaatggtggaaaccggaatgactccacaggaaatagccgaacaagtggctgccgggaaagtagatgtcacccgggtaccggtatgtactcccggccagcgggaaaaagcgttgcaaccctatatcgaggccagtatccgtcggatttccgacaaccggaaacggcgtgagaattatatcgcaacgatcggagagggagcaaagccttatctttatgtcattgtcgctaccggtaatatttacgaagacgtggtacaggcacaggcggctgcccggcaaggggcggatgtcattgctgtgatccgtacaacggggcaaagtttgttggactatgtaccctatggggctacgacagaaggattcggcggaacttttgccacccaggaaaattttcggattatgcggaaagctttggatgaggtaggagaagaagtcggtcgttatattcggctgtgtaattattgttccggtttatgtatgccggagattgctgtgatgggagctttggaagggctggatgtgatgttgaacgatgcgttgtatgggattttattccgggatatcaatatgcagcggacgttggtcgaccagtttatgtcgcgggtgatcaacggctttgccggagtgattatcaacacaggcgaagataactacctgactactgccgacgctgtcgaagaagcacatactgttttggcttccgatctgatcaatgaacaattggctttattggccgggctgccggaagaacaaatgggcctgggacatgcttttgaaatggatcccatgctggaaaacggctttttgtacgaattggctcaggcccagatgacccgggaaatttttccgaaggctactttgaaatatatgcctccgacgaaatttatgaccggaaatattttccgcggacatattcaggatgctcttttcaatatgatcggaatctggacttcacaaggtattcaactgttgggaatgccgaccgaagccatacatactccatttatgtcggatcgttatctgtcgatcgagaatgcccgttatatttttaataatatgaaaaatatcggagatgaagtggtctttaaagaaaacgggattatacaaaacagggcgaaagaagtgttggataaagctaccgttctcttggaaaagattgaacgggaaggactttttacagccttggaaaaaggaatttttgccgatatcaagcgtcctaaaaacggaggaaaaggattggacggcgtttgtgccaagggaaagaactatagcaatccttttgtagagatcatgatgaacagataacaaaaatcgtaaatcaaataaagattatgagcggaggtttatattcaacagaagggagagatttcgatcaaaccctcgatctgaaaaagataaaaccctacggggatacgatgaacgacggaaagacacagctgagtttcactttacctgtacctgccggagatgaagcgatagaggctgctaaacagttgatgaaaaaaatgggatttgaaaatcctcaggtggtgtttcatcaggaactgacgaaaggatatactttttttaattgttatggaaattgtgtacacacggtagattatagcaatatctatgtgccgaaagtggaatcgaccaagtgggatatgggagagaccgatcagtttgtccgggaacatatcggtcggaaaattgtggtgatcggagctagtaccggaacagatgcccatacggtgggaatcgacgctattatgaatatgaaaggttttgccggacattatggtttggagcggtatgaaatgttcgaagccttgaatatgggtagccaggtgaccaacgaggaatttatcgctaaggctatcgagttgaaagctgatgctttattggtttcgcagaccgtgactcagaaagatattcatattaaaaatctgacggaactcgtggagatgttggaagccgaaggattacgggacaaagtgatcctggcttgtggtggtccccggatttcacacgagttggcgaaagaattggggtacgatgccggcttcgggatgaatacctatgccgacgatgtcgcctcgtttattgcgcaggaattggatcgaagaatgaatcattgaaaatatacaagctatggaaaaagaacaaatcagggaagtgattgccaggagagtggcaatggaactccacgatggagacgtggtgaatctgggtatcggtttgccgactttagtgccgaattatctgcctgaaggtgtcgaggtcatcttacaaacggagaatggattgatcggtatggggccgactcctgctccgggagaagaagatccggacttgatcaatgccggcggtggagcgataacggctctgcccggagcggccagcttcgatagtgctacttcgttcggtattatccggggcggacacgtagatgtcagtatcctgggggccttgcaagtagatgaaaaaggagatttagccaactggatgataccggggaaaaaaacaccgggaatgggaggagcgatggacctgctgatgggagccggtaaggtgatcctggccatggaacatacggcaaaaggaaatccgaaaatcctgaaaaaatgtactttacctttgacagccaaggggcaggtgaatatgatcgttacagaaatgggagttatggagatcacacccgggggaattgtactgaaagagatacatcctgagtttacggtagaacaggtgcaggcagctacagaagtaactctgatcgttgccccggatttaaaaaagatgtgctgaacgacgaaagcgtattgaaggaaatcacgatggaggatggatggtggatacctctagcccgaatcgtaaactataaattaaaaaaggtatggatttttcattatcaaaaaaagagatattgtttcagcagatgatcagagcatttgctgagaaagaagtaaaaccgctggcggcagaagtggacgaagaagagagattccctgtcgaaacggtagaaaaaatggcgaaactggggattatgggtatccctttcccggtggaatatggcggagccggtggtgataacgtattgtattctatggctgtagaggaattgtcccgggtatgtgcaacgaccggggttattgtttctgcccatacctctttgtgtgcttctccgatctatgaattcggaaatgaagaacaacggaaaaaatatttacccaaattatgttcgggagaatggatcggagcttttggtctgaccgaaccgaatgcaggtaccgatgcctctgcccagcagacaatggctgttgctgaagaggatcattatgtgctcaacgggtccaaaatatttattacgaatgcagcttatgcacacgtttacattgttatggcgatgaccgataagtcgcagggtacacgaggaatctctgcttttatcgttgaacgggattttccgggattttccatcggtaaaaaagagaaaaagatggggatccggggatccgcaacctgtgagttgatttttgaaaattgtattgtgcctaaaggaaatatgctgggtaaaccgggtgaaggatttaaaattgcgatgaagacgctcgatggcggacgtatgggaattgcttcacaggccttgggaattgctcagggagccatggatgagacaataaaatatgtgaaagaacggaaacagttcggacgctctatcggacaatttcagaatacccaatttcagttggccgatttaaatgccaagatcgaagctgcccgtttgttggtgcggacggctgcctggaagaaagacaggaaaatcccttactctgtcgattcggcacgggctaagttatttgctgctgaaacagcgatggaagtgacgacaaaagccgtacagtttcacggggggtatggatatacccgtgagtatccggtcgaacggatgatgagagatgccaagattacggagatttatgagggaacctctgaagtacagcggatggtgattgctgctgctctattgaaataataatgttttccgcattgaacttataaaaagagaatacatgaaaatagtagtttgtataaaacaagtacctgatacgacagagatcaaactcgatccggtaacaggaacaatgatacgggatggtgtacctagcattatgaatcccgacgataaaggtggattggaaatggctttggccttgaaaaataaatatggtgcgcaggtaaccgttattacgatgggaccgcctcaggccgatgatattttgcgtgaagcttttgccatgggagccgaccgggcgattcatttgagcgaccgtaagtttgccggtgcagatacattggctacgtcgaatgctattgccggtgctttacggatgctggatttcgacctggtcattaccggccggcaggcgatcgatggagatacggcgcaggtaggacctcagattgccgagcatctcgatttgccacaagtgacgtatgtcgagaatttggaattcgatggtgacaagttgtttacgatccgtaaatctaccgaagaaggatatcaaaccgtacaggtggaatctccctgtgtcgttactgttctggctacggcaaacaaagcgcgctatatgtctgtgcggggaatcgtagaggcatacgatcgggaagtggaaatctggaattttaataatatcagtgtggatgaagctaaattgggattgaacggttcgccgacgcgggtatggaagtcttttaccaaaggagctaaagcagccggaaaagttttcgaagtggaaccggccgaagctgtagatgttattatcgaaaaattgaaagagaaatttattatttaatacatgattttagaggaaaaccgggaataatccggtgaaatctaaagtttaaaatctgatgaagatggataaatctcaatataaagacgtttatgtattcgtagagcaacgggaaggagttattcagaaagttgccatcgaattattggggaaagcccgggagttggccgatagcctgaatgaaaaagtggtggcgatgttgttgggttatgaagtggcgggtcaggcacaggaattgatcgcttatggggccgatgtcgtattgtgtgctgacgaacgggagctggtacaatataataccgagccttacgctcaggcgattacacagattgtacatgagcgtaaacccagtatcgtactgattggagcgacgacgatcggccgggatttgggccctcgtttatccgcccgtttagagaccgggttgacagccgattgtacgggcctcgctgtctcggatgaacgggatttgctgatgacccgtcctgcattcggaggaaatctgatggcgacgattatttgtaaagaacaccggccgcaaatgtcgaccgtacgtccgggagtgatgcgcacgaaaccgaaagatgaacaacgtgccggaacggtagagaaggtgaatattcatttcgataagtcgaaatttaaagtgcggattctcgagacggtgaaagaacaaaagaaccgtatcgatataacagaagcgaagattcttgtatccggaggccgtggtgtaggtaatacggagggatttgagatgctcggaaaattagcggaaacgctgaatgccgaggtttcttcttcacgtgccatggtggatgccggggttatgcctcatgaccgtcaggttggccaaaccgggaaaaccgttcgtcccgatctgtatttcgctatgggtatttccggagctattcagcatttggccggaatggaggaatcggaatttatcgttgccgtgaacaaggataaatatgctccgatttttaacgttgccgacctgggaattgtcggggatgtgaaacagatcgttccgttgctgaccgagaggttggcaaacatccggaaaactgacaaataaaagcccggacatggagtatcaaaaattaatgctggaaaaacaagatcgtgtttgtctggtaaagatcaatcatccggaggcattgaatgccttgaatacggtgatcttgcaggaattggaccgggcattcgatgaaattgcagccgatccggaaaccgatgtggttattctgacaggcgaaggacgttcgtttgttgcgggagccgatattgctgaaatgagtgtgatgaaggccgaagaaggccggcgtttcggtgagttaggggctgctgttttccggaaaatcgaactgatggctaagccggttattgctgccgtgaatggatttgctttaggaggaggatgtgaactggcgatggcttgtgatatccgtatcgcctcggctaaggcgaagttcggtcagccggaagtgggacttgggatcacgccgggattttccggtacccagcgtttaccgcgtttagtcggattaggtaaagccaaagagttgatttatacggctgcggttatccatgccgaggaagcttgccggatcggactggtgaacaaagtggtggaatcggaagaattgatgaatgagtgtatggctatggcaaagactattgctgctaaagcgccattggcggttcgttatgccaaagaagctatcaaccggggagtggaaacggatatggataccggtatcgtcatcgaaaacggtttgttcgggttgtgtttcgcaacgaccgaccagaaggaaggcatggaagcttttttatggaaacgtaaacccgaatttgaagggaattaaaatctttgtaatttaaatttatcgattatgaaaatatgcattgttggaacagggactatgggacatggtattgcccaggtatttgcccaggccggacatgaggtattgttaaaaggccgttctgaagcttctttggcaaaagcccacaaagctatggataaaaatctttccagaatggtggaaaaaggtaaattggaagccggggttaaagatcaggtattggccaggattaaagattcgatgaaatatgaggattgtgccgatgctgatttggtgatcgaggcgatagctgaagatatggctaccaagcatgagatattcaaattgttggacggaatttgtaaaccggaagcgatattggcaaccaatacttcttcgctttctataacggaagtggccgctgtgactaaccgtccggaaaaggtgatcggtatgcatttcttcaatcctgttccggctatgaaactggtggaagtgatcaaaggccggctgacttcggcagaggtgcatgatcaggtatttgctttatcgcaggaaatcgggaaagtgcccgtcagtgtcgaggaagctcctggatttatagtcaaccggattctgatccctctggtgaacgaaggcatcggtatattagctgacggagtggcgaaaaaagaggaaatcgatgccgcgatgaaattaggggctaaccatcctatgggaccattggaactgggtgatttgatcggattggatgtttgtctggctattatggaagtgttgtaccgggaattcggtgactctaaataccggcctcatcctttgttgcggaaaatggttcgcgctaacttattgggacggaagaccggagtcgggttttatgactatcggaaataatgaggagagtcttctttaccgggatacgatgctggggaatatttccccagcatttttactttttccccactttctacaagctgcgattcttaatctgttgtatgtaatatattgataattagtatattttgttgattttgtgcttgtggcatcggatttgtcctgtttaaggacagaatctaactctaaaaaataatagtatgaaaaagatcgtcattttaggaatcggagcttctatgttcttcttgggtagttgcgtagagagttctcagaaatataagtctttacaagcccgtctggattctttgagtacagtacatattatgcagaattccgaaatggagagtatgctggccgatttgaacgatatttctgccggaatgcaatcgttgcgggatgccgaacgtttattgactttggaaacaattaatgaaaataaagccaatagtaaatccaaacagcaattgaatcagctgaaaaaagacgtacaggctattaccgaggcgatcgcttcttataaagaacagatttccaaactcgaaggtaagaataaaagccagtcggccgagtttaaaagattgattgccggcttaaatgcggaattggatcaacgtacacagaaactgaatgaaattactaaacaattggctgagaagaatcagcaattggcagtgaagaccgaggaagtcgctaatctgaccgagaatgtggaagctttggataaagccaataaaagtcagcaaatgacgatcaatgaacaggatatggcgattcatcagggacactatttgattggaaaccgcaaagagctgaaagaagctgaggtaatttccagacaagggattttctgtccgccgatcgtatcgtcacaagcacaaaaagccaactttaccgatttggatatccgtgagatgaaggtgatcccgttgaatagtaaaaaagcgaaattactttctgtccatccggctgattcctatactttggagaccggtgaagatggtaatatgaccctgaaaatcaatgacgaaaataatttctggaaacaaacaaaatacttggttgtgatgattggataaaagcgggaataattttaactgagagaggcatacccaaaaagtatgtctcttttcttttttcacaacgattattcttgtcgagagagaaaataaagaagttttttttgatttaaagacagttcgtttagaaaactagccgaagatcatcaggatttttaaaagtgtatccgatgagaaaatcgctttcaatttgtcgatgcttttgtatttcagtgttttaacactgtttactgagatgttcatttcctgtgctatttgctgattgtcgaggccttgaaaagcgagctgcatgacttgtttactacggggaggtaatttttcgatttccttgatgatctgtaaagcgacatctgtttcgactataacattgaaaatgttcacttctttgagcgaacggctattcacgaatttttcctgtaatttcagttttcttaaccattcgagagagaggttatgtaccaacatatacatataattatcgatgctttcgatttccttctctttggacactaattcccaaagccgtgcaaaagcttcctggacaatgtcctctgatgccgatttatcgttcagaaaccggttggctgcaaaacataaaggagcatacaaccgattcattgtactggcaaattcatttggagaagaatttttaatcccttgttttgctgttgatttcatctttatttaacctgaaagtcgaaaacaaaggtaaaaaattgtaagaatcattcatctttttggaagacttattagtctttaatataaagtgtaattcgatataaaacaaattatgtgtcttgtacaagatcgtcaaaaattgattttgttgttgcaaaaagcttatttcgggcaactctctgaagaagaagccgggctgttggctgagtggcgtagtcggtcttcggaacatgaggcattgtatcggcggatcatgagcggagaaagcctggccgaactgcttgagtggcaaaatcatttcgatccggaacaagcgaatcggtcgattttgcatcgggttgaaaaacgtagatctattcggatgaggaaaataggtttgcgggtagctgctatagttctcctgttgctgggaataggaacgatatggattataaatcgtcagggcgattatagacggcaacaggaattggcttttacattgattcacccaggaactccccaagctattcttactttggcggatggaaggcaagtggtattggataagaaaccggtaaccttgaaattaaatgaaaaacaatttttgaccggagatagtgctatattgaattatgcggttaatctaccgaatggtttggaaaataatgaacagcaaacattaatgcataaggtggaagttccggttggtggtgaatatcggttagtgcttgccgatggtactaaagtctggatcaatgctgaaagttctttgcaatatccggtagagtttactgctgaacagcgaacagtaattttacaaggtgaagcctatttcgaagtcgtttcggatacgctgaaaccttttacggtgaaaacgcctgccggtttggaagtgaaagttaccggtacgcatttcaatgtagaggcatatgccgatcgtagaacatggaaaaccactttagtagaaggaggggtggaagtccggcttggaaaatatcaaacctatctgcgaccgaatgaacaatttagttttgatcaggaaaccaatcagggaagcttgaaaaaagtaaatgtcagggaggtcatcgcctggaaaaatggctggttcgtttttgataatactcctttggaagaaatcatggagacaatacgacgatggtataatatcgaagtagaatatcgggatgctgagacgaaacaattgcgttttacgggtgaccttagtaaatatgattcttttgaatctgtgattcgtatgttcgaagatacacagaaagttaagttaaaagttcgggccaatcggctgatcgtagaaagacattaattcatagaaatagatgatagaatatacctaaaaatggggatttctcttaaatagagctcccattatctttggacctgctaaaatggtcgattcattttgcggatttccgcgaaaacaatggacaggtggtgattgaaaataggtaattattaattaaaacagtaaacatgaaagtaatgtgttatttcaaacaaggaacaatatcccggatgttattcagagggatgttgtttgcattgttggctgtatgttacccggaatattcccgggctgttattgctgaggattatcaggcgaatcggttgattacgctttctatgaagaatatctctgtggctgacattatcgggcaaatccggaaaacgacagattatcgtttcttatttcaggtcgatgacctgaagggagtccggaaagaggttttcgaggtttctgaagcgactatccgggaagcgatggataaattggtggcaggaacatcactgacttatactttgcggcaggacggagtagtcgttttatctcaaacacaacctcaatccagggaatttaccgtttcagggtttgtactcgaggctgaaacccggaaaccgataccctatgccactgtttttataccggatttactgatcggtacttctgcccgggaagacggggcattcacacttaatcatgtacgtcccggaaaattgaaacttgaagttcgttttatgggacggatcagtctggatacggttattcaggtgaatgcgaatgtgacgaatctccgtttttatttgcaggaagaaaatttcaggttgaatgaagtacatattacggccgagaacagcaaagccggacaagctacttcctccaagatttcccgtttggccatggatcatatgcaggcaaccagcctgggagatgtgatgcagttattgccgggtgggttagcaaccaatccgaatctgggatacgcctcccaattgaatctccgtatgatttccgagaatgcttccggcataccgggggtgacggatggagaagaggaagctgccaatatgaatagtttagggactctgattatccgggatggggctcccgtttccaataatgccaatctgcagactgtaagtcctgctatcacaggtgccgggactgctttgggcggaacatcttcaccggccggaggtgtcgatgtccgggctatctcgacagacaatatcgagtccatcgaagtgattcggggaataccttctgtcgaatacggagatttgacttcaggggctgtcattatcaattcgaaagcaggccgggaaccgttccgcttacgttttaaaaccaacgaaaacatttatcaggtatcggctggtaaaggatttaatctgggagggaagaaaggaagcctgaatatcagtggggattacgcttataatgtgacggatcctatgcaatcttatgtatactatcaacgggctgctgcaaaagtgatgtattcgaatatattcttacatgatgttctccgttccaatacttcggtagaggtgatatatggggataataaacggaaacaaaatccggatgatgaacggctccaactgaagagcaacggacgggatctcggtattgcgtttaatacgaacggaatttttgacctggattacggctggctgaaaaatctccgttatacgttggcagtaaattatatgaataagaagagttatgaacaaagattattgacaaatgcaacatatcaatattcgatgacgacgaccgacggtgcaattctgagtaatcggcccggtgtcgatttgtatgacgatcagggaaataagctgaccaatattcctgccggcgaagagacactttatgccaatatgttacccaacgattatcttacccgttatgatatcgaaggaaaagagctgaatgtgtttgctaaagtgatggctaattttgtcaagcaaggcaaccggatcaataaccggattttagtcggggcggattttaaaagcgatggaaacaatggagatggaaagactttcgatccggcgacgcctccataccgggtaaataccagtctgtattcttctttccgcccgcggaaatacagtgatattccgtttgtaaaccaactgggagtatatgcggaggaaaatttcagcctgaattttgccagacggaacctgaatttacagctcggtatacggtatgataaattgttcggacaccaggatatctggacgccccgtttgaatgcttctttagatgtattgccaaaaacatttacgttgagagggggatacggggaaacggctaaaatgcccacagtcctttatttgcatccggagaaggcttatttcgagatggtcaactttgtgagtctgacagatgataagattcccgaagctcaacggttgatgatgacgacgacccgggttttcgatacggaaaacaaagacctggaaattgctaaaaaccggaaagcagaagtcgggttcgatttgaatatcaaaggagtgaggctggcagtcaccgcttttcaggaacgcatgaataacggttattcgatggcttacttgccgactacttttaaatccgtcgaaaacaaacaatacaaaagcggggaattacctgccgatggagtgactgctcctgcgctgaccgaaaaggggacttaccgggtattgatgaaatatatgactcctcagaataacattacaatcaatacgcggggactggaattcgatctgaatctcggacggttcgatgcgattcgtaccgctttttcggtcaatggcgcctggttacggacagaacggttcaataacggttatacctattatgaaaaaggctccgaagatccggccaaagctcctcatgtggggatttatgaagccgctatgcggaaaaattattcagaaagaatggcgacgactttccgggtgacccacaatattcccgatatcgggtttgtggtgacattgtctgctcaggtgttgtggaaagaggccaactggagccgtttcggaaatgattcgatcccagttagttatatctcgaaagaagacgggcaggtatatcctttcgatccggctaaaaaagaggatgctgagtttaccgctatcatgcggacagtcaaccagaaagaccgaatccgggaatccatgcctccgacactctgtatgaatttgtatctgacgaaggaaattaaagactacctaagggtatcgttttttgcgaacaacatgttcagcagtcgtccgctatacaaacaaaaacggactatcggttcctatgaaagaagaaatattccgttattcttcgggttggaactgtcggccattatcaattag

SEQ ID NO: 721 - DNA, 5317 bp, unidentified
  source 1..5317: mol_type = unassigned DNA
atgttggaagaacagatacagatggtcgacttgcatggacaatatctccggttcaaagaggagattgatgaggccatgcaggcggtgatcgacagttgtgcttttatcaatggtccgcaggtgaaatcctttgccgggcatttggctgattatcttcaggttccatacgtgattccttgtgctaacgggacggacgctttgcagattgctctgatggcattggagcttcagcctggcgatgaggtgattctgccggcatttacttatatagcggcagccgaggttgtcgctttgttagggttgacgcccgtgttggtggatgtcgatccctgtacctttaatatcgatccccggaaaatagaagcggctgtttcggaacggacaaaggcggtcgtggccgtccacctgttcggacaagcctgcgatatggagccgatcatgactttggcagatgtctatcatctgtatgtagtggaagataacgctcaatctgttggtgccgattatatcttttccgacgggcgggtacgaaaggccgggacgatcggacatatcgggacgacatctttttttccatccaagccgttggcctgctatggcgatgggggggcgttgatgacttccgacgaggcgttggctgcccgtatccgcatgattgccaatcatggccaggaatgcaaataccaccataggcggatcggatgcaactcccgtctggacacgttgcaagctgctgtgctggatgtgaagttgaagcatctggaggagttcacggaaacccgtcggcaagttgcctctcggtatgatgaagctttgtcctcctgcgattcgttggttctccctgcgagatcgatattttcgactcatgtctatcaccaatatacggtccaggtaaaagacggcaggcggaatgtccttcaatgcctgttgaaagaacagggaatcccttccatgatctattatcctgtaccagtgcatcatcaggaagcttaccggcatatctcccgtgtatccggcaatttggacgtctccacccgtttgtgcgaatccgtcctttccctgcctattcatacggaaatgtccctcggacaacagcaatatataacagaaactctaaaaaaggggggcgaaactatcctgttcccgcacttgacgcgggatagcattaaaaccgaccctataaaaatctgattgataaggtctgtccttttgcggctccgcgtcaagcgcggggacaaggagattttgacacacccccatcgaatgcttatggataaaaagataaaatttgcagttatcggttgtggccatatcggcaaacgtcacgccgagatggtgacacgcgatccgggagccgaattggtggccctttgtgatattcgtcctcgtgaggaattgggtattgaggcatacgatgtcccgtttttctcttccctgacggagctattgcagagcggaatttccatagatgtcgtaaatgtttgtaccccgaacggcttgcatgcagcaatggccattcaggctgtcgaaaccggttgcaacgtcgtgatcgagaagccgatggcactgacgcttgccgatgccgagaaggtggtctatgcttcgctgaaataccgtaaacaggtgttctgcgtcatgcaaaaccgttattctcctccttccgtctggatcaaggagatggtggattcgggtaggttaggcaagatctatatggtccagttgaattgttattggaaccgtgacgagcgctattataaacccggtggctggcatggcgatgccgttttggacggagggacgctttttacccagttctcccatttcatcgacattatgtactggcttttcggggatatctgcaatatccaggctcgctttgccgatttcaaccatgccggacttacggcttttgaagattcgggctttgtgaatttcaacttcgtgaacggcgggatggggagcctgagctattccacttctgtctggaacaggaacatggaaagcagtatgctgattgttgcggagaacggaagcgtgaaaatcggcggacagtatatgaacgaagtcgaatactgccatatcaaagattatgaaatgccggaactggcgccgacgaatccgggaaatgactacggcccttataaaggttccgcccagaaccataatttcgtgatccgcaatgtggtccgtgtcctttccggtgcaagttcggaatgtattacgaccaacgtactggaaggcatgaaggttgtggacatcatccagcggatttatgcattgaagtaataaatgtaagatagggacggggcggcgtttaaatatggattccgtattcatgctttacctcgtccatcacaaaggtgctttcgagcgatccgaggctgtcgatcgtgcctaacacgttcaagataaactcctggtaatacttcatattcggtgcatggatcttcagcaggtagtcgtaacttcccgatatattgtagcattctgtgacttgcggaatttcttgtatgattcttgtgaactcctccgcaatctctttgttcagtctcctcaacttgacactgcaaaagaccacgaagcccaggtttagcttttcggcgtccagcacggcaatgtacttctttatatatcctccgttttcgaggcgtttcaggcgttcgaatacgggtgtcgacgagaggctgacactcgcggcgagctcttttgtggtgagccgggcattcgattgcagggtacggaggatctgcaagtctactttgtctaatttctcaagtgtgttcataagaataaaattctatcagaatccttttttcgatcctgatacagtttatgcgttctgttgacgaccgtaaaaatagcgttattttctgtattttccatatatcttgtctgatatctctgtctgctatagttttgctggaaaatgagcaagaagaacaatttaaaataatacgactatggcaacaaagaaattacatttcgagacattacaggttcatgtagggcaagaacaggccgatcccgcaacagatgctcgtgccgtccctatttatcagacaacatcttatgtatttcatgattcacaacatgcggcagaccgtttcggccttcgtgatgccgggaatatttatggccgcctgaccaattcgacccagggagttttcgaagcgcgtgttgccgctctcgaagggggagtggctggtctggcggtggcttccggtgcggcggccgtgacgtatgccttgcagaatatacttggagtgagtgatcatattgtggctgccgacaatctctatggcggttccttcaatctgattacgcatacgttagcgactcagggcattacccacacgattgtaaatgtcaatgacttgcaggcgttggaggctgctatccgggagaatacgaaagcggtgtatgtcgaaacgttcggtaatcctaattctgatgttaccaatatcgatgctgtggcggaggtggcccatcgtcataatattccgttgatagtagataatacgttcggtacaccgtacctgatccgtccgatcgagcacggggccgatattgttgttcattccgccaccaaatttatcggcggacatggatcgagcttgggaggagtgattgtggacagtggcaatttcgattggaaagcaaatgccgataagttcccgaccttgggcaaaccggacccaagttatcatggggcggtctttgccgatgtggcgggtccaacagctttcgtcactcgtatccgggctgtcattctgcgtgatacaggagctacgatctcgcctttcaatgcttttatcctgctgcaaggtctggaaacattgtctctccgcgtggagcgtcatgttgccaatgctctgaaagtcgtcgagtatttatccaaacacccgaaagtaaccaaagtgaaccatccggctcttccagaccatccagaccatgaactttataaaaagtatttcccgaaaggtgccggaagtattttcactttcgagatcgaaggcgggcaggaagcggcctggaagtttatcgattcgctggaaatattctcccttcttgccaatgtggctgatgtgaagagcctggtgatccatccgtatacgactacccattctcaaatgactccggaagagttggccggacagcatatcacgccttccattgtgcgcctgagtataggtactgaatatatcgatgatatcattgatgacctagaccaagctctggcaaaggtttgatgtaagatggcaatgtgtttttgttttgatgcaagtgtaagttgttttcgacgttgtcgagaatatatttgacgttgtcgggaatatatacggcaatgtagaaaacaacttacgcttgcatctgaatgaagaagtatgggttcgaatttttattttatcctgaatagtttgtttttgtaatcgataatcacggtgttttcaaagaaataagcatttccggttattccccagacatcgagggtactataaatactatcccaaaggccgtctttggcgtagtagactttcgaattgttcaaggcttttccgccgaactcgatcggtttggttacattaaagccataaaatgttatttcttgtccccaccataaaggaccgcttagagagtcgacaatagtaaggtctgatacgctccaagctctttcttgtgtcgttattaactggaaagggcttgaacctgtatcgaacaatactttacatgtttttccattaatccgtaaaggcaattttatttccccatattctgattcaaattcttcagccagcagattttcgtattcagccggtaaaaagtctgtgattacaagcctgtttgatttgtaatcaatgattaagactttatcttgcaccatgtcggatgcgatcgttccaatatgcttgggggtatttgaatgaagtgaatctttagggattttatttccgaaattctgcatgaatccgatattggcattgctaaactccactgtccctatttgcaggttgacattcttatacatcccggttgaatcttttttgttcattaaagatggggcttctttgagataaggagcaaaagtattcccgtaaaagacagaattatatgctcctaaatcaaactgcattgtgaattcgtagggtaaattctctatttttaccggaacatttagaaaagctttttcaatgtatatccccgaaattgtatcaccttcccaactgaagggaatccattgcagcgatggttttcgtgaacaatttgtaaagattaatagaaggagtacaaaagtaatcccttgtttgtgtatttccat

SEQ ID NO: 722 - DNA, 14707 bp, unidentified
  source 1..14707: mol_type = unassigned DNA
atgaagaaaattataacactggtatcttgtctgatttcgttttcatgtctcttttcccggggatggaaaggggatgatacgattgcttttcgtgacagtttgatgaggaaggtggaacatttaccagcagatacttctcgtttgtctgtgttgctggacgcggcatatttgcatcagaatcctccttataatgtgttttttgccaagtgcctttatgaagaagcacgtaagcagcagaatatctattatgagaatttgggtgcctattatctggctgtctgttatgataaaaaacatgatttggacagtatcaccctttgggtggatgagttgcaggaacttgcttccaagataggcaagtatgattattatctggaacaaaaggctgctatcagtcgcgtgctggcttctaaaaaaatgaatgaaaaggcggcttttgtggcaaaagaagttttgaaagaggcacaagagagaaaaagtaataatggcatagtggctgcctataatagtttgggatgtacgtatgctgcttttaatcgttcggatgaagcacttgcagctcttctaaaagggtatcgggcttgcaagaaaacgactaaattgagtttgcgcattgatattctttctcgtttatcaagtagatatgctgatattgtttccggtttgccttctaaggaccccgatagagtgaagagagattctgttttgttttatttagagaaaatggagggcttgttgaaagaagtgttgtctaaggagcccaagactgtgaataattggagagatgtaatggtggattgccaaaccaggtatgttcgttattatatgcatcataaggattattctaaaacggctgaattccttgaaaaagccaaaaacttgcttactccggaagtggattcggtgtattggctgaatatacaattgatggaattgcagtattatgcccggacacaggaatatgataaaggaattgcattgatagaccaggtcgctccgtttgtcgaaaggggacatatagatgtattcgaaactcttattttttataagtctttgatattgcgtgataagggtgactggaacgaaggcatccatacattgaagtttttgctgcataaacaggattctttgagtatagctacaaccaccagccagttggaacaagtaaaagagaattatcaaatcaatgaattgctgatggaaaagcaaaagattactaacctgaactatcttcgggctattatgattttgggtgtactattggttttgatgctgttgttttatctttataccggttacctatcaaagagaattgctttggcagaaaaggaggcgataaaggctgccgagctttcgcatactgataatttggctaaagaacggttgaaacttgaaatcagtcatgatatacgtactcctttgaatgctgtggtgggttttgccgaaattttggctgatgcggataatttggatgaagaaagtaaatctgcttataataagattgttcaggagaatgctacacagttattggactatgtgaataatatccttgagctttctcgccttgaatcggggaaaataaaatatgtggaaggcagttgtgactttatcggtctgtttcgcgctgtgatagaggaggctgataaaaacgggcagaactgtgtgcatgcagagttgcataccgatttggagaaacagatggtcagaacagatcaggcacgtttactttctttgtttgaaagtttagccgtctctaccgtggacacggaattttatcattcggatataacagtaaaacgtgtggaagaaaaatcgcttttactggtgacggttgttaatacaccattggcaaaggagcgttttgagaataaaacggctatgattcgtaatgagataaatgctcactttattcattatttcggaggatattataaagtagacgaacaggcaaaacaaggaccttctgtgacttttacatatccgtatgatgttgccggtctgcatattcattgaaaagtttcacgaaaggattgagttacgtcgagagtagacaaaggcagttgtttttctgtcttacttccttattgggtatggcttttttcgattaaaatataactttaacactacttttttgcatatatgcgcaaaaatattctgctttttgtatctatattcccaaacaatgcgtaattttgcaatcgaatcagaataattatgcagtatgaagagcaagaatagcagactggatgccatcaaaattataatttcctgcaaggaaataggaagtcaggaagaactgttacaggaattggctaaagaaggattccgcctgacacaggctacactgtcacgtgatttgaagcaattgaaagttgcaaaggctgccagcatgaatgggaactatgtatacgtattacctaataatacaatgtataagcgtatgaccgaacagcattcggccggcgaattattaatgcataatggctttatttccattgagttctcggcaaatctggctgtgataaaaactcgtcccggttatgccagcagtttggcttatgatattgatagtaaagattttgatgaaattctgggaactattgccggagatgataccattatgcttgtggtgcgcgaaggttgcacagagaccggggtgaagaacgcactttcactcattataccgaatatacaataaaaataatatagaataagaaatggatgctaaacaagttgatgtgatggtggctgatgcctcacatgaagtttacgttgataaaattttagataccatcagggaagcagctaaggtacgcggaacgggcatcgcagaacgcacacatgaatacgtggcgactaaaatgagagaaggaaaagcgattatcgctttatgtggcgaagagtttgcaggctttacttatattgagtcgtggggaaacaagcaatatgtggccacttcagggttgattgttcatcccgattatcgtggcttgggattggcaaaacgcattaaggcggcatctttccgattggcgcgtttacgatggccgaaagctaagattttcagtctgacaagtggtgcagctgtaatgaaaatgaatacggaattgggctacgttcctgtcacattcaatgagttgacggacgatgaagctttttggaaaggttgtgaaggatgtgtcaatcatgatatattgatggcaaaaaaccgtaagttctgtatttgtactgcgatgctttacgatccgtctttacacgaggaagacacgatttaaagaagaaataatagaaaaaacacatattattatggaagaaaaaaagaaaaaagtagtagttgcgttcagtggcggtcttgatacttcgttcactgtaatgtatctggctaaggaaaaagggtatgaagtatatgcagcttgtgcaaacaccggtggtttcagtgaagaacagctgaagcagaacgaagaaaatgcttataagctgggagcagtgaaatatgtaactttggacgttactcgggagtattatgaaaagagcttgaaatacatggtattcggtaatgttcttcgcaacggaacttatcccatttctgtaagttcggaacgtatcttccaaggattggctattgcccgttatgccaatgaaataggtgctgatgctattgcccacggctcaaccggtgcgggtaacgaccaaatccgttttgatatgactttcctggtattggctccgggggtagaaattattacccttacccgcgatatggcgttgagccgtcagcaggaaatcgattacttgaacgaacatggttttgctgctgattttacaaagttgaaatattcatataatgtaggtctttggggaacttctatctgtggcggtgagattttggactctgcacagggattgcccgaaagtgcatacttaaaacaagtgactaaagaaggcagcgaacaacttcgtcttacttttgagaaaggtgagttgaaagctgtgaatgatgaaaaattcgacgatccgattaaggctatccaaaaagtggaagaaatcggtgctgcatacggtatcggtcgcgatatgcacgtgggagataccattatcggtatcaaagggcgtgtaggtttcgaagctgctgccccgatgctgattatcggtgcacaccgtttccttgaaaaatatactttgagtaaatggcagcaatactggaaagaccaggttgccaactggtatggcatgttcttgcatgaaagccagtatctggaaccggtgatgcgcgatatcgaagctatgcttcaggaatcgcagcgcaatgtcaacggtacggctatccttgaactccgtccgctttcgttctctacggtaggcgttgaatctaaagacgatttggtgaagactaagtttggtgaatatggtgaaatgcagaaaggctggacggcagaagatgcgaaaggctttatcaaagtaacttcaacaccattgcgtgtttattataataaccacaaggacgaagaaatctgattatgattaaagtaggaattatcggtggggcaggttatacggcaggcgaattgattcgtctgctgattaatcatcccgaagtagagataaagtttataaacagtagcagcaacgccggcaataagattaccgacgtacatgaagggctttacggtgaaaccgatttggtatttaccgaccggcttcctttggacgagatagatgtattgttcttctgtaccgcccatggtgacacgaagaagtttatggatagtcataatgtgcccgaggatttgaaaatcatcgatctcagtatggactatcgtatcaagagtgatgaccacgactttatttatggcttgcccgagctgaatcgtcgtgccatctgtcatagcaagcatgtggcaaacccggggtgttttgctacttgtatccagttggggttattacctctggcaaaacacttgttgctgaacgaagatgtgatggtgaatgctattacgggaagcaccggtgccggtgtcaaaccgggtgcgacaagccacttcagctggcgcaacaataacatgagcatctataaaccgttttctcaccagcatgtgcccgaaatcaaacagtcattgaagcagttgcagaacagttttgattctgaaatagattttattccttaccgtggagactttccgcgtggtatctttgccacattggttgtgaaatgcaaagtagaactggaagagctggtgaagatgtatacggactactatgccgaggattcctttgttcatatcatagataaaaacatagacttaaagcaggtggtgaacaccaacaagtgtttgattcatttggagaaacatggcgataaactgttgataatctcttgtatcgataacttgttgaaaggtgccagcggtcaggctgtccataacatgaacctgatgttcaatctggaagaaaccgtaggcttgaaactgaagccggctgctttctaaaaaagaagagttatgaaattattcgatgtatatcctcttttcgatattaatatcgtaaaaggaaaaggttgccatgtatgggatgataaaggtacagaatacctcgacctgtatggcggtcatgctgtcatttctatcggtcatgcacatccgcattatgtagaaatgataagcaatcaggtggcacggttgggcttctattccaattcggtgattaacaagttacagcaggaagtggcagaccgattaggagagatttcgggatacgatgactatcagctgtttctcatcaacagtggggccgaagcaaacgaaaacgccttgaagctcgcctctttctataacggacggaaacgggtgctttctttcagcaaagcatttcacggacgtacttcattggcagtagaagcaactcataatccgaagattattgctccgattaatgcgaacggtcatgtgacgtatctgcctttgaatgatatagaagctgttaaagcagagctggcaaaaggcgatgtgtgtgctgtgattattgaaggaattcagggggttggaggtattcagatacccgatgctgaatttttgcaaaacctgagcaaggcatgtgaagcggcagacgcggtgcttgtgctggatgaaatccagtcgggttacggacgaagcggtaaattctttgcccatcagcatgcgggtatccgtcccgatatgataaccgttgcaaagggaatcggtaacggtttccccatggcaggtgtcttgattagtccgaagttcaagccggtatacggacagctcggtactactttcgggggaaatcatttggcttgttccgctgccattgccgtgctggatgtgatgaagcaggaaaatctggtggagaatgccgctaaggtcggtgcccacttattggccgaattgaagaaacttccacaaataaaagaagtccgcggtgaagggctgatgattggtatggaatttgctgaacctattaaggaattgcgtcagcgtttgttgtttgaacaaaaagtattcaccggtgtcagtggcacaaatgttatccgcttgttgcctcctctttgtttgagcatggctgaggctgatgaatttttagctcgctttaaaaaactcttttgattgaaagaagtttgcaataatataagaaagtgaaaatacatgtcctgtggatgagtattttcactttttccttttatctttgacccaattgattttaaaagaataaggtatgaaaatagcaattatcggtgcaggaaatatggggggcgctattgcacgcggcctggcccggggaaccatagtgaaagcaaatgaaatctttgttgccaatcccagtaatggaaaactggacgcgctgaaggcggagtttcctgaaatcaatgtgacaaacgataatgatgaagtggtgaaagaagccgatatcatcattctggcagtgaaaccgtggatggtggaacaagtgctgagttttactaaattggatattgagcgccaggtgcttgtctctgttgcgggtggtctgtcgttcgaccgtttttccgaatgggtaagcccgcagatgactattttccgtgttattcccaatacagctatttccgaacgccaaagcatgactttgatagccagtcgcaatgccagcaaggagcaggagcaattaatgctggatatttttaatgagcttggaatggctatgttgatacccgagagtcagatgggagctaccactgcattgacttcttgcggcatagcatacgtgttgaaatatatacaggcagctatgcaggcaggcattgagatgggggtttgcccgaaagatgctcagaagatggtggcgcagtcggtaaaaggtgctgccgaactgatattgaataatgatacccatccttcggtggagattgataaggtaacgactcccggaggaataactatcaagggtatcaatgaattagaccatgccggatttacttcagccgttatcaaggcgataaaggccggtaacgtagaatgacatagcctttctctaagtattgaatttcagtatgtaaagacaatcggctcttgctgtattcataaatctctgccactgatttataaaccggaagcggtaatttataaatcagtggcagtgacttataaatcggtggtgctgattaatgaatatatagggaggttacgaagaatatctctctttccatttgttttttgtgttgtaaataaacagtaattccaatgtggcttttccatttcacgaaacactgcaccgggggacatttggtcagagccggagcttatggaaaagaatagaaagcagttatacagggtaatgtaaggggagttccacaacaaatcttgcacctccggtgtattgtgtgtccagatagattttacctcccaacagggtagtgaggctccggcaaatactcaggcctagtccgaaaccgggattcatgctgttcagcttctcaaaacgttggaaaatcaattcgcctttttccttatcaatgccacagccggtatcggtgacagagaaaatgatagaggtgtctgctatctcataagccaagacgatactgccttgagaagtgtatttgcaggcattgaccagtaggttggtcaatatctgttgcaggcgttgcgcgtctgtattcaggatgatttccgtatcgggttgtttcagctccagtctgacgccttcggccactctgtgtgccacgcctgctaaagtggattggcatagttcgggcaagacgacattggatagcgagatgctatagttgccgctttccagtttgctgaggtcgagtacatcgtttaccaatgtgagcaataaattggtattggtatgcagatgaccgagtaattcgctccgctcttcttcgctgaattctgcaccggcatcgttcagcaaatcattaaaaccgataatggcattgagtggcgtacggatttcatgactgaggttctgtaggaaagccgatttcagcttgtccgctttttcagcttgctgccgtgctttttcggcagcttctttttctatctttaaatgcctggcatgttgccggcgtgtaaaagcatatatgctggagaagccggaaataagtatcaggatggagaacaccacccaaatcttgcgctgattggtttttttctccatttcaatacgttgtaactgttcttgctggtgtatgacttccaagcgttgtttttgtgtttcggctttttccagttcgatggctgtttgttgttgcttcagttgcaagtcctggttttccagcttcatgcgcgtctgttctttttccatcagtatcatttgttcccgattttgcatttgtgccagtttcatttctgtgttttggagagacaggcggttcttttccaattccagcctttggttattgaaacgggcgttgtatgccgccattacttccgcattgtttgcttggttgatagagtcttgcagacggtattttttgtatagttcggcaaaggcggaatagaaatcccctgccatttcaaatgctttgtatctgaccgcaagactcaatcctttgtcactgatggaatcactgtatgcaagggctttgtcaaggtttcccaatgctgcataataataaccgttcagagtgaaatagttttcaaggatggcccctttcatcactccctgagctctgtactgcgctaattctttttgaagttcgtcggctttttttaaatccattttgctgcatgtcacttgaaacaagagtagtttggattgtatcaatgcagattgggtgacggaagcatctaaacatcttagggcatattcttcggcttcttcgtatcgctgcagatttatatagcatgagcttatggagcgatacgaataaaagttctctttttcattgccggtctgtatgtagtaatccacagcctgtttgtattgttggagggcaagccggaacatgcgctgctggtaatacacatctcccatgcgcacgtagcttttccctatgccgtaaggattgtccaaacgaatggcttcgtcctgatattttttcagttcttggatggcggaatcatattccctgtttctcaaatagtaagtgataatgcggttccatgctccgaatatgtattgcttataaggagtattgcgtgcaaagtcggctaccttttctttctcgatgagcaatgtattgatatcgttgataaagtaataatggtcggatttcaggttcagggcaaggcattgcgctttcacgtctccttttttctctgccatgtggaagagtgtatccgccatgagcaatacttcgggcttcctgatggcgttgctgcacttttggtaataggaatagagttggtcgtttattttataaggattgttttgactcatcgttgtcgggcagaaaagaaatatttccgccaatagtattaggatagtatgcccgatgaacctcttcatatcattctgtgtgtctttggcaaaaatagtgattcttttataattcatgctatcatttatcataagttttatggagcatggattttttctatgtttcttcatggatatagggaggtatctgctccgggcttgtggggtaatccaaactgttaccattcttacggtgcagaagaaaacgtggttgcaacgctctatggtagcgcagcttccgttccttgtggcgcatgatggttggactacattatccggcttttttcacacgttgggaatgtttttgcagtcctattgcccgaatactttcatttgaaactatccgaaaggcaaccacttccttaaacccgtgtccttgctcatatagaatgatattgtgcagtttcgctgtctgtcagatagttttcatagaaacttcttgaaactttgctaggattaattaaatcttcattatctttgaaccctaaatctaaagattatgagtgaccagataaagcaaatagccgaacgtctccggggattgagagacgttttggaactgacttcccaagaagtggccgaaagttgccaacttacagtggaagagtatttgggtatggaaagcggtgagaaagatatatcggtcagcgctttgcagaagattgcccgcaaatatggtatcgcactggatgtgctgatgtttggcgaagagcctaaaatgagtgcttacttcctgactcgttgtggcacaggggtatcggtggaacgtaccaaagcatacaaatatgaatcattggcatcgggattccgcggacgtaaggtagatccgttcatcgttaccgtggagccgaagcccgaagatacgcctatttatttcaattcacacgaaggacaagagttcaacctggtgatagaaggacgtatgttgcttaatattaacggaaaagaacttattttgaatccgggtgacagcctttactttgattctgcccagcctcacggcatgatggcactggacggcaagactgtgaagttcctggcagtaattatgtaaattgtaagagtatggtagaaagattcttagaacaaaccacttttgcctcacaagaggattttataaagaacctgaagattaaggtacccgaaaattttaatttcggctatgatgtagtagatgcctgggctgccgaggaacccgacaagaaagcgctgttgtggactaacgataaaggggaatccagacagtatacttatgccgacctgaagaaatataccgatatgacggcgtcttatttccaaagtctgggtatcggtcgcggtgatatggtgatgttgatattgaaacgtcgttatgagttctggtattccattatcgctctgcacaagttgggtgcggtggtgattcccgccactcatttactgaccaagaaagatattgtgtaccgttgtaatgctgccgatattaagatgattgttgcggcaggcgaagatgtgattaccaagcatatcatagaagcgatgcccgattcgccttctgtaaagaagctggtcagtgtcggtcccgaagttcccgaaggtttcgaagactttcatcagggaatggaaaatgcggctccgtttgtaaagcctgagcatccgaataccaatgaggatacctcgctgatgtattttacatcgggaactaccggtgagccgaagatggtggcgcatgactttacttatccgttggggcatatcgtaactgcctgtttctggcataatctgcatcgcgacagtttgcatctgacgattgccgataccggttgggggaaagcggtgtggggaaaactttacggacagatgattgcgggggcgaatatctttgtgtatgaccatgagaagtttactcctgccgatattctcggaaagattcaggactatcatatcacttcactgtgtgctcctcctaccatttatcgtttcttgataaaggaagatatcagtaagtatgacttgtcgtctttggaatattgtaccactgccggagaagcattgaactattctgtatatgagacgtttaaaaaaataaccggtattcgtttgatggaaggtttcggacagacggaaaccactttgacgttgggtacttttccctggatggagccgaaaccgggcagcatgggtgtccccaatccgcaatatgatatcgacttgctgactcccgatgggcgttcggcagaagacggtgaacagggacagattgtcatccgtacgtctgaaggcaagccgctgggtttgttcaaagagtattatcgggcggccgaactgaccgaagatgcttggcacgatggcatttattataccggtgatgtggcttggcgtgatgaagacggatacttttggtttgtgggacgtgcggatgatgttatcaagagctccggctaccgtatcggcccgtttgaagtggaaagtgcattgatgactcatcctgccgtggtggaatgtgccattacgggtgttcccgatgaagtgcgcggacaagtggtaaaggcgaccatcgttctttccaggaactacaaaggacaggaaagcccggaactgattaaagaattgcaagatcatgtgaagcgtgtgactgccccttataagtatccgcgtgtgatagagtttgtagaagagctcccgaagactatcagcggtaagattcgtcgcgtggagatacgtgataaagataaataaccgggggagtgcgttgagcgaagtctttattcgtaaataaagtaaaagatgaaaagaattttgttttttgcctttttatgcctgtgtgtctgcttgtcggcaggtgcacaggcattgtctcctgttacatggactgcctacggattgacttttaaggttccgaagggtattgttgtggaagaggatacagaagaaacgtttttgttgaacgatagtaagttttatatcactgttcaggcgttggactctgacggcatcacgaagggtgacctggaaggtatgttgaaagactatgccgacgatgatggtgtggagaagcagactgctgtcaaagcctttgacttggagcaattttatggtgtttcgatggatgggcaatgtgagggggagccttgttgctatgcctgtctgatgaccaaggcggccgggagtgcatttcatgtttccatcatttattcggtggggaaaaaagctgaggcggaagctattctgaaaagttttgtgatggaagagtaagcgaatgcagtcagttctgtgcattcggggagtcaaagcattattaaagttaactgtaggggcggggattgcccgcccgaatgcatcaagtaaagtgtattcgggcgagtgtccccgcccctacaggcaaagtgataggttgattgggtcttgataaaacctcctattttgctcttaccttgaattgcaaagcaataggttcattctttattcctttgggaagaaatacttttactttatcaccatcgcaagtatatttcacactcttgtttcctttcagcattttcattttgcttttcggaagatttcctgtccattctatgacttccggcagtgtttctccttcgggcaatgcatagatggcatagagtgtctgtccgtccttgtcggcagtgaaccatgtgtgtccgtcctgataaacaggagtgattcgggtattgtagatggctttgccgtttgcccgcaaccattctcccacttcgtgtagacgcttggccacttcttcttcgatgacaccgtccggggttggtcctacgcccagcagcaggcaaccacctttggcagtgatttcactcaatatgttgataaccttttgagacgatttgaatggagcattcggcacccatccccaatcattgctcagcgtgatgcaactttcccacggatagttgagctgtgtttcggggatgccgcgttcgggagtctggtagttttcgtttttgcccctgatgctgcggtctaccgaaatcaatcccggatgcttccggcgtgcttgtgccagaatatcgtccagaccaatgtcatcacctttcacccagccgccgtccagccaaaggatatcaaaacttccgtagtcggacatcagctcattcagctggttacgggtaaaggtctgatagtttttccaccagtcgggatggcggtctttcttgtaattgatgttacggtcgggggtagcgaaataaggattccaaaaccattcgcaatgccagtcgggtttggagaaatagcatcccgtcatgaaacctcttttgcggaaagcatcgaatacatggtaagctacattcttgcgcggattgtccttgaaggctccgtgggcaatggagaagtccgtgtacttggaatcgtaagtacaaaatccgtcgtgatgtttggtggtgaatatcatgtatttgatacctgcatcctgcattacatctgcccattgttcgggattgaagttgaccggattgagcgagtctttcaagccccagtaccactctttgtactcatcgtatggcaaaggttttttgcgtgaaatccaatcgacatcttccgagcagatggaccatgactctacaatgccgggaacggagtaaagcccccaatggaacaagactccgaacttctggtcttgccatttatccagtttatccaatacttgttggtcggtaggccatacataatccgttgcttctgattgcttgtggacaaagccttgtacttgctgggcgtgaaggttcaaagcgaacgctgcaccggccatgcatacgattagttttttaaggttatacat

SEQ ID NO: 723 - DNA, 7997 bp, unidentified
  source 1..7997: mol_type = unassigned DNA
ttaatcatccagtacagaatctaaaatcgcaatcattttatccacatcgcttttttcaataataagcggcggaataaaacgaatgacatttgcgcctgcgctcataaaaatgacgcctttttccaatgcctttgtaatataaggaccggcaggaacggaaagttccaagccacgcatcagtcccataccacgtgtctcaacagcaatttcttttttctccaccaatttctgcagacattcattaagatactctccaacttcttctacatggttcggaatttctctcttttcaaaaatttccagtgtctttgccaccgctgcgcaggcaagtggatttccgccaaatgtcgtgccatggtctcccggcacgaggcattttgccacttcttcttttgccgcaattgctcctaccgtaataccgtttccgattccttttgccattgtcacgatatccggcacaatatcgtatttctggtacgcaaacatcttaccggaacgtcccatgccacactgaatttcatcacaaatcataatgatgtcattttcatcgcacaatttgcggattccctgtaaaaattcagcatttgcaggataaattccaccttcaccctgaacggcttccacaatgatggcatatgtattttctgtaaccgctgcttttacactctctaaatcgttgtaatcagcaaatgtaacaccctgtaacatcggttcaaacggctctctgtattttgccgtaccggtaacggacaatgctcccatgcttcgtccgtgaaatgctttattcatcgaaataatctcatgacgattttcatgtccctgcataatggcatatttccgtgccattttcaaagcgccctcattggcttccgtaccgctgtttgccataaatacacggtcaagtccggttgcttttgcaagacctttggcggcctgcaataatggctccgaataaaaatagttagaaaaatgaattcctttatcaatctgtgctttcaaagcatctgtgtattccttatccccatagcccaacgcacaaacggcaattccggcaccaaaatccaaatactcttttccgtctgtatcgtataatttcacgccttctccatggtctaatacaaccggataacggttatacgaatgaactaaatactgttctgattcatctatcatctgtttcatatcacatgctccttcctaatcctgctcatgcggatacaatgttgtgtggttatcaataatcgctgtaccaataccttttctggtaaagaactcaagcaaaagacaatgctgtctgcgtccgtccagaatatggacgcggcttacaccttcttctaccgcttccacacagtttcttattttcggaatcataccaccgccaatggttccatcctcaattaactgttttgcctcatctgttgtcaatacagagagcaatgtttccgggtctttcgggtctttgcagacaccctcaatatccgtcataaatgccagtttttctgcatgaatacactttgcaactgcacttgccgcatcatcagcattgatgttatatgcctgataattttcatccataccaatcggtgcaataatcggaataaaatctttggcaatcaaagtatcaatcaaatcagaattaacggattttacttttcccacaaaaccgatatctcttccaccggctgtttttttctcacagagcattgtgccaccgtcttttccactaatgccggctgcctttactccaagtttctccatcatctgaactaaatgcttatttactttatttaaaaccatttccgccacttcaattgtatcggcgtccgtcacgcgaagtccttctacaaattcgctctcttttcccatataaccaagccatttgctgatttcttttccaccgccgtgaacgataatcggctgcatgccaaccagtttcaacaaagcaacatctttaatcactgattcctgcaatttttcatccagcattgcgcttccaccgtattttacaactactttttttccgttgaaatcacggatataaggcagcgcctcaatcagtgtttccgccttaagtacaacttctttcatcttgtcttccatctttttgtcctctctaacttctgtaatcgccatttatttttacataatcataagtcaaatcacagccccatgcagttgctgacgcatctccctgcttcatgtcacaaatgaacgtaaccgcatcttttcctaataaaatagtcgcctcgtcttcactgtaatctgtcggcacaccatcttttactaaaacaatctgctcatcctcagcttctaaaatcaaatcgattacatccgggtcaaagtctgcaccggaataccccagtgcgcacaaaacacgtccccagttcgcatccttgccaaacaccattgctttcacgaggtttgaagtcacaaccgatttactaaaaatctttgcctcttctttattcttacagtgaactgctcttacttccatcagcctcgtagcaccttctccatccgctgccatctgttttgccaaatccgttgcaacaaaactcagtgcctccttgaattttacatatccattcgttcctgctttaatttcaacaccggattcgccattggcaagcaccagatatgtatcatttgttgatgtatcgcggtcaaccgaaatcatattaaaactatccgatacaatttccgaaaccatttcctgcagtagatcatgtgaaatttttgcatcggttgtcgtaacgctaagcattgttgccatattcgggtgaatcataccggaacctttactcatgccaccaacagttacggttactccatccacctcaaaacttactgcagcttccttcggaacagtatccgttgtcataattgcctttgccgcaagcagacctgcttcttttgtatccgcaagcgcatcctttaaaagctttgcgcctttttgtatcggttctttctttatctgcatcccgataacacctgttgaagctgtcaagacctcttttgtcgaaacaccaagtgcctctgcaatttgtgcagccatgtattcattaatttctttgccttctccgccggtacaagcgttggcaattccgctgttcaatacgaccgcatggacatcctttttattctcaacgatttctttatcccaccagaccggtgccgcttttacaacattcgttgtaaaagttcctgcacagactgccgggctttttgtataaacaagtgccatatctgtgcggtttttatatttaattcctgcttctgcgctcgccgccataaatccttttgctgcggtaacgccgccttctattgtattcatcatattttcctcctttacggaaccatcggtacaagccgaagcccctctgcctcatcaaatccaaacatcagattcatgttctgaactgcctgtccggcagcaccttttgtgatattatccattgctcccatcataatcacgcgatgcgtacgctcgtctacttttacatttacatcgacaaagttacttccctcaacccatttggtctccggacacacaccctcatccagcacgcgcacaaaatattcatcttgatatgctttcacataagcctctcgaatctgctcttttgtcacaccttctttgtattttgcataagctgtaaccaaaataccacgattcatcggaatcaaatgcggagtgaaattaagtgtaacatcttttccactaatataggaaagctgttcttcaatctccggtgtgtggcggtgtgtggcaactccatatgccttaatattctcatttacttcgcagtaaaggtttggaacttttgcacctcttcctgcccctgatgttccggatttagcatcaataattaaagtatccatatcaataagtccttctcttgcaagcggtgcaattgaaagtgttgaacatgttggatagcatcccggattagcaactaaacgtgcatttttcacctgctcacggttcaactcgcacaatccgtataccgcttcctccaaatactgaggacttttatgtgtaatgccgtaccatttttcatatacagcgacatcttttattcggtaatcggcactcaaatcaatcacctttgcctgagaaaggatttcatcatccagaacacctgccaaatacccctgcggtgttgcggtaaaaatcacgtctgcctcttttgccaaagtatgtaaatcatcacttttacaaatattttctacaatctgaaaaacatttccaaaaacggaactaaatttcttatccacatagcttctcgaaccataccatacaatctcaacttctttgtgctgcaataataatcgaaccaattcctgtcctgcgtaccctgtagcaccgataattccagcttttatcatagcatcctccattccgccgtactttggcagctcactctttttattcatcatttatgcatatttatacatattatacacaaacctcaattattatacatcttttccgataaatatgcaatacctaactagaatttattcgttattctttgaaaataattgattttatgcttgcataatattcacttgtggtgtatattagaaaaaggttaataccaaaaaatacatacggaggttctattatgaaagaaaaagttattttagcttattccggcggcctggatacaacagcaattattccatggcttaaagagaattttgattatgaagttatctgtgtctgcatcgattgtggacagggtgaagaattggacggtctggaagaaagagctaagttctgtggtgcatccaaactttacattgaggatgttgtcgatgagttctgtgatgaatatgtagttccttgtgtacaggctcatgctgtatatgagaacaaataccttcttggtacttcgatggctcgtccggttattgcaaaacgtcttgttgagattgcaagaaaagaaggcgctactgctatctgccatggtgctaccggaaaaggaaatgaccagattcgtttcgaactcggtatcaaagcacttgctcctgatttgaaaattattgcagcttggagaagtgataaatggacaatggattcccgtgaatccgaaattgaatactgcaaggcacatggaattgatcttccattctccgcagattccagttacagccgtgaccgcaacttgtggcatatcagccatgaaggtcttgaattggaagacccggcaaacgagccaaactttgaccatcttctggttcttggtactacaccggaaaaagcaccggatgaaggtgaatatgtaactatgacatttgaagccggcgttcctaagagcgtaaacggaaaagaaatgaaagtttccgatattatccgcactctgaatgaattaggtggaaaacatggtatcggtattgttgatatcgtagaaaaccgcgttgtcggaatgaaatcacgtggcgtttatgaaactcccggcggaacaattctttacgaagctcatcagcagctggaagaattaattcttgaccgcgatacaacaacattgaaaatggatatgggtaataaacttgctcagatttgttacgaaggcaaatggttctcccctctccgcgaggcagttcaggcatttatcgagtccacacagaaatatgtaaccggcgaagttaaattcaaactgtacaaaggaaacattatcaaagccggaactacttcaccatacagcttgtacaatgaaagcattgcaagttttacaaccggagatttgtatgatcatcatgatgcagaaggcttcattaacctctttggtctttctaccaaagttcgtgcaatgaagatggcagaagtagaaaagaataataagtaaacaaccgtattgttgtaaataacaaaacagccttccatccaatgatgtgaaggctgttttatttatctttttatatcacttatatatcagaagattttatgcatcttcattggtatcttcttctgctaactgttcgtattcatccgtagaaccaaactcagcaaattcagagaagtcctcatcctcatatgatgctgccgcttcatctgtctcttctgtctcttctgtctcagcagaatcctcaacttcatcagtctcagtttcaaccgcatcatcaacagtctcactttcctctgcatcgtccggaatcgtaagataaacatcatcatctacctcagtttccgcatcctctgctgcttccgcttcctcataggattcttctgcaacatcttcataatcacttgcagtcaatccttcctcatctgcatctgttacaaacttagcaacttcagaatccaaacgacggcttacatcctctgttacacgaatgcttgtctgaatatccatcatactatccgtcaatgtagttacagactcagatacaccggatacctgattggaactatcattaatcgtctctgaaatttcatgtatcagtgttgccatctcatgcatcgtatctttcaatgcggttgcactgtcagcaaactgaagcatcaatgtatcaatacgatttgcatcgtcgttatactggttaccggtatttacaagattatcataatccggcatgacctcattttgaataaacgtcagcatcttattagcattgtctgcaagctctcctactgaagaatttacttccaaactgatatcctgaatgttatttgctgtctcacggctcgaatctgccagtttacgaatctcatcagccactacagcaaatcccttaccaacctcgccggcacgtgctgcttcaatggatgcattcaatgcaagcaggtttgtctgagaagaaatctccaaaatatcatttgtcaatacattaatcttttcaacatctttactcttttcaagagaactctgaagcagtgtattaatttcacttgccatctctgccgtcatcttacggcgtttctgaccactctcctgcaatgcattcgcacggtctttaatttcctttgcgaaatcagaaccattatttgcctcaccggcaatatgctccattgcttcataaacacgtcctgcctggtcattcaaatggtcggcatggtttgcaacctcttccattccggcagaaagtttttccattacctcagataccagtttgatatcgccattcgatgtatttacaccattaaacacctgctcaacattaccctgcagctcaacggcatcggatttgatttccataataatgtcgcggagtaaatcaataaacttattaattccgacaaccagtgttcccacttcatcttttgtttttacctgaatctgggatgtgaggtcaccgtggtcttgttcaatacttcgtacaataccgttcaagtgacgaattgcatgtttggttggacgaaggattgtcgctacaaccattaaaatacagaatacaatagaaacaaccaacaaagcaatcaaaacaacaaatgctaatgtactctgtgatgcagctgcactaagtgctccctgcgaatcctctactttctggctgttcaccttctgcatgtcatcaatagcactctgaaatttcttgtagataggctctaccgcttcattcaaattcttcatgccattcagttcataatcatcaattgcctttttcgatttctggtaagactcactaaatgttgcatacgcagctttatagtcttttaaagcatcggcttcaccactgtcagaactcttctctgcaataacagaaatatccttatccatgcgttctgtagcttctttaatatcctttgataactgttttaaatcatcgtcatcaaatgcagtcacatagcgagccagcttatactgaagcaatataaaatctgactccatctctcctgtcttctccgttatcgtcatgtaattgtcgctaatcgacttggttgcccggttcatctgtgcaatctttgaataaatcaatgtagaacacagtccacatacaattgcaagaatacaaaacggcaccatgattttcaatccaattgacttcctcat

SEQ ID NO: 724 - DNA, 7781 bp, unidentified
  source 1..7781: mol_type = unassigned DNA
ttataaagcctttcggttactgataactcgcatggcggcagtgtactgctgacaaggcacagacacgtgaatgccattacctttgtcctctgttgaagcggtgatgtaagctgacttcagcaattgcttcacactttccacttcccaggggctacctgcgaaaacgttaatctgagaaatctttctacttgtaatcatgtgctttaaactttttagttgtactttccggtcgcaaatgtaagtggtttgcgggaaaccgaatagctcaaatcgatcaaaaagtaacataaaaggtgcaaacgatttagaagtagcttattcctcatatttttttcttatttcgtatcgttcttccggatttccacacgacggatctttccactgatggttttcggcagttcgtctacaaattcaatcacacgaggatatttgtaaggggctgtcactttctttacatgattttgcaattccttgataagtgcttctccctctttccctttatattctttagccagtacgatggtagctttcactacctgaccgcggatttcatcaggtacgcctgtgatggcacattctattacagctgggtgtgtcatcagagcactttccacttcgaaggggccgatacggtaaccggaactcttgatcacatcgtcggcacggcctacaaaccagagatagccgtcctcatctttccaggcaacgtctcccgtatagtagatattattgttccaggcttcgtgtgtacgttccggatcgcggtaatactctttgaacaatcccagtggcttacccttgtctgtacggattacgatttgtccctgttcaccggcttctacggaacggccgtcattgtctatcaggtctacatcgtattgtggattaggcaatcccatacttcccggtttcggttccatccaaggcatggtagcaatggtcagcgtggtttctgtctgtccgaatccttccatcagtttgatgcctgtcagtttcttgaaggtctcaaatacggctgggttcagagcttcgccggcgatggtacaatattgcagtgatgagagatcgtactttgtcagatcttcgtgaatgaggaaacggaagatggtgggaggtgcacagagagaagttacatgataatcctgtatcttctccaggatggcggcaggggtaaatttctcgtggtcatacacaaatatatttgctccggcaatccattgtccgtaaagtttgccccatacagctttcccccaaccggtatcggcgatggtgagatgcaggctgttttccgtcaggttatgccagaaactaccggtaacgatatgccccaacggatatgtaaagtcatgggcgaccattttcggttcaccggtggttccgctggtgaagtacatcagtgagatatcttcgttcgtattcggatgctccggcttcacgaaaggtgcggcattttcgatccctttgtggaaatcatcgaatccttcggctacttggggacctacactgacgagtttcttcacgctgggggaatccggcatggcagctacaatatgatccgtgataaccgattctcctgcacaaacaatcatcttgatgtccgcagcgttacagcggtacacgatatctttctttgtcagcaagtgagtggcgggaatgacgacggcaccgagtttatgtaaagctatggtactgtaccagaattcaaagcggcgtttcaatatcaacattaccatgtcaccatggccgatgccgaggctttggaaatacgaggcggtcatgtccgtataacgtttcatgtcggcaaacgtaaattgccggtgttcacccttatcattagtccataacaatgcaggtttgtcaggttgttcggcagcccaggcgtctactacatcgtatccgaagttgaagttttccggtacgtttattttaaagtttttgataaagtcctcttgtgtagtgaaagaggtttgtgataaaaatctttctaccataattataggaattaagaatgagagattcccttcattctccatttagttgttacatgataattgccaggaatcgtaccgtttttccatccagtgctttcatgccatgcggcaattttgaattgaagtacaggctgtctccttcgtttagtataagctctttgccatcgatgttgaccatcatgcgcccttcgagcacaagactgaattcttgtccggcgtggctgttgtaatgtatcggttcatcgtccggtttaggttcaacggttacaatgaacgggtctacgctacggttcatgaaaccagaagcgagggcttgatatttgtaggccttggtacgttcgatgctgacgccttttccggcacgagtcaggaagtagctgctcattttaggttcttcaccaaacatcagtgcgtccaatgaaactccgtatctgcgtgctatcttttgcaacatacttacggagatatcaaaatctcccgtttcggcaagacggtagtcgtaaggagagatgtcacattcacgggcaatgtcttcagcggtcagctccagtacatcacgaagcccgcgaaggcgttctgctatttgcttaatttgttcgtccatgtggttgtttatttaatgaattaattgttagtcttattgcttacttgctttgatagcattgatgatggcggatgtataaccgtcatgttccagttcattgatacctttgatggtaataccgccgggggtacatactttatcgatttctacgctgggatgcgtatcattattcagtatcagttcggctgctccctttaccgattgagccaccattctcatagcatctttgggataaatccccatttctataccggcttgcatggcagcctggatgtatttcaacacataagcgattccgcaggaagccatggaagtgcaggctgcgaatttttcttcggggatcagcatggcaagtcccatctgattgaaaatatccagcatcagttgttcttgttctttggtcgcattacgactggcaatcagtgtcatactttccatttcgctgatagcggtgttaggaataatgcggaacatggtcatttccggttcgggtacgtagtgagccagctcttcaaagttgatgcctgcagcaacagaaatgataatttgtttactcttcagtttcagttcgcgcagcacacctttgataagccacggtttcacagcgagtatgatgaattcggcgccgatgatggcttcctgattgtcatgggtgatttgtaaagcaggaaactctgcttgtagttcatccaactttccttgtgagggattagaaactatgatatccgaggcggggataatacttccctttgccaatccacgggctatagagccgcccatgtttcctgctccgataattgctgttctcatatcattctgttattaaaagggttgtcgatgggcaaaggtagatattttttctacctttctaacctaattgatgtaaaaaaagtgcttgtgtatttaaaacaacaggcagccttaagaaacgctgaaacgcttgaaggctgcctgtttattgctgattatgttatcaaatatactttaaagtacttttctgaaacgttcgaggaagagattggcttcttccatgctgaggcagaggggtggaagcaggcggagtacatttgtaccgctgacaccggtaaatacatgttgttctttcaacagtttcagacgaagttcctttatcggttcttcaaattcaagaccgatcatcagaccacgtccgcgaacttctttgatctgcgggaacttttttaactccgtcatcagatactcacctaccttggctgcattttcaaccagattctcctgacctattacgtccaagacagcaagcgctgcgctgcatgccaggtgattaccgccgaaagtagtgcccaactgtccgtaaaccggagtgaacatcggactgataagtataccggccattgggaaaccgttaccgatgcctttggctaccgtgataatatctgctttgataccattatattgatgagcgaagaacttaccgctgcggccataaccgctttgaatttcgtccagaaccaatatcgtattatgagctgtacaagcttcacgcaaagcctgcatgaattcatctgtcggcaattgaataccacccacaccttgaataccttcgataatcactgcgcaaacatcaccttttgccagttcgtttttcatagcttcaatatcgttcagcggaaggtaagtgacatgtccgcagtcattaataggagctatgattttgggattattagtcacttccacggcaagtgaagtacgtccgtggaatgccttgttgaaggaaaccacacgtgtacgtccgttgtagaacgaagcgagtttcaaagcattttcgttggcttctgcaccgctgttaatcaggaataaggagtagtcatcataaccacaaacttttcccagacgttcagcaacctgttcctgtagcttgttaatcacagagttggaataaaatcccaacgtggcaacctggttgctgatcatctccacgtaatgcggatgtgcatgaccgatggagataacagcatgtccaccgtagagatcgaggtactcagtaccgttctcgtcccacacgtggcagccttttcccttgacaatgttgatgtcaaaaaggggatatacgtcgaataagttcatttctttaattctaaattacaaaatacaaattacttagaaggcgctgggtttcaatcgcaagccgacggtttcttctaaattgaacatcagattcatgttgtgcaccgcctgaccactggcacctttcagcaggttgtcgatgcaggagatgataagcagcttatcaccgtgcttttccaaatgcagaagacatttgttggtgttcactacttgtttcaggtcgatgttcttttctacgatatgcacgaaagagtctttggcgtaatattcttcgtacatacggactatttcatccagtgcaactttagtttttactacgatggtagcaaaaataccacgtgcgaaatcaccgcggtaagggataaagtcaatatccgcatcaaaactgttctgcaattgcttcagagattgcttgatttcgggtacatgctggtgctcgaatgccttgtaaacactcatgttgttgttgcgccaactgaagtgactggttgatcccggttttacaccagccccggtggaaccggtaatggcattcaccatgatgtcgttgttcagcatcagatgtttggcaagggggagcaatcccaattggatacaagtggcaaagcaacccggattagccacatgctttgctttgcaggtagcgcgacggttcaattccggcaaaccgtaaataaagtcatgttccggagaagcgatgcggtagtccatagaaaggtcgataattttcaattcctcgggaaggttgtgactctccatgaacttcttcgtgtcgccatgggcggtacagaagaataacacgtcaattttgtccaaaggtaactcgtcggtgaagacaaggtccgtttcgccgtacaatccttcatgtacgtcggtaattttgtttccggcgttacttgagctgttgatgaatacgatttccgcttccggatgattgatcagcaaacgaattaattcacctgccgtatatccggctccgccgatgattcctactttaatcatgttagtttatactattattcttttatctgttatacaagttcttttcctcgggaacaataagccacattataaggtacacggggataccggcaaatacggtaaaaaacgtcaataacgcatagccgatacgtacgagtgaagggtcaagtccgaaataagcggccaatcctccgcagacgccggcaagcattctgtcgctgcgtgagcgagttagttttttgttattattatccatatctgttcgtataattgttctatcccctaaccgttctctatgagagatgggttaggggataggctttttagatttcttcgtctttatgattgttataatatactctcagtggagtagaagtaaccttgatgaaacctttcgcatcttctgctgtccagcctttttgcatttcgccatattcgccgaacttcgttttcacaaggtcgtcttctgattctacacctaccgtagagaaagataatgggcgaagttccagaatagccgtaccgtttacgttacgctggctttcctgtagcatggcttcgatgtcgcgcatcaccggttccagatattggctttcgtgcaggaacataccgtaccaattggcaacctggtctttccagtattgctgccatttactcagtgtatatttttccaggaatttatgtgcaccgataatcagcatcggagcagcagcttcgaaacctacgcggcctttgataccgataattgtatcacccacatgcatatcacgaccaataccgtaagcggcaccgatttcttctactttctgaatggctttgatgggatcatcaaatttctcatcgttcacagctttcaactcacctttttcgaaagtaagacggagttgttcgctgccttcctttacacagtgtttcagataagcgctttcgggtaatccttgtgcggaatccagaatctcaccaccgcagatagaggtaccccacaaacctacattgtaagagtatttcagtttggtgaagtctgctgagaaaccatgtttgttcagataatcgatttcttcctggcggctcaatgccatatcacgagtcagtgtgatgatttccacgcccggagccaatacaaggaatgtcatgtcaaaacgaatctggtcgttgcctgcaccggtagaaccgtgagcaatagcatctgcgccaatttcgttggcatagcgtgcgatggcaagtgcctggaagatacgttcggaacttacggaaataggataggtaccattacgcagcacgttaccaaataccatgtatttcaagctcttttcgtaatattcctgcgtcacgtcgatagtgacatattcttttgcgcccagtttataggcgttttcttcgtttgttttcagttgttcggggctgaaaccaccggtgtttgcacaagctgcatacacttcataccctttttccttggcaaggtacattaccgtaaatgaagtatcaagaccgccgctgaatgcgactactacttttttcttttcttccatatcctttgttttttaaattttatcatcttcatgcagagccgggtcgtagagcattgctgtgcagatgcagaatttgcggttcttggctactaatatatcatggttgatgcagccttcgcagcctttccagaaggattcgtcatcagtcagttcattgaaagtgacgggaacgtatcccagttccgtattcattttcatgacggcggctccgctggtgagactgaatactttggcgttgggccatcgcaagcgtgccaggcggaaagatgccattttgatacgcttagccaatccaataccgcgaaagtcgggatgcacaatcaaaccggaagtcgcaacatattgtttgtttccccaactctcgatgtagctgaagcctgcaaacacgtctccgcataaggcgatgatggcttttccttctttcatttttgtcgccacatattcgtgtgtgcgttctgcgatgcccgttccacgtactttggccgcttctctgatggtatccaaaatcttatccacataaacttcgtgagaggcgtcagccaccatcacgtccacttttttggtatccat

SEQ ID NO: 725 - DNA, 32039 bp, unidentified
  source 1..32039: mol_type = unassigned DNA
ccgctgcgatcaacgcctttgcgcaggggctgaagagcgtgcgcccggcaggccgtatctggctacgctgggcctgccagcccgatgccgcccatccgctggattttgccgactgcccggagatcgacatggtctacgcccgggacagtcgggagcctgccaacaccaaccgggactacggcctgtgccgcaaactgccggacggcagcttacagccgctgggtctgccgatctggcggtgggataccttttatgtgcaaatcgtgcgctccatttttgacggcagctgggacaatgcagccaccacccgcgcagtgaactactggtggggtctgcgcagcggcgcagaggatctggagtatcaggaagcgctgcccagcggtacgcggcagctgctggatctgctggaaacgctgcagggctcggataatgtgcacatcttcccggaaaagctgtatgataacgaggacaacctgcactccccggagaatagagtttacagccccaaagagctgatggagatggattggctggatgcctgtgtacacggcaagctgccccattacgatgaattggacgtcaagacccgtaccgtgctggcgatcaacggactggacaacgtaaagggtctggagaaatgagccggcctgaccggaaacagaatggagcatacgaacgtgaaaattcttgccatttcagatgtcccgtccaaggcgctgtgggactatgacacccgcgcccggctggaaggcatcgacctgatcctctcctgcggggatctgcccaaaaagtatctggaatatctcacaaactttaccgctgcacccatcctgtatgtgcacggcaaccacgatggcagctaccagactcagggggaacccggcggctgcatctgcgtggacgatcaggtgtacacatggaaggggctgcgcatcatggggctggggggctgtcagcgctataataaagaggatacctaccagtacaccgagaaagccatgcgccgccgtgtgcacaagctgaagcatcaggcgcacaaaaggggcggcatcgacctgctgctgacccacgccccggccaagggactgaacgatggggacgactgtgcccacaggggctttgagtgcttcaacgagattttggacgagtaccagcctaaatggttcatccacgggcacgtacacctgaattacgatgcaaagctgccccgggtatgcacccgcggcaacaccaccgtcatcaacgccaccgagcgctatgtgttcgagatcccggacccggacccggccgaagagcgtaagactctttggcggatgctggggttctgagccgctgcctatgtaaaaaagacaccgcacagctgtgcggtgtctttttttgttgatggagccttatgcgggaatagcgggcgcggcagcagtgcggtgctgcctgtgaccctgtgaaaaattacagttccagcttgccggagaacttattgatgacgtagtaggctgcgccttcttcgggcttgacgtacaccttgcaggactgtacgccgaccttgtgggtggtgcggtagtctgccttggcgcggtcaatgatgtcggtgatgttgtactgctcaccgcccatctctacatacagctcgggggccagcggcgggcggccgcggcgggcgggagccttggtggatttgcgggtcttgccctcggcagccggagcatcggctgcgggagtagaaactttcttttcaggcatgatgcataaccttccttctgtatttgatctggtgcagcggggctgcaccggcgggctccaatgatctatcgtaaggcagaagcagtgcaaaaagcacagatccggctgccccatacgaaccggtacgaaactatttgcgtaaagaagttgaacctataattatataatatgtttttgaaattcatttgtaaagccttttttgcaaaaaacattgtaaaatcggtaagaaacggcggaataaatgatcaatgcagccttccggtgctttcaatttgtttagcaatcatgctttccagttcctgtgtgatcgttgcacagtttgcaacacggtaattccagaaataagaaacaccttcgcactcttccacagacaaatcgctgttgaccaaaagcaagctttctgatgttacgttcagcttttcgcacagagaagcatattttccataatcaatgcttcggctggaggatttggcttctacccagaaaaattttccattgatggagaacacgacatccagctcatgcgtgctccctacggatgccgtttctgaaagaaccacattggagcaaaccgaaacttctgcgccctgctcctcccgatagcggttcaggatctgctgaacctgatgctctacaaaaagctccagccactttccgctcaaaaaatgccggacggtttcattttgcgcaagttcatagacgatattctgcggataaatcacaatggctgcaaaaagccccattttgtcccacgtctgagcaatctctgaaagtgtggtgaacgattttttggacgcaccctttgggatacggaacgaaaaagagccgtcgctctgcatatgtgttcggataaactgcaagaaatccaccaccaccgggtcgcaaagagcctcgcctgttttccatgccatccgctgaacagcaatcggtgggagtttttccggtacgacctgctgaacgattttatacccacaacgttccagatgctccaatgcggtcaaaggcttctggatttttgctttgacttcgggcttttctgcgccggatgtattctcggccagatagttgaacttccatccgtattcccaagcaggcgaacgggtcagtactccgaccgcatgaaatccgcggtcatgctcttccatcggaaaagtgatcttgttcttatgaacattgatttggatcgttttgttttttagtgctttctgataagcggcaagaaaaaattcctttcccttatacgccagctcactggaattatttgcagaaagaccagcattttttgccaaagagaggagcagacaggtcgctttgggcagctcaaggatctgttccatctgcgcagcatccggaatatttgcattatcggactgcgacgattcgtctgccggaatctcctttgctggtgcaggtgcagaaacctcgggcgtcttttttgaagcagtctcagactttccagatttgggcaaaggctttggctccgtgtaaacttccgcaatgaatgattcataggaatcgatgcacagaagttttccagccgttgcaagtcctacatagatcgcagccgcccgcgaggaatcgccataatattttttagaatccgctgcggcagcaatatcagaaaaggcattatatctgctcagctgcgcagccttttccgggaactgcttcaacgcacggcagtagagccactcaaaaaatgaatccgggtacggctctgccggatactcatttccttccagagagtagcgcagcaactttccattggttcgcagtcgagtgtccttatggactttggatggcgcacaggtcagaaggtcagcgaatggcccaccatgttcaaataccttggcggcttcaaaaaccgtgctgatgggcacatcctgtgcaacagaatccagacgcagcagaagccgcagagaagaaacagcctcaccctccggctgaacggatgcagagctgatttccagaatggaaacatccgggtctgttgtatggacggcatcatggacggcacggatattctgccgcttgctaccttttatccatgtgaatgtcaccggctgttctttgcaataggggtagccggatatgggaaaacaaatggttcgtgtagccatgagcacctccaactttttagggcaaacaggtttgtgtaaatcaagtatagcacaatcccggatgtgctgcatagcactattttctgcttccaggaatccatctgtgcaaaaagtgccgataccacaagcatcggcactcagatcaaaaaagcgttttgcaaaaatgcgcagcctgcatccaccggatgcagaacacaaggggtttgggcacagcccaacaagcattttgaatttggattttgaaaaatccgattcaaaaatcgcaagttggtaccaagttgcactgcttgcgacgtagatgtttccatcaacgactgcgttagaatttttaaatcacttcagctttgcgaggatatcgtctgcgctcacgccgcttgccagcagctttttcagcacgtcctcggcttcagctttctttgcagattccgctgctttggtttccgccttgacctttttagcttcgattctggcgatttccttgtcgatagatttcagctctgccttcttggttttcaggtcagctttcagcgcatcgatgttcgcagtgatggatgcgatttcagcggcagcggcttcctttgcggactgcttttcggcaatctgcgcagcaaagtcaacggttgcttttacggtcttgatcttgttcttgcttcctttgggacggggcataggggacacctccaatgttttttgatggtttcagtataacacgcgttttttgtgttcgcaagaggtgcattttgtagaaataaaaatatatctatgagtgaagcaataaatcgattttggaatatgcactggcgtgggtcgctaactagttgaggaatatcccctgctggtcgtagagttgttcaaagcatttggcaacggcatctttatacagtcgtgatgaagttcacctcactatgatgttacagaaatccgtgcagctatgcatacgcatctgcgtatgctgcaaaagtattttatgatacagagaatgtgcagccgcgtaatggcaaagaatatatttaataaaaaaagtatcctccatagtgataatggaggataccaatctttcgacatcgttgtttgaattcttctcttattttatcatggttatatctgggaatcaatagaaatccttacaaatgcatcccgcctgaccttagaaaaaaactcgcagaagctaaaagttttttgcacattgcccagttctgcataaaaaatccagcaaaaaacgaaggtggacagaataagtggtcagaagggtgtccaagacgcaggaggaaacagaaatggcacgacggggagaaaacattcacaaacgcaaggatggccggtgggaaggccgctacatcaaagcgcgtacaccggagggaaaaatccagtggggctacgtctatggcatggtctatgctgaggtcaaacgtgtgctgattcaaaagaaagcagaggcaggcttctacaatctaaagagaaccgacctgacctttgaagcactggctgaggtatggctgcactcccagcggaatgcagtaaaagaatccacctatgcgcattactcgtacacgctgcacaaatatcttcttccggttttgagtaaagtgccagtcgcatcccttgaggaaagctttctggaacaggctatgcagcagatcattgcgccgatagatgccgcgcacaagccgctggggaactcctctgcccgggaatgtctctcgatgctgcggcgcatctgcaaatatgccgcgcacttgcgcctgatccgcccgatggagttggaagtagcgttgcccaaagccatcgaccaaatttctgcgcctctctccccggcggagcagcagcggctttatcagtatgtacaggagaaccccacgccccgcaaaattggcttattattaggggtggaattggggctgcgtattggcgagatctgcggcttacagtggggcgatttcgacctgaaacttggcacgttgaagatcaaccggacggtctgccgaatttcctgtgaaaatgggcatacaaaggtggtcatccaaacgcctaaaacccgcacctcccgccgggaaattccaatcccgaagcagctgcttattatgctgaaaaagctgcgcggatgtgtcagcaatgctgcatggtttctgtccggcaacgagtccaagcccaccgaaccccgctgctatcgaaaaagcatcaaatcatatctgaaacaggcaactgtccggcaggtacgtccgcacgcgctgcgccatacctttgcaacgacctgtctgcaggcggggtgcgatgtaaagaccctcagcgaattgttaggacacgctaacgccaatatcaccttgcaacgctatgtgcactctgacctgacccgaaagcgccgggagatgaaccgaattttctcccatcaggtgtccatgaggggcaggaacacgccaaatatgacgtagtggcgcatgatttcttcgccgtatcctccattatcactgtggaggatacccctttatgcgggaaggggtgaacaaggtggcattatgtctgtttgagcacaatgaaaaagcatatcatgcggcagtccggatgatggagcagtatggcaaggctgccattgttcatcccaccggcactggaaagagctatattgcgttcaagctgatcgaggacaacccagagaaggtcgtaatctggctttctcccagtgaatatatctttaagacccagctggagagcctgaaaaggaacgacccggattttccgttggcaaacgttcacttttatacctatgccaaactgatgtgctgcacgcaggcgcagctggacgaaatagcagcgcagaagcctgcctatattatactcgatgaattccaccgtgccggtgctgaatgttggggcgaaagcacggtggctttattaaagttatgcccggatgcaaagcttctggggctgacggcaacaaacatccgatatctggataataaccgtgacatggctgaagagctttttgatagccgtgttgcgagcaacatgacccttggcgaagcagtcgtcaggggtattttgcctgccccgaaatatgtgaccacggtctaccagtaccagaaagcgcttgcaaagtatcaggtacgagtggataacctgcgggcaccgggcattcaggatgtgaatcagaaatatctggacgcgctgcgccgcgcactagagcaggcagacggcctggataaagtatttgcccatcatatcacaaataagtccggtaagtacatcgtgttctgcgccaataaggagcacatggacgagatggtgtcccatgtgccggagtggttcgcaggggtcaacccggacgttgtggtatacgaagcctactcggatgacccgaacactgacaaagcctttgcggacttcaagacggatacgaccaaccggctgaagctgctgttctgcatcgatatgctcaacgagggcgtccatgtggaaggcatttccggggtcatcctgttccgacctaccatttctcccatcatctacaagcagcaaatcggacgtgctctgaccgccggggacaccgcagccccgctgattctcgatgtggtcaacaattttgagggactgaccagcatttccggtctgcaaagcgagatgcaggaggcagtccatcgtctgtatgtcaacggtgagggcgataagatcgtgaccgagcggtttgaggttatcgagcaggtgcacgactgccgggtgctgttcgagcagctgcaggcgagcctttcttccggctgggagcactacttctctgaggcgagcatctactatgcggaacacagcaacctgaacgtcccgaaactgtatacgacgcccggtggtctgagccttggtgtgtggctggtgacccagcgccgggtgcgcgaggggcagatccaaggcaatctgaccgagcagcagatcgcgcggctggacagcatcgggatggtctggggcaaccggaaggaaatcgcgtggcagcatggatttgaagtcgcaaagaaataccacgacacctacggaaacctgatggtgcccggaaaatatgtagactcagacggctacccactgggacagtggatcatcaagacccggcagcagaagctgaatggacgcttgaaggaagagcgcatcgcgcagcttgatgagcttggtatggtgtggaacattttcgatgccaagtgggaaaaggcttatgcgctggccgctgcctattacgaggagaatggcaatctgaacattccgcgttcctatgtgacagcggctggtgaacggctggggcaatgggtcgcaagtcagcaatgggcgtacccgaaaggaaagctgacggacgaacaggtcgaacggctcaaccgtatcggaatgtactggggcaaccgcaatgaccgccagtggaacgaaggatatcaggaagcgaagcgctactttgatgcctacggcgacctgaacgtcccggcagaatatgtgtcgccgggcggttacaacctcggaaattgggtcaagcggcagaggtacacccgccagaatcctgaaaaaagctgcgctgttctgacagaggagcggattgcaaagctggatgcaatcgggatgcggtgggagaaagcggattcgagaccgcgccggttggagttggcacaaggacctcatagggaaagcgaaaaactgaatgtttcggctaaccacaaaacgggggaagatatcggtttgtgtagttaataacgcgacccaaaacagttgctgtaatctgggtcgtaaaaagaaaatctaaaggagttattggagaggattatgtcaaagtttcagcatgatgtgatgttgagggtcgtgaagatcctgaatgttctgatgattgagttgccgtttgcggcttgctggttcctgtactactcgcaccagacctatgcaaatctggcatgggagggtcattttgcgattttaggcctgttttttatcctgtacattgtactcggtaaaatctacgatgcgttctggatgtcgatgcagcgggtctcagagcttgtgtatggccagatccttggcgcgatggcaaccgatggtattttgtacatcgtgatctgcctgatgtccgcaaagctctgcaacctgttgccgggtattgcggcaattgtgggacagctggtgatggccgcgatctgggcatcctgcgcacataaatggtactacaagaccttcccgccgcagaagactgcagtggtctacgatgtgcgtcatggtatggaaaagctcatcaacgagtatggcctgagccagaaatacgatgtgcaggtcaccttgagcgtgtcggagtgcttggcagacctgagcattctggacggcatggagactgtttttgtcagtggtgttcacagccatgaacgaaacattatcctgaagcactgcgtagggaagggcatcaatatgttcgtcattccccgcgttggcgacgttattatgagtggcgcttggccgatgcatatgttccatctgccgatgctgcgtgtcggtcgttacatggcaagcccggagttcctgttcgttaagcgcgcgatggacattgcgatctcgctgctggcactgatcatcctgagcccgctgttcctgattacggccattgcagtcaagtccgatggtggtcccgccttctacaagcaggtgcgcctgaccaaggacggcaagcagtttgagattttgaagttccgctccatgcgtgtggatgcagaaaaggatggcgtagcacgtctttccaccggcgacaaggatgaccgtattacaaaggtcggtcacattatccgtgcctgccgtctggacgaactgcctcagttgctgaacatcctgaagggtgatctgtccgttgttggtccccgcccggagcgcccggagattgccgcacagtactgcgaggagatgccggagtttgcgctgcgcctgcaggcaaaggctggtttgaccggttatgcacaggtgtatggcaagtataacaccaccccctacgataagctgcagatggatctgatgtacattgcccatcccagcctgatcgaggatttgaaaatcatgctggcgaccgtgaagatcctgtttatgcctgaaagcacggaaggtgtggcagagggggcgactacggcgatggggcaggagacgaagtgatgcagaattacagcgttttaatgtctgtttatcacaaagaaaaaccggaatatttgagacaggcaatagagagcatacaagcgcagacgctctccacaaatgatttcgtgctggtatgtgatggacctctgaacgaaccattggatagcgtaatcgcagcgaagcaacaggagatgggtgaatctctgaatgttgtccgcctcgcgaagaacggtggacttggcaacgcactcaatgaaggcatcaagcattgcaaaaatgagctggttgcccggatggacagcgatgacatcgcttatccggatcgatgtgaaaaacagatcgctgtgtttaacacacattcggaggtgagtatttgctccggtatcgtggaggagtttactactgatccgcacacagtcgatacaaggcgtgtgccgcccgagacaaatgcggaaatcgtagagtttgcaaagaagcgcaatccgtttaatcacccctgcgtgatgtataagaaatccgcagtcgaggcagttggctcctatcaggatttctatcttctggaggattattacctctggcttcgaatgctgatggcaggatatcagggttacaacattcaagagccgctgctccatatgagagctggctcggatatgtatttaagaagagccggttggaaatacgccaagacgcaggccaagttgttcaaatttatgaaacagcaaggctttattggagaaggacagtacataaagagctgcgtgattcgcagcgggtcggcgctggctcccaactggctgcggaagtttatgtttgagagggtattaagggatgcaggctaagacagaaaaccgaaatcaatttgtggatgtcatgcgtggcatagcgatgcttctggttgttctgcaacatacaatgagtggatgtacggtcggagcagaaaacacatttgtgtttaatattgcatggtccttgcagatgccgttgtttattttaatcagcggatatgtaacgaaatatagccgccccatctctaacagcaagggactgtggaaatatgtgaaacgcagaacggttgcgtatatgctgccgtgggctgtatggagctttttggttagaggcatcatctttggagaggatggtttcttaaacgttaagcatctcctgtggaatatggattcaggttattggttccttgcaacgatttggacgattagcatgatttttggcattgcctctttcattgcagagcgggcgagcaaagaaaatctgctgaagaaacagattgtacttctggggtgctacttggcaggaatggttctgctggttggaattggcgtgattttaggactttcgttctttgcaatcaaattgacgctctattatatgcctttctactatgcagggttcttgtatggtcagtttgatgacaggatgaaggaatctgagattggcaaaaagattattgatagtgtagttgcaatctgctttgtagtgtggctgttcgttattcttagatttccgctttatgagatgtcggatggcggctttgcgattatcttgcgtgcggcaacatcgttggctggatgtattgcagtatgtggtctctgtaggggaatcttctccagtaaaatcgggggggggtactcttgcatgggtcggagagcacttgttggaagtgtatctcacgcactatctgcttctcagcttgatcaagtcggacaaagtgccgattctgtacagtccggtggggctgggcctggttctggtcaactatgtgattacggtagcacttactgtgatggcaatagtgatgatgaacccaaatgccgtgctgagctttgtattaaccggaaagaaaaagtaagggagtttttcctttgggcaggaaaacaaagcttagaaatttacatgatgcacggtctgcttctcaatatcttcaaaagcagtgttgcaatccaatttagcagtattgaagggtatttactgactgccggaaacttcgccctgacagtagggctgtgtgcagtagttatccgtctgctcgatcaaaatgccgtactcaagaaagtattaaatattcgataaaagttcaaaggagaaacgatatgcatccgagagtgctgatcgtaggaacggttccatataacacaaaatcaacgtcacgcgcttttgatgcgtactttcactattgggagaaagagaatattgcacagatattctctaatacaaagaagccgtgcaaggggcattgcgaaacgcttttccaaattacggatcaccgtgtgttgcagcggtggatggggaagaaagtcgatactggcgtaatttatcattatgatgagcttgacaccgagtggaaagacaatgatttggaactcggaaatgcaaaagcagaagctgcctacaagttcggtggaaagcatacgcctcttacacatttgctcaggggaatcctctggcgtaagagattctggtgcacggagaagctaaataattggctagatgacttcaaaccagaatgcgtgtttctggctttttcggatgactattttatcccgcagattgcaatgtatgtcgccaagagatataacgtgccaattgtctcctgcattggcgatgactattatttcaatgtggaaaaaacgcttaatccgatctatcacctttataaatcgacctacaaaaaattgattgacaaggttctggcttggccgggtagtgcaatttacatcagcgacaagattcgggataagtataattcggaatttggactggacggcgaaacggtttatttgacttctacggttcagcgtaaaccgttcagcgtgattaacaaagattgcccggttattacttacttcggaaatatcggtatgggacgcaacaactccctgaacgatattggctacgccctagggaaaatcaatccagaatatatgctggaggtttattccaacgaaaaggacgagcaggtctattctgtattcaaggacaataaaaatgtcaaatatatgggttctgtgccgtacacgcaggttcaaaagcgtatggcagaaagcgacataactgttattgtagagggatttgaggaaaaggacatcaacctttcacggtattcactctctacgaaggcagcggacgcattggcgagtggtgcatccattctaacatatggctcgctagaaagcggcatcattgagtatatgcagtcaacggatgcggcaatggtttgtacggataaagctaaattggtggattcgattacacagctgatttctaatcaggaaattcaaaagaaatactacgaacaggcgattgtgatgacaagagagcatcataatctgcaggctagctgcaagacctcagaaaatgtggttgcaaaggcaatccaacatatgaaataagtggcagaggatacatggtgatggagaataacttttcaattattatttcgacgtgcgacaagttttcggatttgtgggatgcacatgttttgcttttgaatcagaattgggcagaccgaaacgtggagacgtttttagtaaccgataaacccactgatcgtacttttgaaaatgtaacagtggtggcagcaggcgaaggcacggaaataacggaacgtctgagagcagtgatgccgctgattaagacagagtatgttctctttaccttggatgactatttcctgacggaaaggatttcgactcaggcggtcaacgaagatattcagatcatggaaaagcatcagattgattatctgcgtctgtttgttatgaccatgaagagcctgagaaacagaaaagctgaggaactcgaaccggatatttttctgctggacaattatgcaggtgactacattgtcagtctgtatgcaggcatctggcgtaaggattttatggaaaaaacgctgacgaaaacgctgaatgcctggcagtatgaggttgcgttgacgaatatggcacgacagctgaatgcccgttgcgcagatagccgacgcggggaattccctattcttgacgtgattcgtaagggaaaggtgctgacgaaggcacgcaagtatttcgatgagaatcctatttataaaggtgaccgagaggatatgcgagctaaagatgaatggatgcttgaattccggacatggctgcgtgagtggcttccgaagccgctgttcaatctctcaaaggcaatcatgaggcgtagaggatataagttctttagtgataatcagtgaggagtacgagtgatgcgtattgtgcagatcaatggtggagcgaaaggtagcaccggaaaaatcatgatggggattgccgatgtagcaagagcgcagggacacgaggtgatgtgcgcatcgcctatcaccacaacaaatcgtgatgcgggtgaggattgcggctattaccgaatcggaacattcaatagtcgccgagtaaatgtcgctcttgctcgaattacaggttttaatggttgcttcgcatggttcgagacgtataagcttttgaagaagatagatgaatttaagcccgatatcattcattttcataatttgcacgattcatatatcaatttaccgatgctcttttcatatataaaaaaacataatgtcccgacagtatggacattgcatgattgctggtcattcactgggcaatgcccgtactttactatagtaaggtgcgacaagtggaagactggttgtcataattgcccacagtataaggaatatcctgcctcgttttacgataatacgaaaagaatgtggaagctgaagaaaaaatggtttaccggcattgggaatatgacaattgtaacaccgtcaaagtggttggcggaactggcaaaggaatcgtatttgaaagagtatccaattgaagtaataaataacggaatcgatttggacgtttttaagccaactccgagcaattttagagaacgctatgggataccggcagaaacacacattgttttgggagtttcttttgcatgggggtatcgtaagggactggactgttttgttgaaatggcggaaaaattaggtgagcaatatcaaattgtccttgtcggtacagatgatgagattgacaagaatctgccgcaaaatattatttcaattcatcgaacacaaaatcaaaaagaacttgccgagatttatagcgcagcggatgtgtttgcaatgccgacaagagaggaaaactatccaacagtcaatatggaagctattgcgtgtggaactccggttgtgacttttgatacaggtggaagtccggagatgttaaatgaaaaggttggcagggttgttcctgtggatgatgtcaataaaatgatgagtgaaattggaaaaatatgtgaaaacatgaggctgagctcggaggcgtttagaagcaaggcgaaagagtatattatggaagataggtttctcgagtatatagatctttataaatcaatgcactcagaaaatgatggtagaggttaataaatggatatatattttgcccttatcggcatggttttaattctaccggttgcttgttgtgggataagaaacctggaaaaaagaaaaaatgcaattctaataatatctattctgtgtctgtttcttctaactgcgttaaaggctccaagtgtgggtaaggatattgcgggatataaacgtgtgtatgattccatgaaatatcagacatgggataattacgatactacatggatggagtggggatacgagtttttgatgatggcgtttacgcacatcttcaaggcatcgtttcaaacattcatggtctgcgtttatggatttgtgtattattcatattacagatttattaagagatactctcaagattatacgacatctgtaatcctttatatatgctttacttttttgacttttgacatgtcggctgttaggacggttataggcgttgcaatatgcttatatgctatcccatatgcagagaaacctggaatcaaaaacttcttgaagttctttttgattgttattattgcagcacaaattcataagtctgcatatatttttgttgctgcttactttataattaaaatccatttttctgttaaatcatcggtattctatattggcggttccatggcattgttactgcttaagagccaattctatgggttcattaacacctatctgaaaagtgtacaggaatcaagaacatcgttgggtggaaatttgctcatatacatcatgagtgttgtgctaacaatatatgtttggatttattataaaaaaacacataaaagttactctgaaatgacagaagacgattcacgctccagtgcaatggctactgatttttcggatagtggtttggcgatgcgaatgatttatgtcggaattgtcttacagctttttggcgcaggcacagtgttgacacgcatggcgcaatacttccaagttttcatcttgattttgatacccaataacataatgagattagaccaaaaatcaagaatgatggttaggatgattctatacagcctggcaattgtatatttcataaagtttacattaattccagacccgctggatattgtgccatataagttgttttggaaagtgtaacatgcaatgctaaagaactgcacagtagtagaaaagatatcataatttggtaggattgaaaataagctcagaagtcaatgaactgaattttattagtgatttgactcgacttcaagtctaacgattaaatatatagatccatcgaatctatatggatgtgtatcatgaaactgctgatgtgtttttgaacatgaaaaatgagttgaagagaattagtcgaagagaacagacgaaagctgttcttcaagtataaacactatttgttgaaataacaggaggaaaacaaaaatgtctgcatttgataacgcaacccttatgatcactggtggtactggttcttttggctctaccgttctgaagcacttcttggattccgacctgaaggagatccgtatcttctcccgtgacgaaaagaagcaggatgacatgcgccatgagcttcaggccaagcatcctgacactgccaagaaagtcaagttctacatcggtgatgtccgcaatccccagtccatccgtgacgctatgcctggtgttgactacatcttccacgctgccgctctgaagcaggttccctcctgcgagttcttccccatgcaggccgttcagaccaacatcatcggcactgataatgtgctgcacgccgccatcgacgctggcgtcaagcgtgttgtctgcctgtccaccgataaggcggcttaccccatcaacgccatgggcatctccaaagctatgatggagcacgtcatctacgccaatgcccgtgtagctgctgagcgtggtggcactaccatctgctgcactcgttacggcaacgttatgtgcagccgtggttccgttatccctctgttcatcgaccagatcaaggctggtaaccccatcaccatcactgaccccaacatgacccgcttcctgatgaatctggacgaggctgtggatctggtcttgttcgccttccaacatgcaaatcccggtgatttgttcatccagaagtctgatgcttccaccatcggcgatctggctaaggctgtccagcagctcttcggcgataccggcaccaacatcatcggaactcgtcacggcgagaagctgtttgagaccctgatgacccgtgaggagcgtctgcgcagccaggatatgggtcattacttccgtgttgccgctgacaatcgtgacctgaactacgataagttcgtggtcaagggcgaggtacataccatggcagacgagtcctacaccagccacaacacagagcgtctggatgttgagggcactgtgaagaagattctgaccactgaatatgtccagaatgcactgaagggcatcccgaatgtctaaggaaaagctgctgctggttggtgcaggcggcttcggacgcatggttgcagaacaggcaatgctccaatacgactgtgctttcgtagacgatggacaacccgtaggcactgagatctgtggtattccggtgcttggcagccttgctaatctgccggagctgcggaaagagtatggcttgctggtggtgggcatcggcaacaacaagtttcgggcacaggtgtatgagaacgcaaaagcccttggctatgggttccccaatatcgttgcccccagtgcctacatcagtccatacgccaagttgggatgtggttgtgtggtgctgcaaaacgcctgtgtccagaacggtgcatctgtgggaaacggtgttttgctgaatgccggaacggaaatccactgtgatgcaacggtaggggactacgccctgatttacaccaacagcgtcattcgcacgggttcgactgtgggcgactttgctcgcatcggtagcaactgcaccagctgcaacaatgtaaccgtgccagatagcgcagatattccggactgcaccgcagtacactaagaggtgagagaatgaacattctagtcacaggtgccaagggcatggtaggaaccgccctgtgcaacaacctgaaaaacattcgggatgggaaaaacaagactcgcccggcactggatattaaggaaatctacgagtacgatctgaactcaaccccggcggagctggacgagtactgccagaaagcagacttcgtattcaatctggcaggcgtgaatcgcccggagaacccggaagacttcatgaagggaaacttcggctttgcatctgatctgctgaactgcctgaaaaagcacaacaacaaggcaaccatcatgctgtcttcttccattcaagccacgctggcaggccgcttcggcaacagcgagtacggacgtagcaagaaggctggcgaggaactattcttccagtatgctcaggagactggggctaaggttgccgtctaccgttttgtgaacctgatgggccacagccgccccaagtacaatagtgccgtcagcaccttctgctgggcagtggcaaacgatgagccctttaccgtcaacgaccgcagcaccgagttggaactgctatacattgacgatctggtagaaggtatgtttgatctgctggaaggcaaggagcagcactgtgaattcgatggcgtagaaacggttctgaaagcagacgggcgctactgctgcgtccctgtgacacacaaggtaacactgggcgagatcgtagatctgctgcaggagttcaaggtacagccgactacgctcatgatgccgaaaatgccggacggctcctttgctaagaagctgtattccctgtatctgacctatctgcccaccgacaagttcaagtacgccctgaagatgaacgtggacaaccgtggttctttcacggaactggtgcataccgccgattgcggtcaggtgtccatcaatatcagccgcccgggcatcaccaaggggcagcactggcacaactccaagtgggagctgttcatcgtggtggcaggtcacggcctgattcaggaacgtaacatcaacaccggggaaacggtagagtttgaggtttccggagacaagatcgaggctgtccacatgattcccggctggactcacaacatcatcaatctgtccgaaacggaaaatctggtgacggtgatgacctgcaacgagattttcaacccgaaccacccagacaccttcttcgagccggtgtaagagaaaatactggttgtcaataggagatttttatggaacacaattttaaatggaaaaatgatgggcgtactaaggtcatgatcggctgcggtacccgtccggagatcatccgactggctgcggttatcaagcgctgccgggaatattttgactgctgcgtggtctactacaaccagaactgggacagaaacctttccaccgtgttctgggaggatttcgaactgaagaacaccttcggggaatatggcccggacattcttgtgcctgtggttggcgagaatctgggtgtgacttgcggtaacattctgggacgcagctatgagctgctcagcgaattgcagccggagggctatctggtgctgggcgataccaactcctgcctgtctgccatctctgcgaagcggctacacatccccctgtttcacatggaggctggcaaccgctgcaaggatgagtgcctgcccgaggaaaccaaccgtcgcatcgtggatgtgatctctgacgtgaatatgtgctattccgagttcgcccggaagtatctggcagatactggcctacccaaggagcgcacctaccagaccggctctcccatggcggaggtgctgcacatgaatctggagaaaattcagaaaagcgatgtgctggagcgtctggggctagagaaggataagtacattctactgtccgcccaccgggaggagaacatcgactccgaaaagaacttcctgagcctgtttaccgctatcaacgctctggcagaaaagtacgatatgcccatcctgtactcctgccatccccgcagcaagcaccgtctggaaaagagcggcttccagctggatcctcgtgttcgcgtcaatgagccgctgggcttcaacgactataacaagctgcaaatgaacgctctggcaatcgtctccgattctggcacgctgccggaggagagcagcttctatctgtccattggtcatcccatcgccgctgtgtgcatccgtacctccaccgagcgcccggaggctctggaagccggtgacttcatcttggctggcattaccacccgggaactgctcaacgccaccgatatggcaatcgagatgaagcagaagggcgttctgggtaagccctgccccgactacgtggacgagaccgtgtccatgaaggtggttcgcatcattcagggctatgtaaacgtcgttaataagatggtgtggagaaagtactgattctccacagcagccatgtgttcagccacatggctgtgctgctcaagtatgctacctctccgtggtgagcagcaggcaacggattttccggagctaaattatacaagatcggtgttgtgaagtcgacatatggatgaataatgtctttaaatagcgatgatagataagaggaaaccgaaatgcaggataatatatgcgttagcataatttgcaatacttataaccacgaaaagtatattgcgcatgcgctagagagttttttgatgcaaaaaacagatttttcctttgaaatactagttcatgatgacgcatcaacggattctacacctgatattatcagagcctatgtggaaaaatatccgaatataattaagccgattttacagacagaaaaccaaacgactaaaggtgtgtatgtaacgcaagcttttcagttttctcgtgcaaaaggaaagtatattgctttctgtgagggagatgattattggatagattctaataagctgcaatttcaggttgattggctggagcaacatccgcaagatatcggctgtgtccataaatatatagttgttgatgaagatgaaaatattcagaatataaaaacttttggatattacgaaaaagaagaacgttatacattgaaagactttgaagaaaaagaacttcctagccaacttgcaagtctcgtttgtcggaatatttttagaaatcagggagagagctatccggagagcttcaatgcagtagatattcagggagatataaaaatctatttatatttattggcacatggttccatatatcgacttcctcagacatattctgcatataggtttgtacgcaaagtaggaggaaattcatggtcatcgaggaatattggagctagaaaagggtatcaaaactggatggcttatcaagaacttgaaaaggcattccgcaaggaatatggtatcgaggtttcactgaaaaaaagacgtgccgcaatggctgcagaggttgtaattgattgcttataccatcggaaaggggcgtcgtggagccatgcatgggaagtgattactaaacaggatgattgcctttctatggttgcgaaaatcgctataaataaaataaatcgaaagattaaaggaaaaatcgattagtatatgtcaaataaaaaagtaatagggaacttcctctggcgctttgcggaacgctgcggtgcccaacttgtaacctttatcgtatctattgtacttgcccgcattcttgcaccagaagactacggtcaaattgctttgattacggtctttaccaccatcatgcaagtgtttgttgatagtggcttaggtaccgcactaattcagaaaaaggatgctgatgatctggatttctcgtcagtgttctatttcaattttgtggtttgcttggttttgtacgccatcatgtttatggcggcgtcggtgattgccaacttctacaatgatttgtctctgactccaataatccgtgttattagcttgaccattgtaatttctggtgtaaaaggtattcagcaatcctatgtgtcgcgtaatatgctgttcaagcggtttttttacgcaacgctaggcggaacgattttttctgcgtttctgggcattggtttggcttacgcgggttttggtgtgtgggctattgtggcccagcaactatccaatacagccattgataccttgatattgtggctgacggttaaatggcgtccaaagaagatgttctcttgggaaagactaaaaggactgctttcctttggctggaaaatgctggcttcatcattgctggataccatctacacgaatattcgcagcctgattataggtaaattgtattcgtctgcggatttggcatactacaaccaaggcgataagttcccaagtgtgattgcaaacaatatcaatacgtccattgacagcgttcttctgccaacgatggcaggcgtgcaagatgacgctagtcgagtaaagtccatgacccgccgggctataaaaaccagcacctatattatggctccgttgatgatgggcttggcattctgtgcagagccgattgttcggttggtcttgacggataaatggctaccatgcgtcccgtttttacgcattttctgcattacttatatgttctatccaatccacacagcaaacctgaatgcaatcaaagcaatggggcgcagcgatttgtttttgaagcttgaaattgcgaagaagattgttggtatgacgttgctgctttctactatgtggtttggcgttatggcaatggcttatagcttgcttgtcagcagtgttacaagccaaatcatcaactcatggcccaatcggaaacttttgaattatcgatattgggatcagttgaaggatattctgccgagcattgctatagcaatctttatgggatgctgcgtgaatcttgttggcctgcttcacctgtcaaatgctgtcacgttactgattcagattccgatgggtgcggtaatttacattggagcatcggctgccttgcatctggaatcctatgaatatctgatgggcttgattcgccctgtcttgaaaaaaattgcaagaaagtaaaggcgataaaaatgaaaaaaatccttttattaggtggttctgcgcagcaagtagtagctattgaaactgcaaaaaggctcggttactacactgttctgtgcgatttcctgacggataaccccgggcagtatgtcgcagataagttctatcttgtaagtactacagataaggatgcagtacttgaggtagcgcagaaggaaaaagttaatggcgttttggcctatgcatctgaccccgctgcacccacagcagcttatgtgggtgaaaaattaaaactgccaacaaacccttattacgcggtagatatcctctgcaataaagatcgttttcgtgcatttttgcaagacaatggatttaatgcgccagtatctatgggatatcaaactattgaggatgcgatggcagatacttctcgatttcggttgccggtcatcgtcaagccggtagattcttctggctcaaaaggagctaccgtactgcatagctgggataaggtaaacgacgcattagaatttgctttttcattttctcgtgcccaccgagtgatcgttgaagaatatattgagaaaaaacatccatatcttatcggtggcgatatttttgttttaaatggaaaagtggttatatgggggcttcttaattgccatagagatacccgggtgaatccattagttcctgtcggaaaaagctatccgttgattctggaggaagccgatgtacaacttgttcaacaaacgctacaaagcatgatggacaagctggaaattcgatttggctcggtcaatgttgaattggttattgataagaacaaccgagtatggcctatcgatgttggaccgagagctggcggaaatatgataccagacttattggggaaaatttttggcgcagatttagttgaaatggcggtccaagccgcaatgggacaacctattttaactacagtacaaaagcccgagggctgttatgcaacgcataatttacacagtacaaagaatggaatatataagcagattgtatttagtgatgaattaaaaaaatatcttcaagaagtacatttctacaaaaagcccggagaccatgtggaacggtttgacaatgcggcaaaatgtcttggaattatctttatgaaatttcctgatgttgcaaccgctgaaaatattttatcccatatagaaaagcatattgatgttcaattaacgacggagtgaagctatgaaagaaattggcgggtatatagagcttgatacttatacaggtgcaatgctccacgaaaaagctattgccctgaattgcggaagaggagcgctggaatatctttgcgaagcgaagatgattcggaagttatatctgccgtattttctttgcgattctgtgccaaatctctgcaaaaaaataaatatcgaaaaggaatgcccggctgatagtctggaataccattacgcagcggatattcttcctattccgattgaccaacgatacggaaaagaagatatgaaaagaattgctgaaatggttaagaaaaccatgagtataaaagaggagtgaaagtttatgtctgataatatcttagtgacgcgttcatctatgccaagtctggatgagtacatagaagaaattcgccctatttggcaaagccattggctaacaaatatgggggcaaagcaccagcagttgcaggcagagttggaggaatatttgggtgtgccccatgtggctctttataccaatggccatctggctctggaaaatgctattgctgccctgaatctgccggagggcggtgaggttattaccacgccgtttaccttcgcttctaccactcatgcaattgttcgcaatggtcttgttccggtgttctgtgatgtgaacgataaagactataccatggatgtgacgaagatcgaaggtcttatcactgaccgcacagtggcgatcgttccggtacatgtatatggcaatatttgtgatgtggaagctattgaaacgattgcaaagaaatacggcctgaaggtgatctatgatgcagctcatgcctttgccgtgaagtataagggcatgtctactgcttgctttggcgatgcttctatgttcagcttccatgctactaaggtattcaacactatcgagggcggtgcagtctgctttaaggatgatagctgggttcagctattgaacgaccagaagaattttggtatccatggtcctgagtcggtttgctttgtaggcggtaatgccaagatgaacgaatttcaggcagctatgggcatctgcaatttgcggcatctggacgaggaaattgctaagcgcaagaaggtcgtggagcgttaccgtgagcgactttccggcgtggaaggtatcaaacttagtgcaattcaggaaaatgtagaaagcaactatgcatatttcccggtcgtgtttgatgggtataagtacacccgcaatgaaatctatgaaatgcttcaggagcagggcatcacggccagaaaatacttctatccgctgaccaacagctttgagtgctatcgaaattatccgaccgccggtaccgaaaaaacacctgttgcgcagcatctggcattgcgtgtgctgactctgcctttgtacgcggatctgtctctggaagatgtggaccgcatctgcaatgtcattattggaaagaaagcctaatgttataaatagttgcaagttttaaaatgtgtgatgttgcggaaagagaaataagcttagtcgctactattgaaatattccatggtcggtcaaagcttataaagttgtgtgacgataaaaacaaaataaattccatatggttttgcaaactaatctgtacagaagacggaatagagactataagttgcttgtatgatatttaagaggtactgtagaaatgaataaagtattgatgctaggaagcgattatggctcatgtgaaattataaatgagttgcataatagaggctgttgggtcatagttgctgattattatgaaacaacgcctgcaaaaagaattgctgacgaatcgtggcttataagcacgaatgactttgatacactagaaaaaagatgtagagataataatgtggcggccgtaattacaggtgctagcgactttaatggcggaaatctaagagttctgtgcaaaaggttaggactgccaatgtatagccagaatgattctgcatggtcagctgcgactaataaatatgtgtttaaggaactatgtaaaagcgttggtgctccagtggctgaagattatgatattgaagaatatctacaaaataaagaaaactataacataacttatccggttgtgattaagcctgttgatatgagcgctaatcgcggaatgagttattgctataatgaagccgatgttgaacatgcaatagaaagagcacattcattttcaaaaaatccacatttgattatggaacgcaagttggagggccctgagtttgctgtaaactatattatagctgacggtgaacccagactattcttttttagctcagaacatcatcaaccgggagagttggcaaatttgtattcgattatcacgacgacaaattatcatttaaggcagtatatttttgaagtcaacgataaggtgatagaggttttcaaaaaagcaaaactgacaaatggcgtggcgtgggttgaatgcatgcgtgacaaggattcccatttttatctgttggaaatgggatatagatttggcggagaagtagtaaacataccgtataaggatatttcaggatttgattcaataaattggatgatagattgcgagcttggcatcgaacataagacaacagatttgccggtggaaaaatataattatagtggctgtgcaacagcgtatatgttatttgcaacccattctggagtgatctccgagataaaaggaatagataaaatttcgactttgaatggtgttaaaatcgatattacaaaagaggttggaaaatcagtaaagcagtacatgacattgggtgtaataagaatttcttcagagtcttgtgaggaactttgcagtaaattgaggataatcaatagtaacttggaaattaaagaccaagacggcaaaaacttgctgctcaaatatgataactatggtgaattgttagaggaatacgatagcggattaaaggaaatgcagtaaggggtatagctggatgcaatttataaataaagtggttgatcatttatatgcaatgggtgggcttgaaggaaatgcaacagactacccggttatgttgtgcgtctatttgggaatatttgttatatgcgcaattgctagtgttacgttatgtttgtcgagacatggagaaagaatcatttgggtaccagatcagcataaagtgataaaaagcaagtttagttatatggctatgcttgcttgtacatttacaggcgtatatctggtgggatcttttccttcagaattgcagaacacatatggaacttggaacgcagacctgttttacaccgttgggcagacctcgttaatgttaatagctggtatatatagcttggcaacatataaagagcggagaagcacagtccttaatattttgtcaattattatcggactcagtacgtcaattcctatggctgcaactgctattttagcaccattaagccttgaaggaattaaaagagtggctttaattattgctgtgattggattgatcgtggttttggcgaccatttcaataaaaaataatctattggtgcgatattcgagaattaatatatggatgtttatcattacatcaatagcgttgtttaccacgattacgacatttgataacagtatggtagatgccagcaagatacttccttttcaaggtatgttgaatgcagagccatggaaagaatggctgacgaatccgtattggtggtattttgaagcaacagttgtttcgtggtctgtcttttgtggtcgtttcgtagcatactgtagcaatggctattcagtaaaatccgttattaagtatggcacattttcattgattgagttaacggttatttggcatatcgtttcagcagcaacgggctatacactttctttttcgcgaggtctcgctatttatgtgttgacagcattaacgatgctcgcatttgctgtgacttcgctggattcggcaacaaaaacactagttaatgattcggtaaggttgcttgaagaaagaaaaacaaagaacgataagattgatgagaaacaagtatctaacacagttacgtatgcgaccatgactgttatagggatattgaatattattcttcttgttacaggcttcccaaggctttttactattctgctatgcctgctatttgtcccattctttattagagctatgaaatatgcatttggcttcgcatttggtatgatagattattcgaattcaggaacagtgacgaaggaagaatacgaatctgttactcatgagaaagcaatgtgaatccggatacgagaatctatcactgaaagatgtggagcgcatctgtgatagaaaagctgacaagaaagattttttgagaggtttggaaatggacgaaattgcggtaaaggccaataaattcggggggggggaagaagttctaacattgaactttttcgtatcctttcgatgctgatgattgtggcgcatcactatgttgtgaattctggattgattgactgtattgatacataagttagcctgcattttcaggattactttctgctgctgtttggctggggcggcaagacaggtattaattgctttgtgctgataacgggatactttatgtgtacctcggagattacaaagaagaaattctttaagctgctgggagaaaggtacttttacgcagtgacaatctggtgtcttttctttttcaccggctatgaggcgttttccgtcaagggattcatgaaaatggtatttccgttttttacagtagcagataattttaccggttgctttctgctattctatctgttgattccgttcctaaacaagttgattcatgcactgacagagaaggaacacctcttgctgatggcatggtgcataggcgtttatgctttcctgccttcctttgcaaaagcgaatgtagtgttcaattatgtcacatggtttagcgtcctctatgtgatagcgtcgtatattcgtctgtatcccaaaaaatggtttagcaacgtaaccgtcactggtttgatagctggggtatctttgctgctttcatgggtaagcattattgttctggctatgtttagtcgcatggttggaaaaggaataggactctgttactttttcgtggcagattctaataaagtattcgcattgatgactggtgttagtgcgttccttttcttcaagaacttgagaattggatatagtaggggaattaatactatcgcagcagcaacatttggcgttctttgtatccatgctaatagcgatactatgcgtcgctggttatgggtggatgtttgcaataatgttggggcatatcaaggaggcaatgtgataatccatgccgtcgtttcagtggcggcaatttataccgtgtgtacgataattgatatggttcggattcggttgattgaacaaccattaatcagacggaactaaaacctatcggccatgcaccagcatggctgtgctgcttaagtgtgctacctctccgtggtgagcagcaggcaacggataactatccggctaaaggcacatttctattcgtcaattcactctttgaatgaggaaaaactataatgggaaaatattttgggactgatggcttccgtggtgaagctggtattgatctgactgccgaccacgcctacaaggttggccgcttcctcggctggtactacaacgccctgcgcgagcgtaacggcaacaacgagcctgcccgcatcgtcatcggtaaggacactcgccgcagctcctatatgttcgagtatagcttggttgctggtctgactgcttccggcgcagacgcctatctgctgcacgtcactactacgcccagtgtggcctacatcgcccgcgtggacgacttcgactgtggcatcatgatttctgccagccataatccctactacgataacggcatcaaactgatcgactgctatggcgagaaaatgcccgaggaaatcctgttgctggtagaggactacatcgacggaaagctccatgtgttcgacaaggactggccggagctgccctttgctcaccgtgagcacattggctgcactgtggactatgtttctggtcgtaaccgctacatgggctatctgatcagccttggtatctactccttcaagggcgtcaaggttggtctggactgcgccaacggtagttcctggaacatcgctaagtctgtgttcgatgcgctgggtgctgacacctacgtcatcaatgcacagcccaacggtacgaatatcaataacaatgctggatctactcacattgagggcttgcagaagttcgtggtagagaagggtctggatgttggtttcgcctatgacggcgatgctgatcgttgcctgtgtgtggatgaaaagggtaatgtgatcactggcgaccatatcctgtacatctacggctgctacatgaaggagcgcggcaagctgctgaccaataccgtcgttaccacggtcatgtccaacttcggcctgtataaggcttttgatgagaatggcatcggctacgccaagaccgctgtgggcgacaagtacgtctatgagtacatggctaagaacggctgccgtattggcggtgagcagagcggtcatattatcttcagcaagtacgccagcaccggtgatggtattctgaccagcctgaagatgatggaggtcatgctggccaaaaaactgcccatgagcaagctggctgagcctctgaagatttatccgcaggtactggagaatgtccgcgtcaccgataaaaagaccgcacagaacgacccggcagtgcaggaggccgtcaaggaagtagccgaggctttgggcgataacggtcgaattctggtgcgcgagtccggtacggagccggtggtccgtgtgatggtggaagcccctgaccatgacacgtgccagaagtatgtggacgaagtagtcaatgtgatttgcgaaaagggatacaaggcataaagtcgaagatgactcttggagatgaatccggagtcattttccgtaatagagggaaagtataagagaaaataccgggagaaataaacaatgtgtggaatcgttggttttacaggaaaccgacaggccgcgcaaaaggccgtctgtccaacctgatcgagaaaacagatgctggcaatgctctgaaaggaacctacggtattggtcatactcgctgggcaacgcatggtgaaccgagccagaccaatgcgcatccgcacgtttctggtaattgcagtcgttccggttccggagcagtggaagcggaagtagttggtgtacataacggcatcatcgaaaactatactgagctgaaagaaaagctgttgaagcacggctatactttttacagtcagacggataccg

SEQ ID NO: 726 - DNA, 7526 bp, unidentified
  source 1..7526: mol_type = unassigned DNA
atgaagggaaaacatagaattattgtatcaacaaagcgcttaaaatatgattttgaaattcgaagaaatctgacggtcatccggggagacagtgcgacaggcaaaaccacattggtagatatgattcgggaatacgtaaataatccatccggtacgcccgtggaactgacgtgtgacaaaaaatgttatgtgctcgaaggttcactgtggaaagaacagttatcagcaatgcaggatagtattgtatttattgatgaaggaaacgaatttatcaagacagtagaattcgcagatactattcagaaaacagataattattatgtcattgtttccagggaatccttgccttctttgccgtatagtgtggaggaaatctatggaattcgtacttcaggaaaatacggaacattaaaaccgtgttatcatgagttttacagaatatatggagcacagactttaaagaaggatattaaaccagaggttgtaataacggaagacagtaattccggttatcagttttttaattctgtatgtaggcaacagcaattgaaatgtgagacaatgaatggaaagtcaaatgttttccattatttaaatatgcataaaaatgaacgcatacttgtaattgcagacggtgcggcatttggttctgaaattgacagagtgatgcagttgatgggtggaaaagatcaagtggtgctttatttgccggagtcatttgaatggctgatattaaaggcaaaagtagtaaaaagcaaatgggcagatcaggtgctggaaaagccgtgggaatatgtggaaagcaaaacatattttagctgggagcggttttttacggcagttttgattgaagagacaaatggttcttaccttgcatatgcaaaaagaaaattaaatccagcatatctgaacgattctgtcaaagattccatactggaacagatgacaaaaattaaattgttttagggaaaaagtgtgataaaatagcagaagatgtgattttttctgcaaaggagtaagagacaatgttaaaaggaaaatgtgtggtactcggcgtgaccggaagtatcgctgcctataaaatcgcctatctggcaagtgcgctcgtcaagcagcatgcggatgtgcatgtgatcatgacggaaaatgcaaccaattttattaatcctatcacgtttgagacgctcacaagcaacaagtgtctggtcgatacgtttgaccggaatttccagttcaatgtcgagcatgtggcactggcaaagcgtgcggatatttttatggtagcaccggcttctgccaatgtaattggcaagatggcaaacggaatcgcagatgatatgctgacaacaacgattcttgcggcaaaatgcccgaagtatgtttcccctgccatgaataccaatatgtttgaaaatccgatcgtacaggataacatcaaaaagctggagcattatgggtttcatatcattgatccggcgagtggttatcttgcctgcggggataccggagccgggaaaatgccggagccggaaacactgttttcttatattatgaaagatcttgcctgtgaaaaggatatggtcggaaaaaaagtaatggtcacagcaggaccgacacaggagaagattgatccagtgcgttatattacgaatcactctaccggaaaaatgggctatgcaattgcgggaaactgtatgcgccgtggcgcggaagtgacactgatcacgggaccggtggcaatcactccgccgccgtttgtaaaggtcgttccggttgtatctgccgcagatatggcggcagccgtaaaggagacagcagagcaacaggatattattatcaaagcggcagctgtggcggattatcgtccagatcacccggtcgatgagaaagtcaagaaaaaagacggggatgccactcttacgatggaacgcacggaagatatcctttcgtatctgggcgcgcacaaaaaaccgggacagtttctgtgtggattttccatggagacggaacatatgctggagaattcccgtgcaaaacttgcaaaaaagaatgcagatatgattgtggcgaataacctgaaagtagccggagccggatttggtacagataccaatgttgtgacgctgattacggcagatgactgcagggaactggaaataatgagcaaagcggatgtcgcatcagcgattgtgagtgaaattttaaagaaaatgtgttagtattaaaatatgacagacttagaagcctattataataaatttaatgaagagaagcgtctggacagccgacacggcagggtggaatttgtgacaagcatgcattatatccatcagtgtctggatgaaattgtgaaagaacgtgcaaaagaggaaatccatatccttgatatcggggcgggaaccggacgatacagcgtaccgctggcacaggaagggttcgatgtgacggccgtggaactggtgaagcataatctggggcgtctgaaacagaagggggcaggcgtgcatgcatatcagggaaatgcaatgaatctgaaaaaattttccgatgattcctttgacgtaaccctgttgtttggaccgatgtatcatctgcatgaggaaaaggacaagcttgctgcgctgcgggaggcagtgagggtgacaaaacccggaggcaggattctcgtggcatatattatgaatgaattttccgttatcacgtatgcgtttaaggaaaaacatattctggaggcgcttcaggagggaatgctcacagaggattatcactgtacttcaaaagccaatcctctgtattccatggttcgtctggaagatattgaagcattggaccggcaggtagaggtcaggcgccggcagatcatagcggcagacggtgcagcaaattatatgcgtccgtttttaaatgcgctgacggaagaagagtttgatgcgtttctgcagtatcatctggcaacctgtgaacggatggatcttatgggtgcaagcggtcacacggtggatattcttgtgaaagaggagtctgaaaacgtatgaaaaaatggatattgccaatcctaatggcaggatttttgctgacgggatgttcttctcctgcagcaacgtcatcggctttgccctcttctacggaaaaaatcacggagacacagatgacggaagaaccgggtacgctggaagaaacggaaaccgggactgcaactgaaacgcagcaggaaccggtgatacagacggtaaaaattacggcgacaggtgactgtacgcttggggcaacacagacgcatgggtatgcaggttcctttcatgaatactatgataaatacgggcaggattatttttttaaaaatatcagaagtatttttgagcaggatgattttacactgatcaatctggaatgtgtgttgtcaaatgcgaccgagcgtgtggaaaaaacgtggaacttaaaaggaaaaccggagtatgttggtattatgacagacagttctgtggagggggcaagtctgggaaataatcatacgtttgattatgggcagcagggacttgatgataccagagaagtgttaaataaagcagggattatcttcggattcaatgatcatgtggatacctataccacgaaggatggtatcaaaatcggaattgtctccgcaagccagctgtccgctgatgaaacacatgccaattatatccgggatgggattgcagaacttcgggaagaaggagcggatctggtaattgcctgttgccactgggggatagagggggatcattatccgaatgattatcagcagaagctggcacaccaggtgattgactggggagcagatctgctggtcggtacacatcctcatgtattgcagggaatggaattatacaacggaaaaatgatctgctacagtcttggaaatttctgctttggggggaacaggaatccaaaagacaaagatacggcgatctatgaacagacctttacctttgtggatggggtactgcagacagatatatcagccgatatgataccatgcagcatttcttccacatcagaaagaaataattttcagcctgccatagcaaaaggcgacagaaaacagacgattattgatcatatgaatgagtattcggaaaagtacagtaaaatcggatttgacgcaaatggcagggtaatcatcagggaagagtagggggatactataattttatgtggcaagtaaataataatgataagaggaatcagcacatgaatgcaagtttttggaattatccgtcaaaacagaaaagctggccgatagacgaagaaatggaaagtctcggggaagtcattcatccactcgataatatcggtggatttgatgtacgtccgggattttatcagatgaatggtgcatatcagacagaggaaggggtaagttttaccgtaagctcccatggagctacgagctgtgtcctgctgttattccggccggcggcacaggaaccgtatgcaagaatccgcattccggaaagttataaaattggaaatacgtattctatccttgtttttggcttaaaagcagaggattttgagtatgcctatcagatggacggtcctgccgatcaggcgagagggttactgtttaacagaaaacatacgcttcttgatccatatgcgaaagctgttaccggtcagagaaactggggagaaaaaccggaaggcggaaaggattttgtctataaagcccgtgtggtgcaaagtgattttgactgggggcggtatcggaatctgaattacaaatttgaagatctggtgatctatgagatgcatgtcaggggatttaccaaagatgcgtcctccggtgtaaaaggtgggggaacatttgaaggtctgcgacagaaaattccgtatttgaaagatctgggaatcaatgcggtagaactcatgccgatttttgaatttgatgaaatggaaagtgcccgtgtggtggatggcgtgcagttgtacaattactggggctataatacggtttccttttttgccccgaatacaagttatgcatttcatcaggagcataatcatgagggtgatgaattaaagcgtctgatccgcgaactgaaagaaaatggaattgaagtcattcttgatgtggtattcaaccatacggcagagggaaatgaagacggtccatgtttttgctttaaggggattgataacaatatttattatatgcttacaccggatggatattattataatttcagcggctgtggcaatgtcttaaactgcaaccatccggtggttcggaggtttattacggattgtctgcggcactgggcagtagagtaccgtgtggatggattccggtttgatctggcatcgattctgggaagagatcagaatggtgcaccgatggagaatccgccgattctggaagcccttgcatttgactctattctgggggatatgaagctgatcgcagaagcctgggatgcgggtggcttgtatcaggttggaagttttccgtcatggaaccgctgggccgaatggaacggaagataccgtgatgatatgagaagctttttaaagggcgacagtggcgtcgcagggcgtgcaattacacgtatcaccggatcctccgacatgtatgatccggcaagccgcggatatagtgcatccgtcaattttctgacctgtcatgatgggttcacgttgtatgatctgtattcatataatgaaaagcataatgagaaaaacggatggaacaatacggacggggataacaacggcctgagctggaactgcggggtggaaggtgagacggatgatccggcggttatgagcctgcgacgcagactcgtgaagaatgcatttgccgcgttgttatgcagccgtggaccggctatgttttttgcaggggatgaattttgtaatacgcagtatggaaataacaacgcatactgccaggataatattatttcctggctggactggaacagactggaagaatttcaggagattcatgattttgcccgttttatgatccatttccgtgcaaagcatccgattctgcgaagggatacaaagccggcagtctgcgggttaccttccgtaagtatccataacggagagccgaaccggaattatacggactataatacacatttaattggaatcatgtatgcgggaagaaatgccgatgatacggatgatgatatgatcttttacggaatgaatgcgtattgggagcctttggagatgcgcctgccttcgttgccggagtcttatcattggaaacttgtagtaaatactttctgtgaataccaggatggggcagattttgaagctcagacacagggagatcagacacgtgtgcgtgttccggaacgttctacggtaattttactggcagaacatgatttataaaaaaagagttgagcaccgctctggaaacagggcgtgctcaactctttttttcggtggtatcgggtctggttgtaatttcactggttccgatgaggtaatctgcagaaacattcagaatctgcacgatggctgcaagatccgcaacggtcggagaacgacgaccggtacggtatccgctgatcgtggacggcgaaacaaacattgcatttgccagctggatattggaaatattttgtttatacataatcagactcagacggtcaccaaaatctttgtatttatttttatcattcgttttcatacaaatgattttatagaaagttgatataaaaaacagagaaaacgcgtattgcgttttaattcttaaataaatggaaaaagatttccaaaaagataagaaattaaatccatccgccgtctaaggtgagaatctgtccattcaggtaactgcttgctgtggcaagagaatatgccagtgaagcaacttcttccggggatcccatccggccggcaggaatttcttcgatgagtgcagagcgttcttcctcggagaaacaacggttcatatccgtatcgattaccccacaggcgatggcatttacctggatattgctaggggcaagttctttgcccaaagcgcgtgtaagggaattgatcccgcctttgcatgcagaataggcaacttcgcaggaagctccgacatttccccatacagaagaaatattgatgatatgtccggatttggcatgaaccatggaggggatgacctgtctgcatgtggaaaagacggatgtgaggtttgtcgcaactattcggttccagtcggtaatatccatgtcggttagcagaccgatataagagatgccggcattgttgattaacacatcaatctggccgaaggtatccagtgttttttgcaccatgtcacagataaaagtatagtctcctacatcaccacggaagcaaagcacctgtatggagcaggttgtttcaagttttgtggcaagtgcctgcagcgtttcataagagttatggcagcaaagagccagatgatagccttcagcggcaaatcgacatgccagggctgcaccgattccacgggatgcacctgtaatcaaagcagtatgtttcat

SEQ ID NO: 727 - DNA, 23487 bp, unidentified
  source 1..23487: mol_type = unassigned DNA
cgaccgctccggcgctgatgatggtcggctatctgatggtttccacggttaccgagattcgctttgacgaggacaacatggtggaagcgattccggcatatctggcaatcgttgccatgccgctgttctacagcatctccgaaggcatctccatgggcatcatctcctatgttgtgctgcatgtggtttccggcaagggcaagcaggtcaagccgctgatgtatgtgctggctctgctgttcgtgctgaagtacatcttcctgtaagaaattccggaacggactttcaataggatagcgaaaggcgatcgggctttgtcccgaccgctttttttaacgtatgggaaaatgcgcaaaaccgcctgcgcgagcggaacttcggtaaatttagatgatggaattttgacagacgggcaatcctgtggtaaggtatagcatatgaaacaggaaaggcggcgcggcatgggcgcagggaaaaagaagaaaagccgatgggcaggtatatggacggcattgctcggtgcgctctgtgcgctggtgctgagtgtcgtgttctacggaacgatggtgtatcagcttgctgacgacatgcagacatcggttcagcggacgcagagcgtcacggcggcggacggctatccggcaagaacgctgagcatcgagggcatgacgctgctggaggaaaaaaaagaaaccgtccgaatgggcggcgcggaatgtcatattgtgacgcgggtctatgcggcggaaaacggcttgcaggcagctgccgtcagcgcggttcccgcggcgtatatcgagcggctgtccgcggagggctggcaggcgcagctcgtcacgggctttgtgctgggcgaggaagaagccgtctatgcgcttcggggaagcgagggcatgcttgccgcccgaagcggcgatgcggtgtatatgcttatctctgcggcgcaggagcaggagctttacgcgctgggttcgcaggcgaagattgaataacaaagaggctggcggatgtcagcctcttttacacgtcaaaaagcgtctgaaaaccgatgagaacagacgaaaacacgcaaaaaaacaaagaaatttatataaattcatcggaaatgcttgacaggactttaaaaaaggaatacaatactatattgcatcagtatgcacaataggcaaagatgtgcccggcactgggcatgagcctgatatcattgtacaacgctttgggctgtttggcaatgggcagttttaaagcggattgcctgttgcagcatatatcctttgcaggtagacaagttaggggtgatggcattcatgggtatcgtccgcgacgagcgcgaagaggctgaaatcatgaagtacgtcggggtacacgacgtcaatatgggcaagggacgtgtccgcaagagctttgccaccattgatgaagtggtggaaatgcccgatctgatcgaggttcagaagaactcttacgatcgttttctgaaagaggatcttcgtgaggtcttgaacgacgtttctccgatttatgatttcaacggcaatttgaagctggaattcgtcgattattcgctggataagacgccgaaatattcgcttgaggaatgccgtgagcgcgacatgacgtatgccaccgcgctcaaggttctcgttcgcctgaccaacaatgaaacgggcgaagtcaaggaatccgaagtattcatgggcgatttcccgctgatgaccgaacacggcacgttcatcatcaacggcggcgagcgcgttatcgtcagccagctcgtgcgcagccccggtgtatattaccgcgagagcattgataaggccggcaagcacctgtttgacacgcaggttattccgagccgcggcgcgtggctggagtatgaaatcgactccaacgacgttatctgggtgcgtgttgaccgcgcccgcaagctgccggtgaccagcctgctccgtgcgctgggctatggcagcgacgagcagattcgtcagcttttgggcgacgacgaaaagctcgaagcgaccatgcagcgcgacggcggcgacgacggcacccgccgtacccgcggcggcaacgaaatcaagagcaaggaaagcggcttgatggatatctatcgccgcctgcgtccgggcgaagtcggcacggttgattccgccgagaagctgctgaacgcgaccttctttgatcccaagcgctatgatatgatgcgcgtgggccgctataagtataataaaaagctggcgattgcctcccgtatccgcggtcatgtggtcgatcaggacatcatcgacccgaccaccggcgaggtgctgattgcggcaggcgagcgcatcccgggctccaagaccgatctgctcgccaagaagattcaggacgcgggcgtcaacgacatctatctgcgccttgagaatcgcgttgtgcgcgtcatcggcaacaacttcgtcgatgctgccgcgtggctgaccgaagaggaaatcgagaaggctggcatcaacgagatggttcacctgccgactctcaagcagctgcttgagaccgccgagcaggaaggcatggacgagctggcgaagattcgcctgctccatgagaaccttgccgcgctcatgcccaaacatatcctcatcgacgatatcgttgcgtccatcagctacctgctgaacctgccgtacggcgtgggtctgaccgacgacatcgaccacctcggcaaccgccgcctgcgttctgtcggcgagctactccagaaccagatccgcatcggtctggcgcgtctggagcgcgtggttcgcgagcgcatgagcgtgcagaaccagagcgaggtcaagccgcaggagcttatcaacattcgtccggtttccgcggcgattaaggagttcttcggttcttcccagctgtcccagttcatggatcagccgaacccgctggctgagctgacgcacaagcgtcgtctttccgcgctgggtccgggcggcttgaaccgcgaccgcgcgtccttcgaggttcgagacgttcactactctcactacgcgcgtatctgcccgattgagacgcctgaaggcccgaacatcggtctgatcggctctttggcgacctatgcgcgcatcaacgaatacggcttcatcgaagcaccgtatcgtctgattgaccacagcggcgaaaagccccgcgttctggacgagatcgtctacctcgcggcggacgaagaggacggctgctacatcgcgcaggcgaaggagccgctcaatccggacggcacgttcgtcaacgaccgcattaccgtgcgcgtccgcgccgatgttcagagcgtcgagccgagccgtgtagactatatcgacgtttccccgcgtcaggtgatttctgtcgcgacggcgatgattccgttccttgaccatgacgacgcaaaccgcgccctgatgggttcgaacatgcagcgtcaggctgttccgttgctccgtccggaagccgcttatgttgcgaccggcatcgagtacaaggcgggcaaggattccggcgtctgcctgcgcgcccgcgaggatggctatgtcaagaaggtttcttctgacatgattatcatcgaggacgagctgcacgagacccacacctacaagctcatcaagtttgcgcgctccaaccagagcacctgcatcaaccagcgcccgatcgtttccgcaggcgagagggtgaagaagggcgacgtcatcgcagacggcccgtctaccgatcacggcgagatcgcgctgggacgcaacatcctgatcggcttcatgacgtgggaaggctacaactacgaggacgccgtcctgctctccgaggagctggttcgcaacgacgtctttacctccatccatctggaaaagtacgagtgcgaagcacgcgacaccaagctgggcgcggaagaaatcacccgcgacctgccgaatgtcggcgacgacgcgctgcgcgatctggatgccgagggcatcatccgcatcggtgcggaggtgcatccgggcgatatcctcgtcggcaaggtcaccccgaagggcgagaccgagctgaccgctgaggagcgtctgctgcgcgcaatcttcggcgagaaggcgcgcgaggttcgcgatacctctttgaaggtgccgcacggcgaggaaggcatcatcgtcgatgtcaaggtgtttgaccgcaaggatcacgccgagcttgctccgggcgtcaaccgcatggttcgcgtttacatcgctcagaagcgtaagatttccgtcggcgataagatggcaggccgtcacggcaacaagggtgtcgtttcccgcgttctgcgtcaggaggacatgccgttcctgccggacggcacgccgcttcagatcgtgctgaacccgctgggcgttccgtcccgtatgaacctgggtcaggttctggagatgcacctgggcatggcggcgaaggcactgggctggcgcgtggcgacgcctgacttcgacggcgcatcctttgagcagattcagaatgcgctggaagccggcggcaagagccgcgacggtaagaccatcctttatgatggacgcaccggcgaccagtttgataaccccgttaccgttggctacatgtactacctcaagctgcatcacctcgttgacgacaagatgcacgcgcgttccaccggtccgtacagcctcgtgacccagcaaccgttgggcggcaaggcgcagttcggcggtcagcgtttcggcgagatggaggtttgggcactggaagcttacggcgcagccaatacgcttcaggagattctgacggtcaagtccgacgatatcgtgggccgtgtcaaggcatacgaagccatcgtcaagggcaagaacattcccgcgccgggcgttccggagtccttcaaagttctcatcaaggaactcgaaagcctgtgcctggatgtcaaggtgctcgacagcgatcacaacgaaatcgtcatcaaggagcttgaggacgaggacgagggctttgaccgcagccagagcgacgccgaggaaagcgagagcaagccggcggctgccgatgcggatgagccggaggacacggaggacgaggatggcggagatgacttcgacaccgacgacgatgtgtttgactttgacgacgtgcccagcttcgaggatatctccctggacgacctggacgacaagtaattgtccgtttcgggatatagacgtaacaatgccccgccgcgctccgtgcgcggcggcggtctgatttgatatagagaagggagtgtacccctttgtcggaactgacaaacctgtcttccattcaaatttccatggcttctccggaacagatccgcgcatggtctcatggcgaggtcaccaagccggaaacgattaactaccgtaccctcaaaccggagcgcgacggtctgtactgcgagcgcatctttggcccgaccaaggactgggagtgcaactgcggtaaatataagcgcgtgcgcaacaagggcatcgtctgcgacaagtgcggcgtagaggttacccgcgccaaggttcgccgcgagcgcatgggtcatatcgagctggcggctccggtcagccatatctggtatttcaaaggcatcccgagccgcatgggcacgctgctggacatcagcccgcgcgcgcttgaaaaggtgctgtactttgcttcctatatcgtgctggatcccggctgcaccgcgctgcgtccgaacgctatcctgacggagacggagtatcgccagcagattaccgcgccgagctacactgccgatttgggcatgggcaaggccccgctgcgcgtcggcatgggcgcggaggcggttcgtgagctgcttcagaagctcgacctcgatcagctcagcgagcagctgcgcaccgagattgccgagctgactgagaaggagcgcgagcgcgagaccgaaggtcagaagcgcgcgaaggcgattaagcgtctggaagtcgtcgaggcattccgctccagcggcaataagccggagtggatgattatggaagttattccggtcatgccgcccgatctgcgcccgatggttcagctggatggcggccgctttgcgacctccgacctgaacgacctgtatcgccgcgtcatcaaccgcaacaaccgcctcaagcgtctgcttgagctgggcgcaccggatatcatcgtgcgcaacgagaagcgcatgcttcaggaagcggttgacgcgctgattgataacggccgccgcggacgtccggttacgggccccggcaaccgcgcgctcaagtccctttccgacttcctgcgcggcaagcagggacgtttccgccagaacctgctcggtaagcgcgttgactattccggccgttccgttatcgtcgtcggccctgaactcaagctccatcagtgcggtctgccgaagggcatggcgctggagctgttcaagccgttcgtcatggagcgtctggtcaacaccggcatcgttcacaacgtcaagagtgccaagcgcatggtggaccgcggcgaaacccgcgtatgggatatcctggagagcgtcatcaaggagcatccggttctgctgaaccgcgcgccgacgctgcaccgtctgggcattcaggcgttcgagccgattctggtcgagggcaaggcgatgaagctccatccgctcgcctgtaccgcgttcaacgcggactttgacggcgaccagatggctgttcacgttccgctgtccatggaagcacaggcggaagcccgcttcctgatgctctgcgccaacaacatcctcaagccgcaggacggcaagccggttatctctccgtcgcaggatatggttatcggctgctactacctgagctgcatccgtccgggcgcgaagggcgagggacgctgcttcgccaacgaggatgaggcgatgatggcgtatctgtgcggtcagattgacctgcagagccgcatcaacgtgcgtattgcccgcaagtgggaagccccggtgacctctgaatatctcgccgagaacaacatcaccggcggcaatcgcgataacatctattataagcgcatcgacacctgccttggccgcctgattctgaacagcaatgtgccgcaggatatgggcttcaagccgcgcagcacgctcaacgacatgttcgcgcttgaaatcgacatgaaggtcggcaagaagcagcttggtcagattgttgacatgtgcttccgcaagcatggcgtcgcggagaccgcgcgcgtgctggataacgtgaaggcgatgggctacaagtactccaccatcggcgcggtcaccgttgccgttgcggacgttatcgttccgccggagaagaagccgattctggaggaagcagaaggcagggttcgcaagatcgagaagatgttcaagcgaggcctgcttgctgaggaggagcgttacaaccgcgttgtcgaggtctggagcaagaccaccgacgacgtcaagggcaagattatggatcatatggacgagttcaacccgattcgtatgatgaccgactccggcgcccgtggttctatctctcagatttcccagcttgccggcatgcgcggcatgatggcgtccccgaccggccgcccgctggaaatgcctgttaaggcaaacttccgcgagggtctgaccgttcttgaattcttccagagctctcacggaagccgtaaggctctgtccgatactgctctgcgtaccgctgactctggttacctgacccgccgtctggttgacgtttctcaggaagttatcgtgcgcgagcgcgactgcttcgcgagccgtcacgagaagattcgcggcattacggtgaccgccatcggttctgagcgcgacccgattgaaaagctcatcgaccgtatcgtcggccgtgttgcggcggaggatatcgtcaacccgctgacgggcgaggtcatcgtaccgtgcaacgagatgatttcttacgatcagggcaacgctatcatcgactgcggcatcaagtccgtgcagattcgttctgtcctgacctgccgcaacgaaaccggcgtctgcgtcaagtgctatggtcaggatttggcgcacggcggctacgtcaatatcggcgaggctgtcggcatcgttgctgctcaggctatcggtgagccgggcacgcagctgaccatgcgtaccttccataccggcggcgttgcttccgaaaaggatatcacgcagggtcttccgcgcgttgaggagctgttcgaggcgcgcaagccgaagcgtgaagcgatgctggcggagatttccggcatcatctcgctgggcgagaacaagaagaagcgcgagctgattatcaccagcgacgacggcacgatgaaggcgtatccgatcgcctacggcagccgtctgaaggtcaaggaaggcgaccgtgttatcgcgggcgacgagctgaccgagggtcagatcaacccgcacgacctgctgcgtattctgggcgtcaaggctgttcaggaacacctgctcaaggaagttctgatggtttaccgtctccagggcgttggcatcggcgacaagcacatcgaggtcatcgttcatcagatgctgcgcaaggttcgcgtcgaggacgcgggcgacaccagcatgctgcccggctccatggtggatatcttccacttcgagaaggagaacgaaaagaccatcatgaacggcggccgtccggctgttgccaagcgtatcctgctgggcatcaccaaggctgctctggcgaccgaatccttcctgtccgccgcttccttccaggagacgacgcgcgtgctgaccgaagccgccatcaagggcaaggaagacccgctcgttggtctgaaggagaatgtcattatcggcaagctcattcctgccggcacgggcatgtcgcgctacaaggacgtcgaagtcaaggaaatgtactaagacagttgcttggcaattgcataaaggcaggacgctccgaggcttcggggcgtcctgcttttgctttcaggttggcaaaaaaatgttgttctgctctgttttttggcagaaaaggagattgatttgcaaatatgaaagttgtaagataaaatggcagttattaaaaggaggaaaacctgtcatgctggatggtttgtatggatttgcatcgccgtgggcaacggcaacaaagatgcaaattacaaaaaacaggcttcttgggtttgccgccaacatcatctatcctgcttattgcgccatgacgccgatgaaggaaagcgggaagggacagggggtcgtcgtttcgctgacgacgtttcccgcgagaatcgaaaaggtatatttgacgctgcaaagcatcctgcgtcaggagcggcgggcagaacgggttctcctttggctggctgaagaagattttccggatgaaaacgcgctgccggaaaagctgctcagcctgaaacaacacgggctggaaatccggttttgcgagaacctctattccttcaagaaaatattttatactgctcaggaattcccgaacagcgtaatcgtcacagcggatgacgatacgctttatccggaaagctggctgggcggtttgctcgatacccatgcgcagtatcctgactgcgtgtgctgttaccgcgcgcatcgcatcgtttttaaaaaccatgaaattgcgccttatcgggaatggattggtctttcgcccaaagaaaaaggcccgtcaaaagcgctgcttcctgtcggcgtcggaggcgttttgtatccgccgaaatactttgaaggcgtatgctttgacagcgatgtgattcggaagctgtgtccgacggcggatgacctgtggctcaaggtgctgggcgcggaaaaggggattcgggcggtgaaggttcgggaaaacacgattgagtggtttactgttcgcgacagtcagaaagtcagcttgatgagtgtgaacacgcgggaaaaaatggagaatgataccgcgatgcggaacctgatggaatactatcgcgttaatcaaagcatgctggatgacagcgaagcatgaagcaacatcgggaacatgcgataagaacgaattcacatcacagataaaaggaaaacatggaaaagaagattaaactcagcatcattattccggtattcaatgttgaaaaatatgtgcagacctgtctggattccgttatcgaacagagctttcgggattttgaagtcatcgtagtggacgacggctcaacggacggcagcccggcaatctgcgacgcggcggcgaagcaggatggacgcatctgcgtgattcaccagcaaaacgggggattgagcgcggcgagaaacgcggggctggacattgcgcggggcgaatggattggctttttggattcggatgactttatcatgccggatatgtatgaaaagctgatggacgcggcggaaaaagcgcgcgcggatatcgccatatgcaattacctgcgtgtagatgttcaggggaagccgattgaaaaacaggatcaaccgattcccgacgccgttttgaatcgcgacgatatccttcgcagggcgttaagagcccccttccatgtggcatggaataaaatctatcggcgttgtatttttgaaacgctgcgctatccggaaggaaagctcaacgaggatatgtttaccgttacagccatatatgaccgcgcggagcgcatcgcctgcctgtcggatgcgctgtatatgtaccgcgtaacgccgggaagcatcatgcagacgaagaaaacgtttcgccattacgatgcggtagaagcggtggacaggtgctttcaatactacctgagcaaaggcatgaaggacatgcttcccgcatgcgaaatgaggacatttgacagcctgcgcagggtttattatgatttaaatcaacaggagcggcgtgcgcctgaaacgaaggcggcgaaagcaatttatcgccgagagctgaaagagatgcgcaggcagggatgcctgagcctaaagtgcttatgcagagcggctctgttcggcatcagtccggagctgtatagaaagacatggaacggaaagtaagcgagagaaaaagcgatgagaacaaagtacacggtcattaaccttctggtcagcgtaggaggacaactgttcagcatcctgctgtcttttatcagccggatgttctttattcattatctctcggcagagtatctgggactgaacgggctgtttacggacgtattgggcattttgaatctggcggagctgggcattggaaccgccatgattttcagcctgtatgaaccggcggcgcgtgaagataagccgcggcttgtacgactgatgaatctgtataagctgctttaccgcgtggttgcgggctttgttctgctggtcggactggcgttgctgccgtttttgaatctgctcatcaaggacagcggcagcatcgagcatttaaggctgatttatatgctctacgtgctgaattcggcaggctcttatctgctcagctataaggattcaatctatatcgcccaccagaaggcgtatatcaaaatggtctgggtacaggtttttgatcttgttcggctgacggtacagattgcgattatcatcctgacccataactttatcctgtatctgattgcgcagtttgttgctcagtttatccccaacattatcatttctttcaaggtggataaggaattcccgtatttaaaggaatgcagggagctgccgtcgagaaaagaatgcctccatatcctgcgcaatgtcggcgcgatgagcatccataaggtttcggcggtcatcgttcgcaatacggacagcctcatcatgtctaaatatatcggtttgaccatgctgggcatctattcaaactataagctcgtgctgaacagcatcggcaatctggtgtcaaaaatatgcagttcatttggcgggagcatcggaaacctgagcgcaatcggcgacggggagcatgtctataaagtctatcgtgagctggatttcatgttctttttgatgttcggttatctgacgggcggcttggctgcgctctttaatccgtttatcagtctgtttttcggttcgccatattgcatgtcgatggcgacggttctggtggttgttgcggatttctacatttcgggtctgcgcaaggtgaatcttcttttcagagaggcaaaaggacttttttggaatgatcgatataaggcaattgttgaagcaattttaaatttggtcatttcacttttgctggttaagtcgtttggcgttgcaggtattctgggcggtacagttatcagcagtctgctgacctgcgtatgggttgagccgtatatcctgatgcgctacggctttgaggaaaactggcacagaaggctggcgcgctattttgcggattatatcctgcggacggtgatgacggtaggcatttcggctgcggcgataggctttgtgcggaaatttccgattcagaatttcggcttctttatcctgtatggtatgttgtacaccgtttttttcgggtgtgtggcattcgtctgtttctgccgcacggaggaattccggtttctgaaggacagggtgacggctttgattcaaaagagaaaggtaaaataagatggataagctggtttcggtcattatcccgatttacggggtggaaaaggagctgccgcgctgtctggacagcctgcttgcgcagacgtattccaattttgagctgctgcttatcgacgacggttcaaaggatgggagctatcgggtgatggaggaatacgcccgaagggatgggcgcatccgccttttccaaaaagaaaacggcggtgtttcctcggcgcgaaacatgggtctggatcaggcaaaaggggattatatctgctttgtcgatccggatgactgggttgcgccgtgctatctggaatggctgtatcgggcgattgagcagagcggttcacggatgtcgtcttgtcgtctcaaacatgtcgggcagatggatgctgtggtcgagttgccgaaaagcatgcctgaattgcgcatgatggatgtaggacgttgctccgtatgggaacaggatgcttgtctgcaatgttgccggatgatggctgaaagggatttgattcaggatatccggtttgcgcagaaggtcgcgattggcgaggattccctgtttaccatgcagctgatgctgaaggaggggcgaatcgcatgcgtgccgtgcgtactctatttctactggatgcgtcccgattcggcactccatcaggcgtttacggctaagcaatatacggaatcggaagcatgggaaaggatttatgcgctggtgcagaatcggggaaagattctggaaagaaccagcgaggagaagctggcactcacgtatgcccacgtctactaccgcatggcgcacagcccctatgccgatgaagccggacagaaggagctgattcggaaaatccggaagcactggcgggcagtcctgcgcgtgccgaatcggttgatgcgggaaaagggaaaaatgctcatgatggtcatctgtccgcagcttgggcaggtgatgtggagaattggaaagaaaatgaagcaagtttccccttgaaagcatgaaaagagtttggtatactaaagaatcgaagaggtttggcaggcgtctgaacggatgcctgctttctgtgtgaagcgggcgggttgccccgcagaatgggagagaatccatgaatcaggtcggttttgacagccagaagtacatccaattgcagtctgagcatattcgtgagcgcatcgcgcagtttggcggcaagctctatctggagtttggcggcaagctgtttgacgattatcacgcgtcgcgcgtactgcccggttttgagccggataacaagattaaaatgctgcttgcgctcaaggatcaggcagaaatcgtcatcgccatcaacgcggacgatatcgagaagaacaaacgccgcggtgatttgggcatcacctatgatacggatgttgcgcgcctgatcgacgtattccgcggattcgggctgtatgtcggctccatcgcggtgacgcagtacgcgggacagccggcggcggatgtatttgaaaagcgcatgcacgcgctgggattgaaggtttaccgtcaataccgaatccccaactatccctccgacgttcgcctgattgtcagcgacgaaggatatggcaggaacgattatattgaaacgacgcgctcgctcgtcgtcgtgaccgcgccgggtccgggcagcggaaagatggcgacctgcctttctcagctgtatcacgagcataagcgcggcgtgaaggcgggctatgcgaagttcgaaacgttcccgatttggaatctgccgctcaaacatccggtcaatatcgcctatgaggcggcgacagccgacctgaacgacgtgaatatgattgacccgttccatctggaagcctacggcaagacgacggtcaactataaccgcgatatcgagatttttccggttctgagaaccatctttgagcgcatttacggcgaatgtccgtataagagccctacggatatgggcgtcaacatggcgggcttctccattgtagatgacgaggtatgctgtgaggcgtccaggcaggaggtcatccgccgctacttccaggcggcgtgccgcgtccgtcagggtcagaatgctgacgaagaagtggcgaaaatcgagctgctgatgcgcacgctggatattgagccggaacgccgcgcggtcgttcctgccgcgatggaggtcgccgagcgcacgggcaagcctgccatcgccatcgagcttccggacggaacgattgtgaccggcagaacgaccgagctttttggcgcggcgtctgccgcgatgctcaatgcgctcaaggcgattgcgggcattgacgacgccgttaagctgatttctccggacgtcatcggcacgattcagacgctcaagaccgattacatgaagagccataatccgcgcctgcatacggatgaaatgctcgttgcgcttgccatcagcgccgccagcgaccataacgcgatgctggcgatgcaggctctggacaaactcaagaaatgcgaggcacattctacggtcatcctttcctcggtggatgacggcgtattcaagcggctgggcatgcgcatgacctgcgagccgatttacgaaaagaacagcctgtaccataagtaatcaaaagtatcgctgaaaacaaaccaaaccgcttccgtttgagcaaaacgggagcggtttttgaatgtatgggaatcgcccgcgcaagcagggcttccgtgttttctgcaaactgcggcagaggagaagataggcacagagccttatttgaaacagggtgattcgggatggcgagctgtgctgcattcagaaattaaagaattttccgatataaattgcacaaagtgcaggaaatttgatgatactcccaaattttgcttgaattctgagccgcatgtgattataataggtcggtattatttgaaaacgatggagcgcggattcgcgccggaaggaaggtacaggatgcataccaaatttatttttgtgacaggcggcgtcgtttcttctctgggcaagggcattacggcggcatcgctgggacggctgctcaagagccgcgggctgaaggtttccatccagaagtttgatccttatatcaacgtcgatcccggcacgatgaacccctatcagcacggcgaggtatttgttaccgacgacggcgcggaaaccgatttggatttgggacactatgaacgcttcatcgacgaaaatctgacgcaggcggcgaacgtcaccagcggacgtgtgtattacacggtcatcacccgcgaacgcaagggcgaatatctgggcgcgacgattcaggtcattccgcatatcaccaacgagattaagcggcgcatgctggaggtttccctcggcgaggacgcgccggatgtggtcatcacggaaatcggcggcacggtcggcgatatcgagtccctgccgtttttggaggcggcgcgtcagctcagaagcgaggttgggcgtgagaatgttctgtatattcatgtgacgcttgtgccgtatatctccgcagcgggcgagctgaagacgaagccgacgcagcactcggtcaaggagctgacggggctgggcattcagccggatatcatcgtctgccgaagcgaaaagccgattccgcgcgacgtgcgtgccaaaatcggtctgttctgcaacattccggcggactgcgtttttgaaaacctcaatgcacgcagcatctatgaggtgccgctgatgattcacgaagagggcatggacgagagggtctgccgtctgctgggcatcagcgcgccggaggcggatttgaccgaatggcgggagatggtcgagcggctgcttgcgccgcagaaggatgtgcgcatcgccatcgtcggcaaatatgtcgaactgccggatgcgtatctgtccatcgtcgaggctctgacccatggcggcattgcgaaccacgcgaaggtgcgcgtggaatggattgccgctgaggaagtaacgccggaaaatgtcgcggcgaagctcaagggctgctcgggcgtgctggttccgggcggattcggcgagcgcggtctggagggcaagattgccgcggtgcagtatgcgcgggagaacaacatgccgttctttggcatttgtctgggcatgcagatggcggtcgtggagtatgcccgccatgtcctcgggctgaccggcgcgcataccagcgaggtcgatcccaacacgccgtatccggtcatcgacctgatgccggatcagcagaatatcgacgaaaagggcggcacgatgcgcctgggcaagtatccctgccgcctgagccgtgagtcgctggcatacgccgcctacggcgaggagaacatctgggaacgccatcgccatcgctatgagttcaacaacgtgtatcgcgataagttcacggagagcggcatgcgcatcggcggcgtaaaccccgaccgtgatttggttgagattatcgaattgccgaatcatccgtggttcgtcggcgtgcagtatcatcccgaactgaagagccgtccgaaccgtccgcatccgctgttccgcgagttcgttgccgcggcactcaggtatcaggacgcggagagcggaaaataagcaaaagggactgtcaagctaatcacaccgatatttcaagaaaaaactaagtatttgtgcccgaaggtttccaaagggcgatgcgccaaacgggcgccgtaaacgctcggaaagccctttggtggggatatggggcaaagccccatatcccaaaatgcttagatattcatttcttggaatattcggtttaatcttgacagccccttattttttgcagcctgcggcggaggagagggcgggttcagcccgcttcttccgaaaaataacagaatctttccgtgtcggattgctcatgctatcaccatcaagcgatatcatgaaggggagatttgcgatggaaaaaatcaaagtcgttcaatatggatgcggtaagatgagcaagtatattctgcgctatctgcatgaacatggcgcgcagattgtcggcgcaatcgacgtcaatccggaaatcgtcgggcaggacgtcggcgatttcgccggactgggcatcaaaaccggcgtcatcatccgcgaggatgcggacagcgtgctggatgagtgcgacgcggatgtcgcgattgtgaccctgttcagctttatcggcgatatctatgaccatgtcgaaaagtgtgttcgccgcggcatcaacgtcatcaccacctgcgaggaagccatctacccatggacgacgtccgccgcgcagatcaatcggctcgacgcacttgccaaggaaaccggatgcaccatcaccggcagcggcatgcaggatattttctggatcaacatggttgcgctccttgcgggcggctgtcacagcatcaccaaaatcaagggtgcgtacagctacaacgtcgatgaatacggcttggcacttgcgaaggcgcacggctgtgacctgacaccggaggaattcgagcagcagattgcccatccggtttcctttgagccgtcctatgcgtggaacgccagcgaagccctctgccatcagctggggctgaccgttcgctccatcgggcaaaagcatgtcccgtgcatcatcgaccacgatattgaatccgcgacgctgggcaaggtcatcaaggcgggacgctgcatcggcatgcgtgccgtcgtgaccatcgaaaccatgcagggcatcaccatcgaggaggaaaccatcggcaaggtttatgagccgaacgacggcgatttgtgcgactggaagattttcggagaaccggataccgagttccatgtcgtcaagcccgctaccgttgagcatacctgcgccacggtcgtcaaccgcctgccgagccttttgcgtgcgcccgccggttatgtgaccgcagaccagctcgaaccgccgcagtatctgacatatccgatggagctttattgctgacgcagagcaggaaagcctcgttcatgcggatagctttgcatgatttcccatccatcaaaaaaacaggcacggggtcaagcccgtgcctgcgttcattctgcctgtaaagaatgatgaaagggaattactggttcgccgcggcgttcacaccggcgatacggccgaaggtgaagatgtcagcctcagcgttgccgcccagacggttgcccgcatggacgccgccggtgacttcgccagccgcccacagaccgctgatggcttcgccgttggcattcagaacatgcgcctcgctgtcaatcttcacgccgcccatggtgtggtggagggaagccttgcgcgggctgatgacgaagccgcggttcggatcggcttcgatggcgtcgatgtcgatcgcgccggcaagcacttccttgccgaagtccggatcattctgagaagcgacatagctgttgtacttctcgatggtcgcgcggagagcttcctcggtgaagttcgggttcgcgccgccggcggtcgtcttggaattctccgccagctcagccagcgtggagccataccagacatggtggttgtccaccatgttctgcacggtggtgccgaacagagtgttatccagagaagcaccgagaagctcgccgttctcgttggtttcgctgcccgcgtagatgatgtagaagatgctgccgtccagcgcaagggaagccttggtcagcacgtcgcgctcggcgtactcgttgacgaagcggttgccttcgccgtcgatccaaatctgctgggaagcgtcgccccagatgccgtcggtcatggtgcccttgaccggagaggaggaaggcatcatctgaacgatttcaagaccggtggtgtccgcgccgactgccgttgccatcacgatgccgtcgcccttgttggtgccgacgttggtggtgagcatatggctgctcaggctgtcgccccagtagttgtcgtattccttcaccatggtcgggttggcgcagtagccgccgctggcaagcacgacgccgttggtcacgttgatggtgatgttggtgccgttgaccttctgagcggtcgcgccgacgatcttcccgttttcatccgccagcagagaggtggcggcggtttcggtgtagatggtcacgcctgccttttcggcgctgtccttcaggatggagatcagctccgtgctggcggaaacgcgatgggtgcgcggccacatggcgcccagaacggtgaacaggtcggaggaagcgtccgcgccgttggcggcgtacacgccgatgctgtcgagccacttgaacgcatcgagggaattctcagcgagggtgcgcgcaagggtgatgtcggaggcaacccagctgccatccagcagctgacgcagaccgccgacatagatgtgccacatgtgcagggaaacggagtcaaagcccggcatatccacgcccgcggtcttgccctcgttcgcggcatagaaatcggtgatgtcctgctggagctgggtcagaacttcttcccactccgggaacacgtcaaacttcaggctcggatcgctgtggtcgagcgcgagatagccgtccatcgtgttcttctgcgcgacagtcaggatgacgcccttctgcgcttccggatcgacggtgttgtacgcgccgccagccatcatggtgttgccgcccaggaaagagcttttttcaaccagaatgaccttcgcgccgccctgcgccgcagaaatcgccgcggacagaccggctccgccgccgccgacaaccagcacgtcggcatcccaaacctcgtcctcgccggcaggctcggagtaggcgtttgccttcagcgcgtcggcatctagaccggcagccttggcagcgttggcagccgcacgcatgatggcgttgctcgccagcgtcgcgccggttacggcgtccagcgtggtggtctgatgctccaccatcagctgcggcagacgctccatggcgacgcccgcgatgttggcggtttcgtggcattcggtcagctcgacgtttttgataacgccgtcttcgacggtcatggcaaccgttacggtgccctgcatgccgatggaagagccttcgtagacctccgcggatgcgccgacgcagacggtcagcagcatcgcaaggcacagcaggcaggcgaggagcttggagtttttcatttgaaacaaatcccccttaaccagttgtgaaaaaagtggacagccgccttttcgtgtacaggcttggcggcgatgaggggattataatcctgtaagcggcttacaagtcaaggatttaacgtagaaaatttcacaaattgcgataagcgatgcccatccacaatccgtgcagccgtttcccatttaaagtatgggaatagacgaagcggccgatcatatcgccgtaaggctcgatatgcttttgacgggcaagggcatacatcggctccaaatctgcgcgggtcatggttttaaagttctccttttcaaacatgcaggtcagcatgtttccgcttccgtaatgtacggcgcatgccggcggggtataggagcatgcctcgcagttgcgttcgaggatgcccacaccgaggatagggtggaacacgtcgtcatgagccagactttctgccggaattttggcggcaagatagctgtagggcaggcggcgggtcagctcctgcgcaccgagaatctcctcgcgggtcagctcgcgcgacaaatcgaagctccaaatttcgtagttggcgagctgatcggtaaaggtcgcctttcccgtgccgtagccgagtgtgcgccaataccgctgcatttcgcgcagacgggcaaggcgaatctgttccagacgaagatgctcttccagctcgcgcacatgctcctcaagccagacgcccatttcgttcacgctctgaccggactgcgtctgcgagatttccttcagattcatatcgaaactgcgcagcatcagcgcattgccgtattccagcgcgtcatccggttcaaaatttcgatagttgttttcttcgcagcgttccgtctgacccagccccaaacggtcgtaatagcggatcttgctgacgggaacacccagccgttgggcgaattcgcttgcgatcatgagggatacacctccgcatcctgtgattgataacagtataacataaatcactgcactatatcgctcatttcgacaaaattcgcggaaattcgccgcagaactcggaataaacttgacgtcatttaaacagcgtgctatattggacgatgatgtgcttttatggagccaagaagatacgaaaggataaccgatgtgaattttttgagcgggcgaaaaggatgggtcatcgcggcggatgcctgcatcatccttttgctcatcgcatatgttgtgggctttaccgttgagcttcggcagacctcgacggacaacgacgtgcaaagggtcgtcgatacgattgaatcgcttcagcggcgttcggttatctatctggatgactcctgccgaatcaacagggattggagctattacgccggacggcatatcggcacggcggaagaaatgctcgaccggatatccgagctgaattcggatgagcgggtcatggcgcagattgtgatgaccgatacgttttccggcgtatcctcacaagccaaagccggtacacagggcgaccggcgggtttcttatgcgcggtatgataacctgacgcaggagctgatgacgctgctgggggacgagccgcagagcgatgtggtggtcaccagcgcattcgccaacaatgtcaatggcgaacaatgtatcgccttcgccagcctgatttcggtgcttgtcgagggcgtttccagacaggcgttcctgatgcgcgtcgaaccggtcgccatgattcaggagtattgcggtctgaaggacgcatacaacggaatccagattagcatggtcaaccggaacggtgcgtatctgttccgcgcgaacatgctcaaaaacagcaatttctatgagtttttgcggacgtacaatgacctgacctatccgcaggcggaggcagtcagggagaaaatcaattccgacccgcttcccggcaagctgacctgcctgaattcgcagggaaacaagaccatctgcgcttattcctccaaaacctacaacggctggttcctcgtcggctcaatcgaggtcagcgcactgtctcaggcgtcggttcagtggtcgctgctgcttgtaacgacactggcgtttgcgctgctgattgcggtgaactcggtctatttcctgctgctgaataagcggctgagagagagtctggcggcggtcgagcatgccaatgcagcgaaaacccgattcctttcgacgatgagccatgatatccgcacgccgatgaacgctattttgggcatggcaaccattgcgcagagcaatctggacaacagggaaaaggtcgatgaatgtctgcgaaagctgctgctggcgggcaagcatctgctgacgctcatcaacgatgttctggatatctccaaggtggaaagcgggaagtttacgctcagcccgacaaccttctcgcttgccgaggaggtggaaaacctcatcaatatcatctacccgcaggcatgcagaaaggatatccggctggatgttcggcttcagaatgttttgcatgaagaacttttcgccgataagctccggctcaatcagatcttcatcaatatcctgagcaacgccgtcaagtatacgccgtcgggcggaagcatacaggtgcttttgcgggaagaagcgttggacgaggaaaaccgtctgaggctgatttatcgcgtgcaggataccggcatcggcatgtcgcaggaatacatcaagacgctctatgagccgtttacccgtgaaaaggacggacgcatcgacaaaatcgaaggctcgggtctgggtatggcgattgccggacagatggtcagcctgatgggcggcacaatcgacgtgcagagcgaacagggcgtcggaacgacgttcaccgtgcggattgagcttccgtttgaagaagaaaagacgccgcccgttctgcgcgcaaagcgggtgctggcgatgggttcgccggatatg

SEQ ID NO: 728 - DNA, 35461 bp, unidentified
  source 1..35461: mol_type = unassigned DNA
agctaagcaagctgaagaataaaagacttcacttcgtctgtttttataatttgttaaagccgttactccctcagaacgaggggtaatggcttttttattaacactgattaagaacatgcgtaaatgtgaacgggaatgattaattttttattaaatttgcaaaccaaagagactcttatttgttataatgctcgtaatgcaacttaaaaaactcttttcggttaatttacgagaacttgcggttaaatcaggttaataggttaggagtgttaattagggagtgttaattttgtgactatgaagaagtcaacaatatggatattaggcatcgttatggggttatctttcctcagcctcttgtatctgcaaatcagctacatagagaagatggtaaagatgcgtaacgagcaatttgatgaatctgtgaagcgtggactgatggctgcttctaaagaagtggagtccgctgaggttgcccgttggttgcgggaagacatctctgaggcagaaaagagagcgtgggaattgactgagcaaggacaggcattggtgcagacacaacggtttacggtgacgtcgccggatggttccaagtattcggccatggaacttcagacgatcacaaataagccgtcagaactgccgagagcgatgatttcgcgtaagcatggcgctaagacgattcctaaaacagctcgtacacaaattgatttaatgaaagaacgttatgtgtaccagcgtggcttgttggatgaagttgccttgcagatgttatatacggcaagtagcaagccgattgaggaacgcatcaactttaagaacctggatcagtacttaaagtcgggcttggtagataacggcattgatctgggatatcactttaaggtgattgaccgggatggacgggaagtataccgttgttcggactatgtcgatgaaggtagcgagtattcttactcccagcctttgttcctgaatgatccacctgcccgtatgagtatcgtaaagatacattttccgggcaaaagagattatattttcgactcgatcaactttatgataccgtcgatgatattcacctttgtgttgctgattacgtttatcttcacgatttatatcgtgttccgccaaaagaaactgacggagatgaagaatgactttatcaacaatatgacgcatgagtttaaaacgccgatatcgactatttcgctggcggcgcagatgttgaaagaccctgcagtgggtaagtcgcctgccatgttccagcatatatcgacggtcatcaatgatgagacgaaacggttgaggttccaggtggagaaggtactccagatgtcgatgttcgacaaacagaaagctaccttaaaaatgaaggaactggatgccaatgagttgattaccggtgttatcaatacattcaccctgaaggtagaacgttataacggtaatatagagtcggaactgaacgcaacagacccgaatatctttgcagatgaaatgcatcttacgaatgtgattttcaatctgatggataatgcggtgaagtataagagaccggatgccgatttggaattgaaagtgaagacctggaatgaaccgggcaagctgatgatttctattcaggataacggaataggtattaagaaagaaaatttgaaaaagatatttgaaaagttctaccgcgtgcatacaggtaatctgcacgatgtgaaaggctttggattgggattgtcttatgtgaagaagattattacagaccataagggaactatccgggcagagagtgaactaaacgttggaactaaatttattattgcattacctttacttaaaaattaatgatatggacgagaaactgcgtattttattgtgcgaagatgatgaaaatcttggcatgcttttaagagaatatttacaggcaaaaggttacgctgccgagttatatcccgatggagaagcaggatacaaggctttcctgaagaataaatatgacttgtgtgtgtttgatgtgatgatgccaaagaaagacggattcacactggcacaagaagtgcgtgcggccaatgccgaaatacctattatcttcttgacggcaaaaacattgaaggaagatattctggaaggtttcaagattggtgccgatgactacatcaccaagcccttcagtatggaagagctgactttcagaattgaagctatcctgagacgtgttcgcggaaagaagaacaaggagagcaacatctataagattggtaagtttacattcgacacgcagaaacagattctggcgactgccgagaagcagactaaactgaccaccaaagaatccgaactgctgggcttgctttgtgcacatgccaacgaaattctgcagcgtgactttgcgttgaagactatttggattgatgacaactatttcaatgcacgtagtatggatgtatatatcacaaagctgcgtaagcacctgaaagaagatgattcgattgaaatcatcaacattcacggaaaaggatataaactgattactccggaggctgagtcttgatgagactcggctcctctgggggagagaaaataaaaaaggcggtttgcatgtatatgctaaccgccttctttatttcttttcttttgatattagtcgacaattctcttgttgatgacaatgtaggaaatcaatcccactacaaccaaaacggcagaactgcccaagatggcattgttgttaacattgccggtaaaagaacatgcaaccaggattacagctcctattacgactaatatcaatcccagattttttaataagcctttcatgtgtgtgtattttaattagattattatattctttcgtattcttgtcacaaagaaaagcataattctttaacaagcgaaattatttttgcaaaaaaaccatattttaataaagaatgaagaatgacgaatgaaaaacgaagattattaatcactaaaccctaatcgctgatcactgaatttcagtctttcgtattgaaaaatatttttctcaatacttcctggcttatgctcagttcttctacggtaatgccgcgtaatgcttcttttaaagtttggttagcgattacccgtgcgcgttcttccagttcttttccatctttggtgaggtggataagattggtgcggcggtcttttttatccgagatacggactaccagatgttgacgttccatgttatcaatcaggcgtgtcatactgggcttgtctttaaaagttgcattgcacaactcttgttgcgtcactccgtctttttcccacaaaaagatgaggacagtccattgttccggagtaatctccaaaccgttctggcggaagttacgggacagttttcggttgattgcggcggaaactttaccattcaggatggcaaaaatcagccggatgtcaaagttaaattgctcgatcatgaaattattgtttaaacaactttgcaaaggtaagtcacttctatgataaatcctaccttcaggcacaaaaaaacattaaatgtttgtagatcaaaataaaatccctacctttgcaccgcaaatttttaaacgaattattaattcattaattaaacaagtatgaatcaatacgaaaccgttttcattttaactcccgttttgtctgatgttcagatgaaggaagcggtagaaaaattcaaaggcatccttactgctgaaggtgctgagattgtaaatgaagaaaactggggactgaagaagctggcatatcctatccagaagaagtcaaccggtttctatcagctgattgagttcaatgcagaacctactgtcattgagaaattggaaataaacttccgtcgtgatgagcgcgttatccgtttcttgactttcaagcaagacaagtacgctgctgaatatgctgcgaagagaagaagtgttaaatcaactaaaaaggaggattaatcatggcacaacaagttcaatcagaaatcagatatttaactccgccctcagtagacgttaagaagaaaaaatactgccgtttcaaaaagagcggtattaagtacatcgactacaaagatcccgaattcttgaagaaattcttgaatgagcaaggtaaaatccttccgcgtcgtattaccggtacttctttgaagttccaacgtcgtgtagctcaagctgtgaagagagcacgtcacttggcgttgctgccctatgtaactgacatgatgaaataataggaggaggaaagtatggaaattatattgaaagaagacattgtaaacttgggttataagaacgacatcgtaactgttaagtccggttatggtcgtaactacctcatcccgacaggtaaagctgtgattgcttctcctgctgcaaagaaaatgttggctgaagatttgaagcaacgtgctcacaaattggaaaaaatcaagaaggatgctgaagcattggcagctaaattggaaggcgtatctttgaagatcgctactaaagttagctcaaccggtactatcttcggttctgttggtaacatccagattgcagaagaattggctaagttaggtcatgaaattgaccgtaagatcatcgttgtaaaagacgctgtgaaagaagttggccagtacaaagctatcgttaagctgcacaaggaagtttctgtagagattcctttcgaagttgttgctgaagaagcataattaaacttcatatataaaagaagcccggtttccgaaaggaggtcgggcttttttatttactgactggttagttctaattgtattctttatcaataaaagtaattgtttcatcaattagtttcatgtagtggctgtatgtgagatgtgggtcatcatgtacaaaagagatttgccgcatggcagcaaacccttccgggaggaggatggtgaattccaagatttctcttagtgacttattctcattagaaatttttctaaattcttgctgactgacgcatttctctaccgctgtctcttttgctttggagaatccttcataaaaaagatgtgcattttttattacggcataggcttggatgatttcgacagcaagctctttatttttaatattttgcatgacagaagaagctctgagcatttccatagcatcggtgaccggaagaaaatcttgtgattggaatgggaaatagccgtagtaattcagagagtcggaggatgcttcattcattttgtctttatattgaagcaggtagcatgcaccttctttgttgattttttcgattttcatcatctcttctattgtttcccggttgataagtaattcacttttgaccagttgcagagcctgtgccacctcttttttcttgttgtgctcctgaatcatatcacttcccacgaatgtgattgcaatacccagtacgactgcaatgaaattgcagatgaaatcacctaatcttcccttgatagctgatcgcttaattttttctatcagttttgtattcataatattagcataatatgtagattagcaaagataaggattttcagaactaatcaaataggaaaagtgatgaatcactgaagtatctttgggatggtacaaatgggcataaaaaaaagtctgttcgtgctttcgcacgtcagactttcaattctctcagtgtgttgttctgaattattcagctacaactgctgcgctatctactgctacagtatcagctgctgcggctgcctcggctgctgctgcggctgcttcttctactgctgcgattgaatcagcaatacggatagaatctgctgctgctttttcagcgtcagcttgtttgttaccacaagatgcgaaagatactgctacgatagctacggccatcaaaactaattttttcattttctttgctttttaaaaacgtaatacaatcaattgctttattaaaacgctgcaaaggtatgtactttttcaatatgttgttctccaaatcccaactttttttatgttttttttggaggttagccccttttgattactttttgtatgtttaataacatactaatcttctgcaatactgttatataagtagcgtttgatgctccttttaggagttttctcaaactcggtaggatagagctgaatctggctgactttctcgtaactggccacactgctattcaggttctttaagttctcgttcatgatggttttgaggttttcctcttggttcagtccaagggaatccaaagcttcgtaatctgcatagactaaagctaccagttttttattgcgttcgataacgagactttccagtacgaaaggcaggttgttgagacgtgcttcgatttcttcggggaagatgttttgtccgctggaactcaggatcatggtcttactgcggccacgaatataaaggtttcctttttcatccagtttacccaagtcaccagtacgtagccagccgtcttcggtgaagacttctttagtggcttccggattcttataataacctgtcattacattttcgccgcgtacctggatttcgccgatttctgcctccggattttctttgtagatacgggcttccatgatgtcgagcactcgcccggaagaagtcgggatgaattcgttccagggagcgtaactgattaacggcgcacactccgtcatgccataaccgatggtgaacgggaacttgatgcgatggaagaattcttccacttccgggttcatggcagcaccgccgataatgacttctttgaaacggccgcccaaagcatctatcagtttcttccggatttgcccatagatttgtccgtcgagcaaaggaatgctgagtgcccatttcatagtctttttatttatgataggttgaatgacattcttatagattttctcgataacgagtggcacggtaataatcaagctgggttttacctcttcgaaggccttcatcagaatctttggagaggggactttgcccaaaagtgtgacgtgagtacccacggcagtagctgtaagaaagtcgaaagcgcaaccgtaggcgtgagccaagggtaagaaggagagtactttatctccctttttcaacaactcggtgcggataccgaaagtgacatttcctgcgagattgtttcctgtcagcatcacgcccttactgaaaccggtggtgcccgaggtatagttcagcagcattaccttatcattggaaagagtggtatactgcacgtcttcccggtggaaacctttcggataagttatgtgcatttcttcatccaggtgtttgaggaaacgattgattgtttcaccgtcgcgctgatgcaggcaacggaaatcggaaagggagaatacggcacgcaatccggccaggcgttcttcttccagatgttcccagatggaatcgctcgtaaagaggaaaacagactcggagtggttgacgatatgatgtacatcattcggattaaaatcttgaagaatgggaacaacgatagctccgtaagtgatggtagccatataagcgatgcaccaacgggcattgttcttaccgataatagcaattttgtcgccccggcgcaagctgcaatgtttgaatagcaagtgcaatttggctatctcttgcgccacttgtccataggaataactctcgtcttcaccgtaatcggtatagcaaggaaggtcccagttttcacggaaactctgctcgtagagtttgataaagttttcttgtatcattgcacgaaaattgatgatttgtgcaaaagtagaaaaaatctaataattatatgtaactttgtagcagaaatgtgtttagaatagatatgattgataccaatatatttcaagataagacagcggtttactatacattaggttgtaagttgaacttctcggaaacctctactatcggtaagattttgcgggatgcaggtgtgcgtacggcacgtaaaggcgagaaagcagacatctgtgtggtgaacacttgctcggtgacggaagtggcggataagaaatgccgccaggctatccatcgtctggtgaagcaacatccgggggctttcgtggttgtgaccggatgttatgcccagttgaaacccgaaactgttgcaaagattgagggtgtggatgtggtgcttggtgccgaacagaaaaaagatttgcttcaatatctcggcaacctgcaaaagaatgagtcgggagaagcttatgcttcggcgctgaaagatatccattcgtttgcaccgtcgtgctcacgtggcgaccgtacccgttatttcctgaaggtacaggatggttgcgattatttctgctcctactgtaccattcctttcgcccgcgggcggagtcgcaacggaacaattgcatccatggtggaacaagcccgccaggctgcggccgagggaggaaaagaaattgtgctgacgggtgtcaatatcggggatttcggtaaaactaccggagaaactttcttcgatctggtgaaggcgctggatgaagtggaaggcattgagcgctaccgaatttcctccatagagcccaatttgctgactgacgagatcatagaattcgtttctcattcccgcagtttcatgcctcatttccatattccgttgcagtccggtagtgacgaagtgctgaagctgatgcgccggcgatatgatacggaacttttcgcttccaaagtgcggaaagtgaaagaagtgatgcccgacgcttttatcggcgtggatgtgattgtgggcacacgtggtgaaacggatgaatactttgagcaggcctacgaatttatcaaaagcctggatgtgacccagcttcatgtgtttagctactccgaacgtccggggacgcaggcattaaagatagaccatgtggtaactcccgaggaaaaacaccgtcggagtcagcgtctgttggaactttcggacgaaaagacgcatgcattctatgcccgtcatatcggacaaaccctgcctgtgttgttggaacgttccaagccgggaactcctatgcatggcttcactgctaactatatccgtgtggaggttccccacaatgatacattggataatcaggtggtgcctgttcgtttgggcgattttaatgaagacggaacggcgttgcagggaatggtgctattataataaggtataagaaaagtatgaaatcgaaacttgtctactggctgacttacgctggcatgtggcttctggctctgcttccttttcgggcactttatatattgtccgatggagtttgttttttgatgcgtcatgtggtgcattatcgtcgtaaggtagttcgtaagaatctgaagaattcttttcctgaaaaatccgaggctgaactgcgcgagattgagcgtgagttttatcgctatatctgcgactatatgctggaagaaataaagatgatgcgtatgtcgttcgaagacctttcccgtcgtatggagtatggtaatactgaagaatatcttgccatgctcgaaaaacatggaggtatcgttgtactcattccccattatgccaattttgagtggctgacggcgatgggagccttcatgaagccggaagacgtaccattgcaagtgtataaacctttgcgaaacaagtatatggatgaaatgtttaagatcatccgtgcccgtcatggtggctataatgtaccgaaacattccactgcccgcgaagtgatccggttgcgccgtgaagggaagcatgtagtgatcggactgattaccgatcagtctcccaatcgcaatgaagcccatcactggacaactttcctgaatcaggataccgtatttatggatggtggtgaacgtattgccagaatgatgaattatcctgttttttattgtgaattggaaaaacggggtagaggatattgcaaagcatactttgatctgttgactgaaaccccgaagcaaactgccgagggagaaataaccgaactatttgtgcgtcgcttggagcagaccattcgccgtgctcctgcttattggttctggtcgcataaacggtggaaactcacacgggaagatttgaagaaacagcatgaataagatagcagttgtcatattaaactggaacgggtgcgatatgctccactcgtttcttccttccgtagtacgcttttctgaagcggacggtgcggtagtgtatgttgccgataatggttctacggatgcatctgttgatatgctttgtcgtgaattccttaccgtccgattgattctgttggaagaaaatcaaggtttcgctgatggttataatatggcattgcaagaggtcgatgccgagtatgtagtacttctcaattcagatgtggaggtgacggaacattggcttcagccactggttgactatatggatgctcatcctgaagcggcggcttgccaaccgaagatacgcagttggaggcagaaggagatgtttgagtatgccggtgcggcgggtggttttcttgatcgttacggctatccgttctgtcgtggtcggattatgggtgtggtagaagaggataggggacaatatgacactatcattcccgtcttttgggctacaggtgcagctttgtttatccgcctgaaagattatcgtgaagccggtggattggatggacgtttctttgcccacatggaagagattgatctttgctggcggcttcgtgcacgtggccgccagattgcctgtgtgccgcaaagtgtggtttaccatgtaggcggtgctacgctgaagaaagagaatccccgaaagactttcctcaattttcgtaataatcttgtcatgctttacaagaacctgccatccaaggattttgcttccgtgatgcgtacccgtgcagttcttgactatatagctgcattgagttttatacttaaactacagttccccaatgcattggcagttcttcgcgcacggcgtgaatatcgtttgttacgttcttcttttactcctgcacgtgaagagaacctgaaaaaaacttccctttccgtgataccggaatggacaaaaagcagtatcttggcacagtattatttacgtggaaagaaatttttctcgcaattatagctttttctttttaccgattgtttattatttaaacgtattgccttatgacaaaattagttagaaagattggactggtggcgcacgacgccatgaagaaagacctcatagagtgggttctctggaactcagaattgctcatggggcacaagttttactgtacaggtactacgggaactcttattcttgaggctcttaaggaaaagcatcccgatgttgagtgggattttaccattttgaaatccggtcctttgggtggtgaccagcaaatgggatctcgcattgtggatggcgagattgattatcttttcttcttcactgatcctatgacgttgcagccgcacgatacggatgtgaaagcgctgactcgtcttgccggtgttgagaatatcgttttttgctgtaaccgtagtacggcagaccatattatttcaagcccgctattcgttgatccgacgtatgaacgcactattccggattacaccggctataccaaacgatttgaaaataaaccggtggttgccgaggcagtggagtctgcaaaaaaacggaagaaaaagagaggataaaggagacggttggttctccgataaggataaaaagaggggaagaacttcacatcggaaagtccttcccctttttctatgtgaagcttccggatgcttataacaaaaatacagacgacttatccgctttattctctacagagtttattttgaaaacagaagtgatagtatttcccatcggcagggcgatacaggctaagacactttttttaagaggataaggtttaaggatagaataggataatcttaacggtgcagctattgaagtgtcatttataagctgttttagctatctacatgccacaacagaacgcttggaaacaatcagaaagatgggaagaaagccgtatgaaaaacatgctttgctttattgttttttttcttttgcctgtagctaaacttcgtcccgcagttgtgggctctacgttttccagttgagggctgtgcagcctgcaattgcgggatggacagcccacaactgcgggacgaagtttagctgcgggcataatgacattaacctgaatgctttttgggaaaaagtaaggatcatatcaagttttatatctatcatttgactttctacataatgagagtatggggcttatcatcccttaattcctaacgaaatgctaactttattcacttgtgcgacgaataaaagagatatttgcatcaattcggataaaggttgcataacgtatattaagcgcttgtgaattagtgaattacaagattaaaagcacgctttttgagccgttttacggtgtagaatgaaactttcctacaccttcctacaccacttcctacactatctatttatctgataatcagataaacataatagtcggtgtaggatgtagacaatattgatgaaaactcaactgtgtgagatttccttttattgcttactgagttcactttaattaaaaaaaaatgtgggagtgggttaagctctttcacattgcacttccactcctgccgcatctaagtctgcacccatgggtggattacgtttagcgagttttagctcaatagctttaacggtggggaaagtacggaacaggcgttttatgatacgtccgcaaacatgctccagcaatttagaaggtatctccatctcagccttcacattttcgtatacatcggcataactgacggtatgtgtcacgtcgtcagtctcggctgcacgtgcaatatcgacttttaatttcagattaatgacaaactcattacctacttcccgctcttgctgacctacaccgtggtaggcaaagaaacggacgtcatcaaggaatatataactgttcatatcaaatagaatattcggtgaatgacaaaaataagaattacctcccagtaaacaaagaaaacaggtgtattcttccataaacaagcgtttgatttggaaaatgagttacgtagtcagccccatacccttcaggggattggggataaggcgatggtattttaaaaaaaaggcacctactatgggtgcctttttctattataaagattgagagtattatccttttcgtccggtttgttctatcagtcctttgatcttctcgttcagactttccgctttcatcagttgttccagcgtcaggtgcatacggtagcgccagtaatgtctggggttagcaggcacgttgatgcgctcttcctgtacattggggttgcgccattttccgtccatagccatccagtcctgcaaggagaggatgcacaggatggagttgctgtaaagatggttgcgtaccacttgctcacaaagttccggagtggcaacggcaggtgcagcgccgtaatgtcccagcatggtgttgtagtaccgttgcgtttgctggaaatcttcttcccaccagccgcgcagcgtagacatatcatgcgtagagatggtgcaaaccgagcggtacggataccagtccggatgtccgaattcctgtgaaggatctttcggcatgcgttgtatctccagactaaggatacgcaggtcgttcatcacccaagctacacaatcggggatcatgccgaggtcttcaccacataccagcatacgggtggattgcgtcagttgcggcaacttcttcatggcttgttcgcgccagaactcgttgtggcgatgatagtaatactgatcgtacaaacgattgaatgctgccttctcccaatcattcagggcacggtaaatgtaatcgtgttgtacgccgatgcgcggatggaatttgtgcgggtcttcacggtcgggcacaaacagtacgtcactgattaatgcgtacagtccgtcgcgtatccagatgctgtcttcgtccgtctttccggcaaagtaagcctctactttgcgctgtgtgtcgaactcgggacgcatgcgatatatttcccatgtttccgtaggctctatgaaggtctgctttacataatcagtatgcgggccgaacatttgtccgaggaagtattcatggatatagggtttcgtgaagaaatcttcgcggaatgccattccgtagccttctatttcttcgcgcgtcattggcagggcgggaacaaactggcccagcagtccgtgtacggcatgcatcgggatttcccaaatgcggaagaaacccaggatgtggtcgatacggtaggcatcgaagtattccgacatcttgcggaaacgcttcatccaccaggaataaccgtctttttccattacgtcccagttgtaagtagggaagccccagttctgaccgttcacggagaagtcatcgggtggtgcgcccgcttgtccgttcaggttgaagtagtagggttctgtccacgcttctacgctgttgcggctgatgccgataggaatgtcacctttcagtactacaccattggctcgtgcgtgttccgttgcagccagcagttgcaggtgtaggtggaactggatgaagaagtagatggcgatatgcggatagtcggcagattccggctggcataacttttctatttcttctgctttgtattctgtgaatttcggccattcgcggaagttgggtgtcttgtaggcatcgcgcagatagctgaacacagcgtatggctgtaaccattctttgttgttttcgaagaacttccggaaggcatcggatgccagaacttgttcgccttcctgtttgtatatcaggcggaagaactcccattttgtctgatttactgcttcatagtctacggtaggcaaagcattcagctctttctgccgtttattgaattctgtcattgcctttttgtccttcaacgtacccatctgtttcagatcggcatacatggggtggaacgcataaatggatatgctgttgtacggataagaatccgtccatgtatgtgtcatggtggtgtcgttgataggtaatatctgtacggctttctggcgggtaagtacagcccagtctatcatttgtttcaggtcgccaaagtcacctactccgaagctcttttcggagcgcagcgagaagatgggtacggctactccggcacctttccagtcgggtagggcgaagtaaacgtaacggtcaccgatcaccagtgtttcgttagcgcctatctgcggatcggccatgtagcggttggggttgttttcccatgccacggcacgacgctctttcttattataaaggatgaatttatactccagcgggaagctgattttcgaggcgtctacttcaacctgccattccgggaagttggcgtcgctcatcagaacggctttatccgcatcccaatctcccagaactttctggttgccgcaaatgcccagacagtgatcattgtcgatacatggagcatacgccttgatcaataatcctttcttgtggctctttggagcggcgttacgttcgggatgtgcaagcagggactccgtgaaagcagacgtgtagaagtattgctgttcgggcagattcttccagcagtcttgcaggcggtagactttcttcttgtcagccgatacatagagcgtgcggggaaggctgttccactccgtacgtgtatctttgccgtcgcgataaatgtgataactgtattgtacgatgccgttttcaggcgcttgaatgtccgcatctaaagtccagtgaatgccatccactgtttgtaaaggtatggctttaccgggctgattgttgcccagttcaagaatagatcctaagactctaacctcttcaccccaacttgtgcggtactcgatatgaaaagatagtatcatataatattagatttagtaatagctgcattgattatgcaagtatagacattattccgcataatcaagcagctaccgctatctaagttttttaaattcctatgcaaacgtttgtgcttgcatttcgcagagctgtttttatccgcaacgtgaagctccgcaagtggtacaaatgaggcaaccttcctgatatacaagtgtttcgttgccgcagttcggacatttcttgcctttggcttctgtgccgtccgttatgtatttcttcaatgcgcgttccacaccgttcttccaagtattgatgctttcgctgtccagttgcagagagccgaccagcttgataacctgttcgataggcatacgataacgcaatactccggagatcagtttggcgtagttccagtattccttgttgaacttttcggacagaccttcaatggtgactttatatccgcgtttgttctggaactggaagtcgtaacgcttgctgccgtccttgtccaccttcttaataatgtgtccggaagtaacgttcttcggcagaataatgccttcatcgtcgtcctgaagaccggtgaagatttcgtaaggatgtccgtccagcaaaccgacgaatgccacccatttttctttattattctggaaacgtacgatgtcggcatccagaactgtcgggcgggtttctactaccgtaggcggcttgcaaggaggcatttcttcttttttatcgctcttggcagaaatgagtacgcccgaacgtgagccgtcacgataaaccgtacaacctttacaaccggatttccatgcctctacatacaggcggtttaccaggtcttcatccacatcgttcggcaggttgatggtcacgctgatggagtggtctacccatttctggatacgtccctgcatcttgactttcattagccagtctacgtcgtttgaggttgctttataataaggtgattgctcaactaatacgtcgatctcttcttgtgtgtaacgtttggaaggattgtgtccttgcgcttccatccatgtaacaaatttggggtggaagacaatatattcttcaaaagcatctccggtttcatccacgaagtctacgtgtacgttagtgtcgttcggatttactttacggcgacgtttgtatacgggcaagaatacaggctcgatacctgaggtagtctgagtcatcagactggtggttcccgtcggtgcaatggtaaggcaggcaatattgcggcggccgtatttcttcatatcctcatataactggggatctgcttcgcgcaaacgattgatgaacggattattcttttcacgttcggtatcgtaaatttcgaatgcaccacgttcttttgccatttccactgatgaacggtaagcactcagggcaacggtcttgtgcactttttcagagaattcggtagcttcttccgtaccgtaacgcaatcccagtgcagcaagcatatcaccttcggcagtaatacctacaccggtacggcgtccttgtccactcttcttataaatcttgtcccacaatatacgttctgtatgtttcacatcttcgctttcggggtcagcatcaatcttttccatgatgcgttctatcttctccaattccagatcgatgatatcgtccataatgcgttgagccaacgctatatgtttctggaacaattcaaagtcaaagtatgcatccggtttgaaggggtttaccacataagaataaagattgatagccaacaaacggcaggagtcatacgggcacaagggaatttcaccacatggattggtggaaacagtgcgatatcccaggtctgcataacaatcgggtacggattcttttaatatggtatcccagaacaatacacccggttctgccgatttccatgcattgtgaacgatcttcttccacaaattggttgcattgatttccttctgcacagttggttcagcggcattgacaggatattgttgaatatatggagtacctgtgatagcagcggtcataaatgcatcgtccagtttcacagatacattggcacctgttactttgccttccgtcattttagcatcgatgaacgcttctgaatcgggatgtttgatagatacacttagcatcagtgcgccacgccgtccgtcctgagcaacttcacgtgtagaattggagtaacgctccataaatggcaccaggccggtggaggttaaagccgaatttttcactggagaacctttcgggcggatgtgcgacaaatcgtgtcctacaccaccacggcgcttcatgagttgtacttgttcttcgtctattttgaagatggcaccataagaatccgcctctccatctactccgatcacgaagcagttagacaaagaagctacctgatagttgttaccaattccggtcatcggacttccctgcggaacgatgtacttgaagtggtcgagcagatcgaatagttcctctgcacttaatggattagagtatttagcctcgatacgggctacttcattggctattctccaatgcatgtctttcggagacttctcgtaaatatttccgaaagagtcttttactgcgtacttgtttacccaaacacgcgcagctaactcgtcgccctgaaaatatcgtaaagattcttcataagcttcctcgtaagaataagtttgtttttccacgattcttttttccttagatttattttttaataagtaagagtgtagaagtgatacctatcattaacaaatgcgattgcaaagctaagaatgttttttgttatagcaaaataaaaacagaataaattatgaacaggctatgagattcccatttttgaataatagattgctgatttataaaatattagcactgttgtgtgaacaaaaagtttccaaaaaagaaaattgtttctagactttgattaaacaggctaattgattttagaaaacgtagataaactttaaactcgttatttgacaacaaattgctattctttttctatatttgcaaaaaaataaaagaatggaaatcctaaaacagagaagaacaatccgcaaatatcaacagaaagatatttcttcagatttgttaaatgatttgcttgattctgcatttcgagcctctacagtcggaaatatgcaggtgtacagtgtaattgtaacgcgtgatgcagaacggaaggctaggttggcaccggctcacttcaatcagccgatggtgaaaactgcacctgtggttttgacgttttgtatagacctgcgccgttttactaaatggtgcgaacagcgaaaagcaactcccgggtataataatttagagtggttcgtaaccggctctgtagatgccctgctggcagcacagactttttgtgtggctgcggaagaaaaaggattaggtatatgttatctgggtacgacgacttacaatccgcaaatgataatcgaagccctggagttaccggaattggtgtttcctattacaacagtgacggtaggttggcctgccgaggagcctgcacaggtagatcgattgccgctggaagctattgtgcatgaggagacgtatcatgattatactcctgaagatatagatcgcctgtatgcctataaggaatctttgcccgaaaataagcaatttatttttgaaaacaacaaagaaaccttggctcaagtctttacggacgtacgttataagaaagaagataacgaagtaatgtcggagaatctttggaaagtaataaaaaagcagggtttttaaccctgcttttttaatgatgcttggatatcatctatttctgcgcggaaagttttgtctacttcccgtaattctttaatggttttgcaggcgtgcaatacggttgcgtgatctttgtggcctattaatgcgcctatcttagccgtcgaaaaatctgtataggatttagcgagaaacatggctatctggcgtgcctgtaccacttcgcgttttcgtgatttagtatggatggtagcagtatccagtgagaaatgcttgcataccacgttgatgatgtcatcaacggtaatagatttactttcactttttactaccttccgtacaatgcgttgcgtcagttccagatcaatttccttattatatatagtagaatgtgccatgatggagatgacgataccttccaggtcacgcacgctgtcacccacattttctgcaatataatcgattacttccggagggaactgtaaaccgtcacgatgtatcttattgcgcaggatgttcttgcgtaattctacggttggtctttccagttcagctaccataccccatttgaaacgggtgatgagtcgttcttccatgccttgcaataatacgggagcacggtctgaagtcaggataagctgtttaccgttttggtgtaagtgattaaagatatgaaagaatgtattctgtgttttggtaacaccggcaaattcttgaatatcatcgataatcaatatatcaattgattggtagaagttgataaaatcgtttgtagtattgttacgtacagagtcggtatattgtacctggaacagatgtgccgatacatatagtactctcttgtccggatagagttctttgatttttgtgcctatagcatttgcaaggtgcgtctttcccacgcctgatgctccatagaaaaacagcggattgaaaattgttttcgccgggttttgagcgacagcttctgctacgctgcgtgaaagtttgttgctatagccttctataaatgtttcgaagttgtattcaggattcagatgaggatctaaatctgcaataggagcttgcggtatttctctgccgattacctttttctgtggaataatagtgcggggagtagattcgagattgacggtagtacgtgaactcttatccaccataacattatacaataacttggtgccatcaccaataactttatatagagttttacgcaacaagtcaacaaacttgtcctccaaaaactcatagaagaactggctgggtacctgtacgaccagcgtcttgtcctcatattttaaaggtatgatggggagaaaccatgttttgtatgtctgctccggaacattgtctctgatgatttcaagacagcggttccatagcccgacatgatttaattcactcataacggctttaaatacatttattaattaagcaaaacttctacgcatgcaaaattcgcaatcttatttgagaaaaacaaatgtgttttttcttgctttttatctaaaaacaataatctctttactttcaactacttatcttgtttcatgtaaatagccccacagggaggctattgcatttttataagtatctgtattctagggtgatatataagaaaggaataaattttttaacttttcaaataatctgacagatgggaatactttagtttctacatggacttactgaggctttttcttccaattctgtttgctcctattatttagacttattctatttaaagagatttttcctacttatcttttttgccgaacagggagaaatgaacataccttttcggatgtgatttcaggtcttcaagaaggctggcagcattggctgttgtagcattcaaattattgtaaagcgatggatcgtttaacaacaagccgattgtattgtctttcctgcctaattggtctgtaatcatttttgcatttgctaaagtcgaatctattctggcaaatgcggcagcgtaatctatttctttcagattatcactgacagtgacgaaattatctcctatggtgttcagctttttagtaagctggggaatatctttactcataatggcctgtaactgtctgctggtgacttccatgcttgccattgtgttttgcacgctgtgcagtgtaccgggaattgccgggtctccaaggattgtattcagtgaagcaaggatagagtctagcttgggaagcatcttttctacctgaggcatgatggtggctacctggtccattacaccattgttgacattgccttgtagggtatcacctgtcagatacttctcgcgtggattattggcaagtagtaagttcatttttacaccacccatcagttcggaggctaattcggcggtactgcctttaggaatacgcagttccgggtctacatctatttccgctaccacttttcccggttcattgtagtcataataaaggtcgcgtacaatacctacacgaaagccatcggcaaagaccggactcgatttggtcaatccattaatgttatggaacttgacgtagaaatagttggtaggcttaaacatatgaatgcctttcaggtagttaataccatataccaatatgcagagagcaataatgcccgcaattcctattctaacttctttagtaagatacttcatcatgatgttatagtcttattatttatttcttttctttttaaattcttcgatagcagcgctgacgcttgtcttctttccgtttttgaaagcaatgataaatgcgtctttgaattttggtgctatctcccgtttagttcgtaataccttattataatcggtcgatgcaccgtatgtgtatttacaaagtccgccttcctgataatactctacacctttcagcccttttagtcgtttgtcattagcggcaagcggacgggaagaagtaagtatctgtattttaaacactggagcagcactatcggtttgcctgtcagctactttttctgtattttgtttggtttcggtgttattggaaacgggggatgcaggtatctcttcttctaccctaccggcatccgtatcctccggtagtagggtgcggctgcttcctgtcatccgtatttcatgttcacgtttataagacaggaaagcacggaatattccgttggcaagtgtggtggttcccgcttccgaattgagataacgttcttcttccggattggatatgaaaccgagttctaccaggatgctgggcatggcacttgctttcaatacaaggaacccagcctggtgtacaccacggtctgcacgcttacaggtatggcggaattctttctgtaccaatgaggcaaggtgtacgctctgagacatgtatttatcttgcatgaattcaaagatgatataagattcggctgagtttggattgaatcctgcgtaccgtgtcttgtaatcactttcgtataaaattacggagttctcccgtttagcgacttctaaattggcatccgacttggctaaaccgagcgtccatgtagaggctcctttaacagttttaccgcccgctacggaattggtatgaatggaaatgaataaatcagctttagcattattggctatttccgcacgtctgtcaagtgggataaatacatctctttcacgggtatataccacttttacatcagggcaattcctttttatctgtttgcctaatttgagggcaacattcaggttgatagtcttttctttggagattcggcctaaagcaccagggtcatgaccaccatgtccggcgtcaataacgacaacgaagtcttttgcttcgatgctggtagtgcaaaaaggagagatgaacagcccgaagcaaatacagatatataatatgtgtcgtttatatagtttcatacccaaaagtcgttgcaaatgtagtggaaatttatagaaaactcacgttttacatgaagttttgttacttttccccaggatttgtgagagatttctttaaaacagactaactttgcacccgcaaattaaatagaaaaaaggtatgttagttcgttttcttaagaactggacattgccactggcgatgctttcaggtactttgggatactttattctcgcaaatgtccctttcttggcgcctaccaaaccatatattaatgatttgattgcgtatattactccactgctgatctttgcccaactgttgcttactttttgtaaagtagaaaaactgaatgaactgaaacctaaagcatggcatggctggttgctgctgtttcagacaatttcatgtctggcaattgccgctttgctggtatgctgtccgatggatgaaatatatcgggaagtatttgagggggcgatggtttgtgtgatttgtccaactgcaactgcagcggctgtcatcactggcaagttgggaggcagtgcatctacgttgactacttataccttattgtctaatttgctggcggcagtagcggttcctttggtttttccgttagtggagcctcatgctgacatgactttctttgctgctttcctgaaaatcctgagtaaagtgttcccgttgttgttgttccctttcttcctggcgtggtttctgagagtgtttatgccccgtgtgcaccattttttattgggtttccatgatcttgctttttatttgtggggcgtagcgctcgctattgtatccgggcaaactgttcgttccctagcaatcagtgatgcaccggtttcagtggaaatactgatagcctttgccggattagtggcttgttgcctgcaattctttctgggtaagaatataggtggacgttataatgaccgtatcagtggcgggcaggcactgggacagaaaaatacggttcttgctatctggatggcatatacttatctgaatccactttcctccgtgggaccgggatcttatgtcttgtggcagaatctgatcaatagctggcagctatggaaaaagagaaagagggaagaggaagaagcgcaacattaacgcaacagcaattcttcctcgttatatcttggcctgttctttacttcaatgtagattttaccgatatattcgcctacaattcccagggataccaatattgtaccacctaccagccagagggaaatcatcagagatgaccatccgggtacagtgtcgtggaagtagtaagcgcgtagcgtccagatagttacgcatacggctatcagtataaaaatacagcctagccagaaaaccatgcgcacaggtttgacagaaaaagatgtgattccgtcgatggcaaagtttaacatcttcttgaatggatatttcgactctccggcaaaacgcttgtcgcgattatagtaaacacaggcggtttggtaaccgatgagaggcaccagcccgcgcaaatagagattgcgctcgcggaaacggcaaagttgttggatagcacggcaactcatcaagcgataatccgcatggttataaaccgactttactcccattattttcatcaacttgtagaaagcgagggcagtgctacgtttgaagaaagtgtcggttttacgttcccggcgtacaccataaacaatgtcacatccctctcggtagcgttcgagcatttcgggaatggcgttgacgtcatcttgcaagtcggcatctatggaaatggcgacatcacatcgttctttgacggcattcagtccggccatgagtgcattttggtgtcctacatttccggctaggttcagcccacaggcatagggggcattttggtgtaaatccttgatgataggccaagtctgatctgtactgccatcatttacatataagatataactatcctgagagatgtgtcgttctgctatcagtttatccaataggagactgagtcttttatgtgtttcgtgtaatacagcttcttctttgtagcaaggtactacgatagcgagtactggagatttttccataatcaattattctttttgcaatattcgtaagaaatcgggagaaaaacaaattatctttctttgtatttgaaaacaaatctcactagcaggaagtttaccgggatagcgatggtaaataccggtatgggggcgaagggtttggaaaagcctaaccaaaggaacagattcagtaaacttatatgtaggatatagttgatcagatgggctcccccgaagccaaaagctttcttccaagatggcttctttccgaaggtaaaaagggctgtcagataaaaattagcaataaagctgagtatatagcctatgctgtaggctatatttacattgatgaatcgctggaatataaaatatagaccatagtgcagagcggttgcaaagacgcctaccataatgaaacgaataaattccggcagttttttcagtctcttcatattcatagaattgagaaggcaaagttagggattgttgcagaataattcgtacttttgcgcacagaaatcactaaaaacagaaatatatgtcagatgataggaagaaagcgttctggtttatagcgctactcagtatgcttgtgatactcccttttctgggagaaaccattttctattctaaaggggaaccacgtgaggccattgttgccttttctatgttagagagtggtaactggatacttccggtgaattatggtaccgacatagcttataagcctcctttcctctactgggccatcgctgccatctcttccctttttggaggagtgtcagagtattcatcccgtctgccgtctgctattgcattcctggctatgcagttggtgttcttctcttttatagcaaaacgtaaaggggtaaaaacggcttttctgacttctattcttcttctgtcttcttttgaagtacaccgggcagcggtggcgtgccgtgtagatatgttgcaagtgtcgcttattgttatttcattgtgtttgctgtttcgttgggatgagaaggagtgccgcggtattccctggctggctgttttactgatgggctgtgccacattgaccaaaggaccggtaggttctatattcccatgtgtctgtatcggtctttaccagttgttgcgtggacgttctttctggaagacattcttcttgttattgcttgtaggaatcctttctctgattccttatgcagcctgggcgggcgcggcttatgcacaaggcggacagtcttttgtcgatttaatgttggaagagaataccggtcgcttcatgggaaagatgtcctacggatcacatgagaatccgatatggtataatttcctgactgttatctggggctggataccctggactttggtattgctgatctctctctttggactgaagtggaaaaacatgcgtgtgttacctgaggggacatctttcggcgaacgtatcgggaaagcctggaaaaaattccgttcacagtcgcccttgcaattgttcacatgggtggtaattctctttattttcatattttattgcatccccaagagtaaacgtagcgtttatctgcttcccatctatccatttatggcagtgctgatagctgaatatttattggctttggtgcagcgtggggcaaaagtgtttaaaatctctgcacatatatttgcgtctctgtgtttgatacttacggtaactttcatagcggtacgtttaggactgataccggatagtctttttggaactggccgtcatgctgctgaaaatgtatcttttatgcatgctttggaagcggtttctctgtctattcctaaatggtgtctggtggtgcttcctttgatagcggctgcctgcacatggatgggagtagcgaagcgggccggcgcttactccttattatatagtatcgccggatgtatgctttgtcttttcgtttctctggatggggtctatcaacctacagtgttggcagttaaatcggacaagcacctggttaaccaaatcagggaatatgtgccgcagggaacggtctactcatatgatggcatgagcttctattgtgcaaatttctatatgaatgatcagatgcgtcattttgagaaggatttgccgtccggtgagggatatgttgttttgccggagagaggaaaagaactgttgtttgaagaatttggaaatacatacgactttgaagagattttccttacgaagaagcgcagttgcgatttgcgtgatgagatttatatgtataagtttaaaaagaaataaatgtcacccgttacaatcatcgataaatattatccggaggataatgaacggaaacacatcttgttggtgcatagtcgtttggtggccgagaaggctctttcaattgctgatcaccatccggagcttcagttggataaagactttttatatgaagccggcatgctgcatgatatcggaatctttctgactaatgctccgggaatcttctgttttggcgatcagccctatatctgtcatggctatttaggggcagatctgatgcgtcaggaaggatatccccggcatgcgttggtatgtgaaaggcatacgggcgcaggactatctctggatgatattatttcgcaaaacctgccagtacctcatcgggatatgctcccggttagcctggaagagcaagtcgtttgttttgccgataagttttattccaagactcatctggagcgggaaaaaacagtggagaaagcccgaaaaagtctttcaaatttcggtaatgcaggtctgaaacgttttgatcgctggtgcgaacagttcttgtagcaatctaaatttctttaaaaagggagattatccgtataatttacgtacttttgccccttcaagcggaaactataagttgattacgccattgaaagcaaatacattcatatcattcatactactacttgtcttactcctgctctccggcgaggctttttcgcaacgtcggcgtggaagaactgttcccacaggaaccgagcggacagacacctttaatatagaaggtgtacaaagaggagacactttattgaagggggataccctgcaaaacgatacgatacaattgcagcctgccggtaagaaaaagcagcctttggatgctccggtgatttatgaagctactgactctattgtgttcactcagaatggtattgccaatttatatggagatgggaaggtgaactatcagaagatagagttggctgccgaggtgattactatgaatatggacagtagtacggtttttgcccatggtgtggaagactcattaaaagtcatacaggggagaccagtcttcaaagatggggatacaccttatgagacgaatacgattcggtataattttaagagtaaaaagggcttgattagtaatgtagtcagtcagcaaggtgaaggatatgtgaccggtaataacgctaagaagggtatgaacgatgagctgtacatgaagagcggccgttatactacctgtgataatcacgatcatcctcacttctacatgcagatgacctatgccaaagtacgccccaagaaaaatgtagtgacggggcctgcttatctggttattgaggatgtcccgctacctcttgccgtaccgtttttcttctttcctttctccagtagttattcatcaggtttcatcatgccaagttatatggatgactctacccgtggatttggtttgacagatggcggttactatttcgctatcagcgacaagatggatttgaaactgcgcggtgatatctttactaaaggctcctgggctttgaatgcggaaaccaattataatgttcgttataaattctccggtctgtttcaggccagctatcaggtgactaaaaccggtgataaaggcctggatgactatgcagtagcaaaggacttcaaagttgtttggtcacatcgccaggatcccaaagccagtccgaattcgtcattctcggccagtgtgaacttctcgtccagtagctatgagcgtactaatatcggtaatatgtacaattcgcaggctatgacgcagaataccaaaacatctagtgtcagctattcacgtaacttccccgatcagaaactttctattgcagctaccggtaatattgcacaaaacatgaaggactcttcgattgccgtaactttaccggatttgaatattactttgagtactatttttcctttcaaacggaaaaatgcagtaggtaatgagaagtggtatgagaagatttctctccgctatagtggccgcctttctaacagtattactacgaaagatgatcttctgttcaaatccaatctggtgaaggactggaagaacggaatgaaacatgaaatacctatcagtgctacgtttacattgttcaagtacttcaatgtaactccatcggtgagttatacggagcgttggtatacacgtaaggtgatgaaagactgggatccgaatataggtaccagtgggcgggaagtagaaactgatactatttatggtttccatcgagtatataactatagtgccagtctgggggttaatacaaagatttatggtatgtataaacctttgtttatgaagaaaaaggaaatacagattcgacatgtcataactccttctgtcagtatcagtgcagctcctgactttggttcttcccgctatggttactatgatacttatattaaacccaatgctgatggaacacaagatacgatcacttattctccatatgccggacaaatgttcggagtgcctggacaaggaagatctggaaatatttcattccagatatccaataacttggaaatgaaatataaggataagaatgactcaatacgcaaggtcagtctgattgatgagttgggtgcaagtatttcttataatacggctgctaaggtgcgtccatggagtaacctgacattaaatttgcgtttgaaattgagtaagaactataccttcagtatgagttcagtctttgctacttatgcttatgcctttgataaaaacggtagggttgtaacgagtgaccgcacagagtggtcttacggacgttttggacgtttccagggctatgggaactctttcagttacacgcttaataacgatacatggaagaagtggaaagcattctttaccggagagaagagtgaagatgatggaaaaggaaacgaacagactgatgcggacagtgaaagtgacgaaactgatgatgcgggaacaagtaatacgcctaccaagcggaagaaggaaaaagctgctgtagatgatgacggttatcaggttttcaaaatgccttggtctataaatctaagtacaggttttaatataacagaagatacctccagaccaatcaacagagagagcatgcgttatccgtataagtttagtctgaatgcgcttaatattaatggtaatgttaagatttccaataagtgggcagtcagcttcaactccggttatgactttaatgctaaaaagatagtacagacttctttcaatataacgcgtgacttgcactgtttcagcatgtctgccagtctttctccatttggtacatggaagtactatagcttcgttatccgtgccaatgccagtattctgcaagatttgaaatatgataagaagagtcagacacagactaatattaaatggtattaagaatccatttgatattcctttcactgcatttgctttttcataaaaaatatccccttctatactgttgaaacgatttatttatcggaatgcttcagtgtagaaggggatatctttttttctgattaggaattgctttttaccacgctatttcttgttctccatgttctttcaaataggcattcgctctgctaaaatgcttatttccaaagaagccattgtaggcagataggggagagggatgtgcagaagtcagaacaagatgcttgctccggtcgatgaatgcacccttacgctgtgcataagatccccagaggatgaatacgaggtgttcacgctgttcggcaaggacacgtatggcggcatccgtaaaagtctcccagccgcggttctgatgagaacctgcctgatgggcacggacagttagggttgcattcaggagcaggacgccttgctcggcccagcgggtcagatttccagtggtgggagcatctgtaccaatatcatcttttatttctttgaatatattaatcaatgaaggagggaaacgaactccgtcgttcacagaaaagcataaaccatgagcttgtccgggaccgtggtaagggtcctgaccgatgataactactttcaccttatcgaatgggcaaagattgaaagcgttgaatatgagctttcccggagggtatatcggataatgactgtattcttcccgtacaaaatccgttagtgtatgaaaataatctttttcaaattccggttccaaacgtgctttccaactttcttctatttgaacgttcataattttgtgtgttaaaagtttcggatgctaagatacaattttaatctgattcctgtaatagagcattctttttatttcttcgaacagagataaacagaaaaggcagaaatcataaaatctctgccttttctatttgtatctgagtattaaatcaagtaaatattgtgttccttacattcctcacgcatatcttccggccagatactggcttgaatttcgccgatatgagcttttcttaaatagaacatacaaagacgtgattgcccgataccaccacctatagaaaggggcaatgtgtcattcatcagacgtttatggaaatagagttccagtcgtttttcttctccctcttgtttcagctggcgttgcagggcttccttatctacacggatacccatggatgatagctcaatgctgcgctgcaatacattatcccataataaaaggtcaccattcaagcccggaagaccattcaacccttctgtggtatagtcatcatagtccggggcgcgtccgtcgtgtttctctccatcgcttagtttgcagccaataccgataatgaatacagcaccatattttttcgtaatggcatgttcgcgacatttgggttccagatccggataaagttgacgtaactcttccgcatgaatgaaatgtaacttctgaggcagacaaggcttaatctgagggtacatttcatacaccatatattctgtacgtatcatggctgcataaatacgggtcacaatttctttcaggaagttcacgttccggtcttcggtagtgatgacacgttcccagtcccattggtctacgtagagagaatgaagatttcccaactcttcgtctgagcgtatggcattcatgtccgtataaataccatatccggattcaatattatagtctgccaatgtcaatcgcttccatttggcaagagaatgtactacttcggcttgcgcatctcccaaatctttgataggaaatgatactgcacgttctacgccattcaaatcgtcattaatacccatacctttcaatacgaaaagcggggctgtgacacgacgcaaacgtaattccgatgaaaggttcaattggaagaactctttgatctgtttgattcctaattctgtttgttttaagtccaataagggtttataaccctctggttttatcagataactcataagtgtgtactatgtttttgttcggcaaatataggtataatatttatatttgcatcgtatttggctaattttatgagcaatttgtttcttgttgaccagttgtggctctcaaaataatattcttatttataggcttttactgtaaaaaaagacaaatcattaggaatatgcccgatttttttatacttttgtccccgcatttaaggctccgtagcttagtgaatagagcgtcagattccggttctgaaggtcgtgcgtttgaatcgcaccggggtcacacaacaaaaagggggataccatcacggtgtccccctttttccctttccagttgtaaagtcaactctaatgtcctacttccgtcatttctatcggaagagtaggatatgttccttttaatccctctagctctgtaccggtagcgtaaataaatacgcatctgtttacagcgggaatctgtatttcttttacttgttctttccatctgcgttttacgtaaatggtagggagataagttatcatgcctttattttccaaagtttctttggtttttctttctttccggggcaatgtcagtacaatgtaccagtttcgcgtttcgttaagacggcttttaatgtcttggagtatcataatcaattttgattggcgtaatgataaaattgaaggtattgaagaattgtggtttattgtcaacgaccatgggaagtggtgaaacttccagtcgtatgctctaatatttcttttggattttcatgccatttagagtttacacagcaatttttgtctgtgtattgagcttgtatagtggcaggtaaagccaaaaacaataaaatcaagaagcaattctgtcttttgtactttttataatcattgtatatccataatagaattgtcaagatacaaacaggaatcgctatcagaataagaatcagtagagtcatggtaatttgattatttattgtttatatcattctgcgacaaaagtatcacaatttatttgataaaacaagtgaattgtgaataaataggtattacaggacagataaatttttatttcacttcctctaggtttggataataaatcgtaccttcatagaaatggaaaagactactatatacatcggtgaagttataaaaaatgtcatggttgaaaaactggtgacaaaggctgaacttgcaagaagactgcaagttaagcctcagagtgttgactatatgttgacacgaaaaagtattgatacggatactttatataatgtttcaaaagctttggattatgattttgccctgctctattctatcgataaagaacagatgaattatgataggggaaatgaagcttataaactctctactgccaagattttgatagagcttgagttaaaacctgacgaaataataaagttaaatttaaggaaaaagatcagtgaactattaagataaaatattttcttttccataaataaaaaagcgtccgatttctttattcgaacgctttacgtaagttctcccaattgtcgcaaaaatcctgcatagacgggaataatacatttgctccggcatccagtaagacctgtccgtcgatgggacctgtgttgacagctactgtaaatatacctgctgctgcaccagcttgtacgcccataggcgcattttctactacgatagcttcattgggggctaatcctcctttttgtaaagccatcaggtaaggttccggatgtggtttcccatatttcacatcgaaggcagttaccatcagttcgcgacggaacataccggggaagttatgcgatagacggtctaataatgagtgttgtccagaaccggtgaccaccatcggtatcagtccatccgattttattttctgtagtacttcccatgcgccgggcatacgttccggttcggggttactgttgaattctgcactcttttctgcataaatgctctgtatcatttcgggagtggcatcttttccgtattgccgttgatagacgatattgatagtagcagctccggttcgtccttcatgcaggtaagcttcttcacggctcaggtgcaatccatggcgttccattaccttatgccaggcatcggcatggtaaggcatggaattgaataatacgccgtccatatcgaaaagaacggatttcaattgaatttttgagtgcccactggattgaagatagcgggaaatagcttcttgaaacataatacctattgttttatggttgcaaagatacaataaaaaaacgaggtgtgaatgattaaactcatccacacctcgtttatatatggttaactgactctttcttaaagtcttgcctgaatagcttttgactcttcttcatatcccggcttgttcagcaatgcaaacatat

SEQ ID NO: 729 - DNA, 20597 bp, unidentified
  source 1..20597: mol_type = unassigned DNA
agcaacccttgaggatggaacaaagcttgttgaagtatttatgccgagggatatcataatcgattctgctcttgcggcagacagatgcactggatgccggaatttcaccatagcgcatgaagcagcacatcagattttggctgatctgtttccgaacgactacggaaaagcagtcaagtgccgtgggcacattgcctatcgggagagaaaaggaaatgcctcgtgggaagaatggcaggcggatacccttgcagcagagctgctgatgccaacatttctgatcaatgccgaaatagaacgtgtagcgttgactctgccaaatgggattctgtacaaatcagtgtctgaccctaactatgaaaaaattctggagatggctcgacggattggggtttcttggtctgcaatcaggatcagactgcagcagatacaggttataaaaggcaaacccatccactgccatccattggacatcatgcgatttggagaatgaatatgattcagttaaagaaccgtccctttgccggtaaagcaccgactactacacagcaggcagaatttagcataggctggagattttgccctgtttgtggaaataagttataccaaaaaatcgaggggtgttcaggtatactacaagttaagtgcaatagatgcaaagaaaccctgagacttgatctggcatttagatgccggtgattttccagtcattttaacaaatacgggtgcattgcaccctgaatatggactgttcgctccgagcaacgggccattgccgcaaggcaatgtatgaaacgtgctccaaatagccgggcaacagctaattgagagattttctttgaagatccctcagttggttgttgtccggctatttttttagccttcaggtagcctgctcccgtaaaaaggagcaggctttatgtttgtccgtttttcgtggatgccccaagcggctagatatccgtagcaactccgagttttcgacttctcacgctttatcgaaaatttggaggtttaacatgggctttaactacggtttggaaaagaagaattttgatagccagtgggctgtgacccgtaagcagtatgaggatgctggtatgagcagggaagcgattcaggcaatgtacgattacgactgctctgtttttaatgctactcgcgcttaccagaaccatacgcaggaaattgcagcgccgtcctttgaacagagcgaagaatcctactcgcccttgatggacaagtatcagaaagctatttccgttacggatcactactgcgaaaccaagagctgcttcacatggatcggcgaaattgagaacgagcggctgctggctgctctcgaaaatttatcggaactcgacctcaaaattcttacgctctatgtctatgccgggtacaccgagtccgagattgcaatggccttggaatccaaaaggattacgattcataagcgaatcgaacgaatgactatgtttttgaagaacttttgaaccattttctttttcaggtaacaatttggcctttctcgatgcctaccaagtgaagggacaatttcccaagcggcacctgccgcagggcaaaacgtccgacctcagggaccttgaaaactgaatagttccgtcatctggtactccgataatgatacttccgtaattcgcggcccggtcacaaagcagacggggtggctgaaatgccaatgaagcggtacaagtccgctgccagatgtttatgccccactcgcagggggccgagggcgaatatgcgagacctttaatcatattgatccgggaactgtcgggtacgtttttgcgcattcggcagttcccgttttttacgtatcccaatttaatctttacccgaatatccactttgatacatataggaggacatttttatggacgagttgaaccccacggtgcgcgagcaggagatctacgaggagatggagctgacccctgagatggtcaagtccatccgcaccctctgcagcacctgtctgcggcacttcgtggatgcaaaggctttcaagatcgcgcttgtacccagcgcagaccggagcatggacacctgcaccgtctgccagatgcggcgcggctacgattatgtagtcatgcaccgctgacccaaccataccaccataccttgaacgaagcccgctgcggaacatccggcagcgggctttgcacataacaacatggaggtacaattttgcagcaaaactggaaattcaaacgcggagatatcttctttacccacttcggggcgagcaccggctcggaacagtgcggtgaccgtccggcggtcattcttcagaatgacgtgggcaattatcactctccgaccctgatcgttgcgaccatgacaagcaaggcggaaaagaaagtaaaccagccgacccactgcctgttggaaaacgcagggttgaatatgccgtccgttgtgcaggcagagcagatcttcaccatcgacaagagccgggcgctgaagtatctgggacatctgaccccggaggagatgcgccgggtggatgatgcagtacgcatcagccttgcgctgaaccccatgggcagcatccagcagatggagcctatccggcgctctacggcgctttacgcgccgcctgaggtggtggatggcaaaccacctgtctacccctatacgcccatcaaatcgtcttttgagaacgccggaagcatcgaggaaatgatgctgtacaccgagttgcaatccgcagttcatgccatgatccagcggttggaatacagcttcaccttcaatcccagcctgctcaccagcccgaagcgtaagcagcaggtggctgagatcttagaggaagccgagaagtacatttggagaattaaggaggaaatgcgatgcgcctgaacaaaaacaatactttcattggtatcaacccgccgtaccagctttcggtcatccacagcagcaagctgatctacccccgcgagatctaccagcggggcgtggagcgcaagcgggtggagctgatcgccagggacttcaacgagtacatcgtcaacgagccgaaggtcagcttccgcaacggcaggtactatgtgatggacgggcagcacaccatcgagggctgcatcctcctcaacggcggcgcggaccgcccgattctctgcaaggtctacaccggactgacgatggagcaggaagccctgctctttgccgagcagaacggtcacgccgcacccctgtcggcgggcatcaagctgcgcgccaaggtggtgggcggcgatgcgccttccaaggcgtttgtcgcagccaccaaccgggtggggctgtccctcaactacgacagtatgcagctgagcgactaccgcatcagctgcgtgggcacggcgctgaagctgtacgaccagctgggcgaagaaatctactgcgaagccctgcggcacatcgtggaagcgtgggagggcagaccggattccttccgggcggctgtcctgcggggcgtgatgtactttgtgcagctgtatcatggacagtacagcgcggagcggcttgtccgtgcgctgagcggcgtccatcccatggagctctaccgtatcagccgggataaccccgccaagcttccgggctggcggcggtacgtttatcccatctacaccacctacaacggtaagtgcaggaaagatgcactgccgatgaagttctaagctcaaatatctcctttggcaagtgcgatggtccccgaaaaagaccatcgcactttacatatagtattttcttttgaataattgacatattgaactagaaagagaggacaggaatgagcgagatcgcagcctgcactttgattcaggaagagcctgaccgaaagacggagaggtatctgacgatgttcaaggactacccggatgtggtgacggtggagcatcttcaggaaatgcttggcatctgccggaagaatgcgtatctgctggtcaagcagaataagatccactcggcgcgtgtaggacgcagctataagataccaaaactctgcgtggtagagtacctgctcgatcatgatcggcaacttggagggatgcacctttcaaactcccttgcgccatccttgcaaaacactccagaatcttctaaacttatgatgcctaagcaaaggacgtttggctgcgaacagaaaggagcataactatgacaaatgtggccggacatttaagagaacaaaacggtatgtatcagatgattctgagctggaaagacacagatggaaagcgcagaaccaaatccatcagcacaggacttcctgttaaaggaaacaaaaaaagagctgaatctctgttgcgtaaaacacaaaaagagtttaaccctgaaacgatgcagcaggtttccgacctgccggtatcggaatatctgaaccgctggcttcgagaaagcgtgatgagccttccgcccgaaacctatggcagatatgcttatgatctgggaagggtagttgtcccatactttgaaaagaagcggctgtctttgaaagcactctctccgcgcgatctggaaacgttcttccgctatgagcgtcagcaggaggaggccagtgtacagcagcttctggattggcacaaggagttgaccgatgccctacaatatgccgttgacaataattggctgaaggtcagtcccatcaaagaagttgacccctgccttgataactccccggtacttttcaccgacttcatcacggactggttgaaaatgatgaagtcacgagtggaaatcacaacctataccagctatgaaagagcaatcgttcacaagatcgtcccatattttgaaccgctccactatacattgcaggatatggaacagcatcccaaatacatccaagacttctaccagcatgagttggatcgtggccttacggcaaacaccgtcattcactatcacgccaacatccgcaaatgtttacagtacgcttttcaaatcggcatgatccgttccaacccggcagatcgcgttgaacgtcctcgtaaggaaaagttcaagtcggagatttacagcggtgaagaactggagcagcttttcaaagcgattcaaggtgacccttcggagtttggcgttatcatggctgcattctacggcctgcggcgcagtgaagttgttggcttgaaatgggatgccattgactttgaaaacaagaaaatcggcattcagcatacggttgtgaccgcaaaggtcaacggaacgctaacagagatcgcacgagataagacaaaaacaaagtcgagctgccggacgcttcccctgatccctgcctgtgagcagatgctcaaaaagatgaagaaagagcaggagcagaatcggaaggtctgcggcagaagctattgcaccgattatcttgactatatctatgtagacccgatgggaaagcggattcggcccgatttcctgagccagcatttcccggattttctggtcgcacaccagatgaagcgtatccgctttcacgatctgcgccatagctgcgccagtctgctctatgccaatggcgtgagcctgaaggagattcaggagtggctcggtcacagcgacatcagcacaacaagcaacatttatacacatctggatttctccagcaaggtgtcctcggcgaatgccatcgtcaatatcttcccagaaaacaccaaagtataagaaactgggcaaaaaagaaaaacagcctaaaatctttcgattctaagctgttttatgatggagtgccgatggtgggactcgaacccacatggtttcccgaacgattttgagtcgtttgcgtctgccattccgccacatcggctgatattcaattttgggacattcgtaccggtttctggagattggagggatgttcaggagggatgtaagaaatcccgcgccgacaaaccctcaaaatccaacgcacactcgtgaatttcttgcacagacacggaaaatcacgaaggggattttgagtccccctcgtctgccattccgacacaccggcgcatcgttttgaacgacttttattataccggattccctgggcaaaatcaagagaaagtttgcgtcttttttcagatcgtcccgcatggcgtaaaatacatgactccggttcttgcccggcagcaccggctgtgttacactaaggtcagatcaaaacgtaaatgatacccacaaggagggaaccagactttgaaacatctgcattcttttgcccgccgcgcggcggcttttctgctggcggcggtgctgtgcgtctgcatcccggcggcagcggcttcggctgccaccaccatcggcggggccgatactaccctgatccccgcagaggacgaaaactgtctcagctggctgtttggctccaaggataagatcaccatgccctacctgaacatcaaggggcaggggctcaagcgcaatgtcacgctggatcttgaggactgtctggtgggcatcacctacaccgagcttggctccatcggcagctatgtcagcgccagcgccgcgcagcaggcgtggaaggcgcaggcggtggcggtgcactcctatctggaatatcacaagcagtacggctcgtccaccaatgcgctgatctataccccggtcgatcagatcccggcctctgcccgcaatgccatccgcaaggcggtgcaggcggtcaaggatgaggtgctggtgtacaacggcagcgtgtgcgatgcagtatggtcggccagtgcgggctacaacacccagaccggtgtgtacggtacctgcgccagtctggacgcgtggggcacggatgtgccctacctgcaaagcgtggaaagcccctacgaggagcagtaccacaagctgctgcgccgggtgatcggcaaggactacacctatatagaatacaacgacagccgcaccggcgagccctaccagagcgccgacaccacccacaaggatctgggtggctttgtgcagtacaacacgctggtgtccaacggacgcagctaccggtatatcaaccagttcgtttcctcccgctactgcttcgatttcggcaccgatgccagcggcaccccctgcatgacctactacggctatggtcatggcgtgggcatgagccagtgcggcgcagtgggctacgccgccgaggagggcatgaactacaagcagatcctgcagcattactacaccggggcgaagatccgtaccagcactacccgcagcggcggactgttcggctggctggcgggattgttccgctgagcatgtttcactgaaattttggaaaaaccttctcaaacgccgcaagatttggtatactatatccgtttgtgaaaaatgaacgggaaacataactgcgtagaaaagcgcacggattggagtatcagcatggagttggatcaggaaaagcagaatcaggaggccgccgagcgctgccgtgcactggcacagcgcgttgtgcgggagctggctccccgcagcgtacaggtgctggaggacagcgggctgctggaaaaagctttttgtaaaatgaatactgcggtggtgcaaagcgccccggagctgctggtggtggcagacccccagtgggtcaccctgcccgccgtacaggcggaaaaagtgctgctggtgtgcgcagagtacgccggcatggcagactgcgcaaagcagcttgccgcgcagggcttctgccgggagcttgcgtggaaggaccgcggcaaggagcagctgacggcgctgttctgccgcatggctgccccggagctgccggaacttgaagatggctacgagcagcagctggacgttttgcgggagcgtaccctgctggccgagcgcaccgctgcccagcaggctgcccagctggagcggctgcgcagcgacctttccctgagccgcagccacgagcaggaattggaaaagaccctgaacagcgtggtcaactccaccttctggaaggccagctggccgctgcggtatctggtaagcaagtgccgccagctgtggcgcaccttcccgctgttcgtcttttttgccaccctgcgccgggtgggctttgcgggcgtaatggcacaggccaaggccaaaaaggagtacaaaaagctgtttccgggcaaggcgatgcccgccgaccgctttgcggatgtggagctgctggtaaaacaggccgcagaccagcccgctgcgccgtgcatcagtatcgtggtgccgctgtacaacaccccccacgattttctggtggagctgctggactcggtgcagaaccagacctaccgcaactgggagctgtgcatggtggatgccggacaggacgcggacgtgggagccctcgtgcaggagcgtgcccgcaccgacagccgtatccgctatcggaaactggacagcaacgagggcattgcgggcaacaccaatcagggctttgcccttgccaccggtgaatatatcgccctgctggaccatgacgacattttgcacccctgcgcactgtggtatgtggcggaagccatcgccaagcagggtgcggactttgtgtacaccgacgaagtgacctttgaaggggacatcgaccatctgacggtctaccacttcaagccggattatatgctggataacctgcgctccaacaactatatctgccacctgagcgtattcagcgcggcgctgctggcaaaggtgggcggcgacgagcgggcagagttcaacggcagtcaggattacgacctctacctgcgcctgaccgaacaggcagaaaagatcgtgcacatcccgcacctgctgtactactggcgttccagccccgccagcgtggccagcaatatctctgccaagacctattgtctggaagcagccatgaaggcgctgcgtgcccactacgaccgcatgggcgtgccggtggacgcggtgaccatggtgcccaacaccccgggcttctacaagaccgattacaccattacaaagcccgggcgggtcagcgtgctgatccccagctgcgaccattcgggcgatttacgggtgtgcgtggagtccatctaccgcaagaccacctacccggattttgagatcatcatcatcgagaacaacagcaaggagcctgccaccttccgctgctacgagcagctgcaaaaggagcacccggacaccctgcatgtgctcacatggcagggcaccggcttcaattacagcgccctgaacaactttggcgcacgcgccgccaccggcgagtatctgctgctgctcaacaacgataccgaggtcatctcgccccgctggatggaggagatggtcatgtatgcccagcaggaccgtgtgggctgcgtgggcgcaaagctgctctacccggacaataccatccagcacgcgggcatcggcttcggtttcctgacgctggcggcgcatatgcacaagaacttccctgtgggacaccccggctatatgggacggctggtctatgcgcaggacgtgtacgcagtgaccgccgcctgcctgatggtgcgcaaggacgtgtacgagcaggtgaacgggctggacgagagctttgccgtggccttcaacgacgtggacttctgcgtgcgcgtgcgggaggcgggctacaccaacgtgtttaccccctttgcccagctgtaccactacgagagcaagagccgcgggctggacgagagccctgccaagcgcaagcgctttgcctctgaggtggagcggttccagaagcggtgggcaaagcagctggctgcgggcgacccctgcatgaaccccaactttgacctgatgaaggaggacttcagctttgacatcaagccgctggagtgagccttccgccaacgataaaacgaaagggggaacgcagatggagctttcggcctgtatcgtggtgtataacggcgccggggaggccatcagggccgcccagaccgtgctggactgcacccgccgctacccgctcaccttatatctggtggataacgccagcccggacggcagcggccagcagctgaccgccgccgccaaggacggcaccctgcgcaccgccccggggcagacggtgcaggtgctctgccggctggaaaacggcggcttcggcaccgggcacaacacggtactctcgctgctgcacagccgggtgcactttatcctgaacccggatatccagctgacggcggacaccctgagcgaccttgcggactggatggcggcgcaccccggcgtggtgatgacccgcccggggctgaccttcccggacggcaagccccagcagctgccgctgcgccggtgcaacgtgcgcgccatggtctaccgtcagctgccctgtctgcgcttctgggcaaagtacaacgaccgctacctgatggcagacaaagacctgacaaagcccaccgagatcgagttctgcaccggcagcttttcggcggtggacactgccgccttcaaggccgtgggcggctttgacgaggggtacttcatgtatgtggaggacgccgacctgacccagaagatgcgcacccggggcaaggcgtatctggtgccccagtacaccgccatccacgcatggcaccgcgcggcgcaccgcagcctgaagccctttctgtggcagctgcgcagcctgctgcgctacttttccaagtggggctttgcgtggtgagcggggaagaaaaaatagtgtttttgattcgcagaaagcggtgtgccgtcggcacgccgctttctgtcttttccgcctcttgcattttgcgtgctttcatagtaaaataaagtgtactgccatcgtcttttgcaaaaatgcggccttggcagacccaaaatcgtttacagcggacgcagctccgctttgaattaagctgcacatctttttataagaaaaaaggagtgcacaagtatgaaaggcattattctcgccggcggtgccggcacacggctctatcccctgaccatggtcaccagcaagcagctgctgccggtctacgacaagcccatgatctactatccgctgtccacccttatgctggcgggcattcaggatatcctgatcatctctacccctaccgatacgccccgctttgaggcactgctgggcgatggcagccagtacggcatccatctgcagtataaggtgcagccctctccggatggtctggcacaggcctttattctgggcgaagagttcattggcgacgactgctgcgccatgatcttaggcgataacattttctacggcaacggcttctccaagctgctcaagagcgccgtggccaacgcagagaacaagggccgctgcaccgtgttcggctactatgtgcaggaccccgagcgctttggcatcgtggagttcgacaaggacggcaaggtgctcagcgtggaggaaaagccccagcatcccaagtccaactacgccatcaccggcctgtacttctacaacaaggaagtggtgcagatggcaaagcaggtaaagccctctgcccgcggcgagctggagatcaccaccctgaacgatatgtacctgaagcaggacgagctggatgtgcagctgctgggccgcggctttgcatggctggacaccggcacgatggagagccttgtggaggctgccgactttgtgcacatgatcgagaagcgtcagggcatcaagatcagcgcaccggaggagatcgctttcaagtacggctggatcgaccgcgacaccttgctggaaagcgccgagcgctacggcaagagcccctacggccagcatctgaagaacgtggccgacggcaagctgcgctactaagcataaggaaaggcacattggtatgaaaatcattgtcacaggctgcaaggggcagctgggcacagagctgctcaagcagctgcaggagggccgcagcgagctgggccccatccccgaaaagctgctcaacgctacggtgatcccggtggatctgccggagctggatatctccaactacaggatggtggacgagttcgtgcggcgcaaccgcccggatatcatcatcaactgcgccgcctacaccaacgtggacgggtgcgaggtgcaccacgacgatgcctttaaggcaaatgcccttggcccccgcaatctggcacaggctgccgaaaagaccggcgcacggctggtgcacgtttccaccgactatgtgttctccggccgggagaacggcggcatcccgcaggatgaagccaccctgcccggacccatcagcgcctacggctccaccaagctcatgggcgaaaagtatgtggagcggttctgccaccgccacttcatcgtgcgcaccgcgtggctgtacagctactacggcaaaaacttcgtcaagaccatcgtgaacgcgggcaaaaagttcggcaagctggaagtggtcaacgaccagtgcggcaaccccaccaacgctgccgaccttgcccacgagatcttgcagctgtgcgtgacccacgagtacggcctgtaccactgcaccggcgagggcatctgctcctggtacgattttgctgccgagatcatccgcctttccggtgtggacgctaccgttgccccctgcaccagcgaggagtacaaggcaaagcacccggacagcgccgaccgccccaagtggagcgcactggacaaccggatgctgcgctgcaccgtgggcaacgatgtccgcgactggaaggacgcgctggcctgcttctttgcccactgggacggcgaaaacggcatgaagggctgaaaaaaactgaaaatccccccctgcggaagaactgaggatgtatcatgtttgatgcgatttttggcagatctgtcaagatattaaagatccttgcaaaggtgcagtgtgtgctggcctttgtgcttgcatccatgctgtgcggcgcggtccatgaaatgctgaagccctttagtcggttttcagccatcgtgctggggctggtggtcgccgtggtgttctgggtgctgcagatgttccttgcatgggcgctgtacgcctttgcggaactggtggagtacaccaaagagacccacaaggagctcagcgatatgagcgagggtctggcacggtacacccaagccacctatgaggagcttcacagcatgaacaaagggctggaagcatacaccaacgccatgggcaagaccatgaacagcatgaacaagaacctctaccttgtggcaaagcactgctgcgccgaggaggaacgcgcccgcgccgcagcccgcccgcagtccgggaacaacaacaaataaataaagagggatactgacctatgaaaacctatctgatcaccggctgtgccggttttatcggttccaactttgtgcactatatgctcaagaaatacccggagatcctgctggtcaatctggataagctgacctacgcgggcaatctggaaaacctgaaggacgtggagggcgacccccgtcatgtgttcgtgcagggcgacatctgcgacaaggagctggtggagagcctgtttgcaaagtacgatttcgactacgtcatcaactttgccgccgagagccatgtggaccgctccatcaagaaccccgagatctttgtgcagagcaacgtgatgggcaccgtcaacctgctgcagcgcgccaaggaggcatggtacgacgccgatgccaagacctggaaagagggcaagaagtacctgcaggtgtccaccgatgaggtgtacggcgcactgggtgcggacggcttctttatggagaccacgcccctgtgcccccacagcccctactcctcctccaaggccagcgccgatatgttcgtcatggccttccacgacacctacggtatgccggtgaacatcacccgctgctccaacaactacggcccctaccagttcccggagaagctgatccccctgatgatcaacaacgtcaagcaccacaagcagctgcccgtctacggcgacggtatgcagatccgcgactggctgtatgtggaggatcactgcaaggccattgatatggtggcaaacggcggcaagatcggcgaggtgtacaacgtgggcggccacaacgagcgccccaacatcttcatcgtcaagaccatcatcaaccagctgcacgaccgtctgcaggacgagggcatcagcgaggagctgatcaagcacgtcgccgaccgtctgggtcacgaccgccgctacggcatcgaccccaccaagatcaagaacgatctgggctggtaccccgaaactccctttgagaagggcatcgtactgaccattgactggtacctgaaccacgaggagtggatggaccacgtcaccagcggcgactaccagaactactatcaggatatgtacaagaataagtaacagcctgtaaatttaaactccctctgtatctcacggtgcagggggagttttttgctgtcattcccgttacgacccctcccgtgaaaatggaatagcggagcgtccgcagacgctccgctattccgaaattaaaaataatctttccgctgaacatggctagagcgtagcggaagccatttcaaatcgtcccgccttgggtggtctccaccacaaaatccgcgctttcggcaacgctgtactgcgcaaagtagccctcctccagcggcacccaccgggcggcaaaatccgcgtagcgggcgccctcccgcgcctgtaagcgccgggtctgctcggccttggtgcaggtcacgaacacccgcagcgtctcgtaggggcgcagcagcgggtggtggctgtaactgccctctaagatcaccagcggctgtgcgggcagctgtgccgggggcagataagccccttcccggcagctgtacgcccggtaggctacgggctgccccgcgtaggccgggcgcagggcttcgtcccgcaagcgggtaaggtccatgttggcgcagggggtgtgtgcccagtccgggcagcgccgggcgggcggcaggtagaaatcatccgtgcgcagcagggtgcagccgggcagctgcgccgccagtgcgttggcaagggtggtcttgccgctgccacagcggccgtccagcgccagcaccagcgggcgggtgggcttttgcgccagcgcggcgctaagcagcgcagacagggtagacgcggtgatgggtgtgggcatgggtttggcctccttggcaggggtgcgccccaaggggcagacccgataataccccgattatatcataaccgccgccggaagggtagcgtgggcgcggtttgtcataaataacttttttgccggaagggcttgacacagcccgctgcgttgtggtacactactggcgttagaagcaactaaccatgtgagatcccccggcagtgcccgcagcccgggcgtgctgcttctttttttgaagcggaggttagctgcgtcttacttataacagcccggcatccggggcacactgaccccgacaccgccgccaaaggagaaccgccatggagcgtgattttgagaccgtaatgatcgaacaatgtgccccggtactggcggggctgaaacctgcggggctgttccgctacgaaacgcgaaaccgtgccgaccttgcccggcgggtggcgggctggaacgcccagctgaaccccaagggcttgcaggtgcgggtgctgcgggggtgcattgccacccggcagtatctggtgtacgtctaccgcgccgccaagctgcaaacggtgctggcagatgccgctgtgcgcggctttttagcccgggagggctaccgtctgccggaggatgccgcggactgcaacgcgctgctggaccagctcagcctgcggctgtgctgcgcggcggaggcggcggatttcccccacgagatcggggtatttctgggctatccgctggaggatgtggtgggctttatccgccaccggggcaagtgctttacctgctgcgggtgctggaagtcctacggcgaccccgccgccgcccggcagcactttgaccagcttgccaagtgcacggcggtgtacctgcggctgttccacagcggcacgcccattttaaagctggcagtggccgcctgaaaaattgatattctcttttcaaatactctcttttatcctggcaactctcctatgcttccgacacaggagagagcgatcctcctttttacacatgaccgcccggtgcagctttgacccctgcgccgggcggtcgtgtgtttgggggaatgcactcccgcgcggggtgggacgattttgaatgcgctccgcgttgctctgcgcataaatagcggaaagattatttttatttcgcaattctggaaaatctgcggattttccagaattgccttttcacgggaggagtcattctccgtcaccctgccctataaaagggcaaaacgccccttaaaaatgtaaacattggctaactttagctcaagaaatagagttagtcattgatgattttgataaaaatgtgggccggttctggcataaaatttgtttgttcatataaactaactatgagatatgaaaaaactattgacaagccgggttagcagcgataaactatctatgctgatagttacggctgactaaccaccgcagcatcacatatttttcaagggaaggggagcacagcgatgatgcctttgacgatgacaaaagcaggcgagaccgtcaccatccgcaggatcagcggcaaggacgaggtgcggctgcacctggccgagctggggttcgtggttggcagcgaggtgaccgtggtcaacgagatcgcgggcaacctgatcgtgcaggtcaagcagagccgtctggcactggataagaccatggcaagccgcatcatggtgtcctgagcagcgccttcccggtgctgcatgaaatactgcaagggaggaacgagtacgatgaaaacactgaaagacgtaaaggtgggcgagaccgccaccgtggcacggctgcacggcgaaggcccggtgaagcgccgcatcatggatatgggcatcaccaagggggtgcagatctatgtgcgcaaggtggcgccgctgggcgaccccatggagctgaccgtgcgcaactacgagctgagcgtgcgcaaggccgacgctgagatgatcgaagtggtctgatacgaccaaagggaggaaaggtatccgcaatgagcattaaaattgcactggccggcaacccgaactgtggcaaaacgaccctgttcaacaacctgaccggctccaaccagtacgtgggcaactggcccggcgtgaccgtggaaaaaaaggaaggcaagctcaagggcgacaaggacgttgtcattcaggatctgcccggcatctactcgctgtccccctacacgctggaagaggtggtctcccgtacttaccttgtgaaggagaagcccgacgccatcctgaacatcatcgacggcaccaacatcgagcgcaacctctacctgaccacccagctgatcgagctgggcatcccggtggtcatggctgtgaacatgatcgatctggtgcgcaagaacggcgacaccatcgacctgaagaagctgagcgcagagctgggctgtcaggctgtggagatcagcgcactgaagggcgagggcaccgaggccgccgcaaaggctgcggtggcagctgccaaggccggcaagaccggcgagctgccccatgtgttcaccggcagtgtggagcacgccattgcccacatcgaagagtccattcagggcaaggtggatgaccgcttcctgcgctggtacgctgtcaagctcttcgagcgcgacgacaaggtgcaggatgagctgaagctggacaagaccctgatggatcacatcgacgagcacattcaggactgcgaaaaagagatggacgatgacgccgagagcatcatcaccaaccagcgctatgcctacatcaacaccgtggtgggcaaggctgtcaagaagaaggcccgcgtggagcacctgaccgtttccgataagatcgaccggatcgttaccaaccgcgtgctggcactgcccatctttgcagtggtgatgtacctgatgtactccctgtccatgggcacctccattgcggacggcggctgggccatcggtacctttgccaccgactggaccaacgatgtgctgttcggcgagatcgttcccaatgcgctgggcggctttttggaaggcatcggcgtggcaggctggctgtacggcctgatcatggacggcatcgtggccggtgttggcgcggtgctgggctttgtgccccagatgctggtgctgttcttcctgctgtctatccttgaggacgtgggctatatgtcccgcgtggcctttatcatggaccgcatcttccgcaagttcggcctttccggcaagagctttatcccggtgctggtgggcaccggctgcggcgtgccgggcgttatggcaagccgtaccatcgagaacgagcgtgaccgccgcatgaccatcatgaccacctgcttcatcccctgcggcgcaaagatgcccatcatcggcctgatcgccggtgcactgtttggcggctcctcgctggtggcagtgtctgcctacttcatcggcatggcagccatcatctgctccggcatcatgctgaaaaagaccaaggcctttgcgggcgaccccgcccccttcgtcatggagctgcccgcctaccatgtgcccgcatggggcaacgtgctgcgggcaacctgggagcgcggctggtccttcatcaagcgcgcaggctctgtgattttgctcgctaccgttgtgctgtggtttatgcagggcttcggcttcgagaacggtgccttcggtatggtcgaggatcaggacaactccgtgctggctgctatcgctaccaaggtcgcatggatctttgcacctctgggcttcggcaactggcgtgcaaccgtcgcttccgtctccggcctgattgcaaaggagaacgtggtgggcaccttcggtgtgctgtaccacttcggcggcgagctttccgagaacggcgacgagatctgggcagcggtcgcacaggactacaccgctctgtccgcttacgccttcatgatcttcaacctgctgtgcgctccctgcttcgctgctatgggcgccatcaagcgcgagatgaacaacggcaagtggacggcctttgccatcggctatatgtgcgcactggcttactgcgctgcactggtggtgtatcagctgggcggccttatcaccggcgaggtgcactttggcctgttcaccgtggtggctgttgtggtgctggcagcgttcatctacctgatggtgcgccccaacaagtacgccgacaacaacgaagtcaagctggatacttcccgtatctgatagaaacgaaagggtgtatgctgtatgatggaatttattgcaacaaactttaatctgcccaccatcatcgtggcagcgctggtgttcggcgcgctgggctgggtcgtatggcacacccacaagcacggcggcggatgcagctgcggcggcgattgcagccactgcaagggctgccactaaacactaaacactgaaccgcaaggagcgcgggctgaaactctcggctcgcgctccttttttaagtgaaataaagttagcttatgataacaccgggcagaccccggcgcgtaaaaaggagagtgaccggtatgcagctgaccgcagcgcatctgcgctatctgctggccatctacgaggtaagccgcacccatctggacatcagctcccgcagcattgcggaaaagctgggggtgacaaaaccctcggtggtgcgcattctgaacctgctcatggagcagggcatgatcgtaaaggagtactacggtaaaatttacctgaccgaccgcggcatctgggtggcaaagcgggtgcagcaggagctggacgccattctggcgcactttccgccggtgagcggggagctgacgggcgaggagcagtggaacgccgcccttgccatgaccagcgctttgccccagcgcctttttaccgccgactatgagcggatggtggaggaggaggagactccctccgtcaaagcctgacagggcttgactgagagggttctccccggcaagggcgactgttcaaaagtcccctatgacccatagagttttgaagagttactttttctgcgccaaaacacgcagaaccttgcgctttttgccccgactcttcaaaagtagctaaagttttgaagagtcgcgaacataacgaaactacgtcacttttagatactattcaatataaaaaagtggtaataatgtccgactcttcaaaagtccctttgtatcataaggcttcgccgcctgttttgaatagtcgcatttgcggtcaaagcggcagctgcgtctgtttgttgaggttgatgatctcagcagcaacagccgccggttcaagctctggacgatgccagtagattttctggttcggcggttttccaacgcgcaacagcttcaaatccagcgcgatgcgtgccctgcggatggtactgtccgagatatcccgctcggcgcacaggcggtacacctcgcccgcctctacccagcccacaaaggacagctgcttttccagcgcctcgatggcgttggcaagggcggcagaggggcggccattgccggtggcgggggtgcccgcctcccggatgatggcgtcggcggtaagggtgcaggggccgtcgtaggccaccgtgccctgcggacagatgcggtagcgctggctttcgccg

SEQ ID NO: 730 - DNA, 22686 bp, unidentified
  source 1..22686: mol_type = unassigned DNA
ctccaccacatccccagaccattcggtctggggatttttttgtggcggacggtacagaacgagaaccggaacaagtaaaggcagggtatcactatggtagtggtatcctgccttttgctatttttaacagtgtatgatatactcggcttagcccagtaaattggaagttatggaggtaacaatacttatgaaaaaatttctttctttgtttttgtgtcttacctgtatactgactttagctgcgtgtggaaaaaaagcagcgcccattacgctacctcaagccgataagattacatctattgatataacgattgaagaaaacacagtaagtcattcagataaaacttggatgagtgaaataatcgccgatatttctagttctaaaccgactaagaaggaaagcgttcaagatgtcccgcaagcggaaagttatatcaggattgacttccggcatgagacaggaacaattactatctttgcgtatgaggacagggggaagtactatcttgaacaaccttatcaaggaatttataaaattgaacgcagactgttcgaaaggctaaaagaaacggattgatttcaggttgccgtactcgttccctgcagggtttggggctccgcacgccccagcaagagcatccgccttgcgcatgtagtcattttgtgatacaatgactctgacaggaggtgtcccgtatgatgcagacattcgttcgcccttcccgggatctgcgcaaccattacgctgagctttcggagatgctcaaagaccacaaccatgtgatcatcacgaatcatggccgtggagaatccgtactcatcaacattgaggactacgccaagtacgaggagtttttgcaccagcgatatgttgccgaggcacttgccaaggcaacacagcaggcggctgaccccgacacgcagtgggaagaccacgaaagcgtatgggagacgctgagcaagcagtatgacgtataagatcaaatatctgccccttgctgtgcaggacttgaacgatatcgcccggtatctgtctggcttttaccctaaaacagccagccgtgtgctgcgaggtgcttggaatctgccgcagtatctggaataaattcaacttcgactgctgtgaacggtacagaacccccccggcaggcaatcaccattacggtggcagcctgccgggggtattataatattatgctgtcaaaagctttcttgccttacacctcgtgctcagcccagtcctgactgcggcccacggccttgtgccagcccctgaccagcttttcccgctgggcagcgtccattttgggctcaaacagctggttgcagctccacaggtggctgatctcctcccggctcttccacacgccggtggcaaggccggccagatacgccgcgccaagggcggtagtctcccggatggccgggcgcagcacctccttgttcaggatgtcggactggaactgcatcaggaagtggtcgcggctggcgccgccgtccaccttcagggtgctgatggtgatgtcggtgtccttctccatggcccacatcaggtcggcgctctggtaggcgatggattcctctgctgcgcggatgatgtggttctgggtggtgccgcgggtgatgcccagaatggcaccccgggcgtacatatcccaataaggtgcgcccagaccggtaaaggcgggcacgatgtacacaccgccgttgtccggcaccttctgggcgtagtactcggaatcgcagctgtcctggatcaggtgcatcccgtcccggatccactggatgaccgcgccgcccacaaagacggagccttccagcgcatattctacctcgccgtcaaggctgatggcaatggtggtgaccagaccgttcttgctctggtagatcttgttgccggtgttcatcaacaggaaacagccggtgccataggtatttttcacgtcgccgggcttaaagcagccctgcccgaacagcgcggcctgctggtcgcctgcaataccggccaccggcacgtccacgccctgaatgttggtgtagccgtacacctcgctggagtccttcacgctgggcaggatgcagcgggggatgtccagcgccttgagcagggtgtcgtcccagtccagcgtgcggatattgtacagcatggtgcggctggcgttggtgcggtcggtaacgtgcaccttgccgccggtcagcttccagaccagccaagtgtccaccgtgccgaacaaaagctccccggcctcggccttttcccgcgcaccggggacgttttccaggatccacttgatcttggtggcagagaaataggcgtccggcacaaggccagtgttttcccggatatagtccgccatgccgggggtcttgagcagctcgtccacaaggggcgcggtgcggcggcactgccagacgatggcgttatacaccgggcgtccggtgctcttgtcccacaggatggtggtctcgcgctggttggtgatgccaatgcccgcaatgtccttggggtctacgccgctttgggcgattacctcgttcatcacgccgtactggctggaccagatctccatggggttgtgctccacccagccctgatgggggtaaatctgctcaaattcccgctgctgcacgcagacaatgttctgctcgttgtcaaacaggatcgcccggctgctggtagtgccctgatccagtgagaggatatatttggtctggctcatgatcttctctccttgctctgaagcttgagcgcaaaacaaaaaagagcgcaccaaacaaagctatctgctctgtctgtcgctctcctgctctgcgcaaacatattctgtgcttattgtacacgctccgcaggaaaaatacaagcttctgcgcgatttttggaggttctgcacaagggggccgccccgccgttgaacactctgccgaaagggtgcgcggtgcagccgctgcggctgtgaaaatgggacaccggagcgtccgcagacgctccggtgtcccgagtaccattcaaaatcgttctattacaactgctgctttgccagcacgtcagaggtaggggtctggaacaccggaatgtcggcataggggtcggcagcggtgtcggcgggcagactcttcatatactcgtccatggcgacagccaccttcttggcaacagccacagcctctaccacggtgcgtgcgcccatgacggcgtcgccgccggcaaatacgccctcgcgggtggtgcggccgtcctcgctgacactcagcagacccttctggttggtctcgatgccggtcgtggtcttgacgaggttgctctcagaaccctgactgaccgacacgatgacgccggtgtgggggtaaaaagtctcgctgccctctacctgcgtgaacttgccgtcctcacccttgacggtgtcgcggcagatcagaccgttttcccggatctccaccggtgccttgcagaaacggaagcccacgccttccagtttggcatagctcacttcgtactcggaagcgctgatgcagctttcgtcccggcgggcgtagcaggtaacgtggcgggcaccgttgcggatggcggtgcgggcgcagtccatagcggagttgcccacgccgatgacggccacgtcatcgcccagacggaaggccttggagtttgccagatagtcgatgccgaaagccacgttgccaaggctctcgcccttgatgtgcatggcgttggccttccacagaccggcgccgatgaacacgctcttatagccgtcgcggaacaaatcgtcgatggtgatggtcttgccgatggtggtgttggggcgcaccttgatgcccttcagttccagatgacgatactggaaatcgtccagcacactgtccggcaggcggtagttggggatgccgtaacgcatcacgccgccgatcttatcccgggcgtcaaagatggtcacatcgtagccccagcgtgccagcagcaccgcgatggtcaggcctgccgggccggagcccaccacagcggccttcatgccgtttttcggggcagggcctgcggtcatcttgttggcgtaggtggtggagatatagtcctcgatgatggaaaagtgcaccgggtcgtggctgggcatccggttgcggatgcagtgaccctcgcactgcttttcgtggttgcacaccagactgcatacagtggtcagggggttgttttcaaacagcatccggcccgcagcgtccatctggtttgccttgagcagacggatgacctccgggatattggtgtggatggggcagccctcctgacacatcggctttttgcagccgaggcagcggttggcttcgtccagaacatgaagtgccatgggttcctccttgtgtttcccctgcggggacagtcgttttttacaggttcgttgtatccaacattgcattgctttaatcatacacccgaactgcgccggatacaagagggcacaatataaaatttttggcgttattttttgtcaattcgtcaaaaagataattttttgacgatatatcccgcccatcggctccggttttgtccggcacagcgcaccaaggtcgctggctctgctctgggcagcagccatttgggcgcaggtctcgttttcccgtgccagccgcgccagcgagtgggacagcggcagcgccgtctccccgggcagggacagagcctccttgcgtgcgcccagcaggtgcagatagggcggcagcgccggggtctgggcggtgtagcccagcgccgcatccatcgccagccgccgcatccgcgcccgggggtaacgcacggtggtcagggcatccagcaaagcgggcaggcttgcggtctcccgcacggcgttttccagccggtgctccaagccttcggataccccgcgcaccgcggcaaagggggcttgccctgcgcaggctgcccgcagcagtgccagctcgcagtgccccatgaccgcaaaatccgtatactttccgtcatattctgcctgtttatacagtttcagcgccttttccggcacataaggtgccagtgccgccgcgccgccctctgcccagagcgcccgcagggcgctggcgctggcaaaggctgtatggctgctttcggtcagcgcctgcccgtggtctgcgccctgccggggcagggcgatgggctgcatttctacattctgttctatgattgctttacaatactctacggcaagattattgttgggcttgtccagcagtgcggcaacgtctgaccccgggcacagcgcctgcaccgccgcctgccgggcggcggcaaagctgcgtgccccggcggcaagctgctgtttcagcgcggtgcggtatgcttcgctgcacagcacccgggcagctttttgcagtagggcggtgtccgggttctctgccccaaagaccagcgcatcgcacccggcagcagccagaatgcgcacccctgcccgggcaaaagcctcggcaccggcgcaggcgcagggcgcgggcagggcaaacacgaggtctgctccgcaggcaagcgccgcctgcacccgcaccgcctccggcaacagcggcagcgctccccgctgggtaagcccgcagctcatggcaacggccacccgctgcgcccccagcgcccgcgcctgcgccagctgccatgcgtggccgttgtggaaggggtcgtactccgcaatgatgcctgcaaacttcatggaactgctccttttcgccaaaagattgttaaaattatatcggatatacagaaaaatcctgacgtttccgggatttgtgggcaggatatacaaaaaccttgtacacaagttttaccgctttgcccgggttgcgccttgaaaagccgtcacgcctattatataataaacataggaatctgtaaaattctgtccgcaggtttttaggctacggacggtacaaaaattttcaggaggcaacacagatgaaggttctggttattaactgcggttcttcttccctgaagtatcagctgatcgatatggacggcgaaaaggtgctgtgcaaaggcctgtgcgagcgcattggcatggagagcagcatgatcactcacgaggccaacggcaccaaggccaccaccccggcaatcttccccacccacaccgaggcttttgccgaggtcgtgaagaagatgaccaccggtgcaggcaagtgcatcaatgacgtgagcgagatcgacgccatcggtcaccgcgtcgtgcatggcggcgagaagttcaagagcagctgcctgatcaccgatgaggtcatcaacaccctgcgtgagctgagcccgctggctcccctgcacaaccccgctggtattctgggtatcgaggccgcccgcaaggtgttcggcaacattcccatggtggctgtgttcgacaccgccttccacagcaccatgccgccgaaggcttatatgtacgccatcccctacgagtactacgagaagtacggcgtgcgccgctacggcttccacggcaccagccacaagtacgttgcccacaaggcagccgagtatctggaagagcccattgagcgcctgaagctgatcacctgccatctgggcaacggctcctccattgccgcagtcgatcagggcaaggtggtggatacctccatgggcatgaccccgctggccggcctgatgatgggcacccgctgcggcgatctggacccctctgtggtcaactacctgaagtacaccctgaacatcaccggccacgagctggacgagatcctgaacaagaagtccggcctgctgggcatctccggtgtttccagcgataagcgtgacgtggaagaggctgccgcggccggcaacaagcgcgcacagctggcttccgatatgctgaactaccagatcaaaaagaccatcggcagctacattgcagctatgggcggcgtggatgccatcgtctttaccggcggcatcggcgagcacgatgccattgcccgtgcaaagatctgccaccacatggattggctgggcatccgcatcgacaccgagaagaacaagcaccctgttggcgatgtgtgcgagatcaccgcttggggcgcaaaggtgcgcacgctggttattgctaccgacgaagagctgatgatcgcccgcgacaccaaggaagtcatcgagaagtaagcttttcccaaagggctttgcaggggctgctgcacagagtgtgcggcagcccctttttgcttgtatgaaaaagtggttcagaaacacccgcaggtgtttctgaaccgcaaatcataaattatctgccgctgcacataacctgtgcggcgcgccgcttttccatcttccagcggtgattttacccaaatatatgctgtcggtttgtgccatgtgtacaaataaaagggcgaacggttgttttttggttgacaaatctcaaaaataacggtacaataggaaagtcctcaatccgagggcgtttatctattcaagcccctggtaagcttactgatcagcgcgatggtcccaaaaccaaaggtatggttacaatccttccgtgggcaagaactaactaaagaggagatactactatgtttgaagacaagactctggtctgcaaggactgcggtaaggaatttgtttggactgccggtgagcaggagttctacgcttctcgcggcttcgagaaccagccccagcgctgcaagccctgccgtgacgcccgcaagaacggcggcgcacgcagcaacagcggcgagcgtcagatgttcgatgctgtctgcgcagcttgcggcaaggcctgcaaggttcccttccagccccgtgaggaccgtccggtctactgctctgactgcttcgctcgcatgaagcagaactaagcgctgattttcatttaaatcggtaacaaatccccccgctgccagtcggcagcggggggatttttgcgtttctcttcaggtattcttacgctgatttgcgcccgagagcagcagcaccgcgcggcatagccgcagcttgagcagcaacagctttacctggtcgttccggctctgcatggcgtgcagtggggtgctgcgcaccgccgtgcgcacacggggcttttgcagggtactgcgcagccaagcagtctgctcggaaaggaaaagcgggctgcatccaagattcttgattcccatcatcaggtcgcggatcgtgcagtagctcgcctttgcgcggtgcatggggctgtcctgtaagccccacgcggcaacggtgtcccacactgcatcgctgagataaaagttatcctccagacgctccgggtggtagctgttggacaggctgccccgccgggcagcggtgtagtggtacagcggcttttccagcaccaccagacagccgggattttgacgataaaaggctacaaagaacagcccgtcctcccccagctgatggcaggagaaacgcagccgatgctgctccagaaacgcccggcggaacagcttattggtgaccagatacgaggacgccgtctcgtcgaaatgttccttgaagggcgcgccccggtacacgccggagagggtgctgccgctggtctgcgtgtgcagcagccggtcattttcatcatagctgtccagatacagcccaaactccacgcagtccgcatcagcattccgggcggcatgatacagcacttctgccgcatccggctctacccagtcatccggatccagaaagaagatatactcgccccgggctgcatccagacccgcgttgcgggcagtggctacgccgccgttgggctggtcgatgaagcgaaagcgcgcatcctcggcaacagcctgtgcacacagcgcggcgctgccgtccttagagccatcgttgatgaggatggcctcgaagtcggtcaaagtctgcgcccgcagtgagcgcagcgcccggggcagcaggcgctccatattataaacaggcactataaacgagatacagggcattgttttcactccttgccgtcacacttccttcatcagaatatggatgcggtcccgcatctcctgccgactgtccggcatccacaccttgggttccgggggctttttgcgctccatggcgtaggcaagcgtcaccagacgcagcgccatcgtgctccagaaataaaaggcggtattatcagtcaggtaggtcaccgtcatatagcctagctcggacagatacagcaacgtggtctcttggtctgcatagcgctgccagaacagcggagtcagaacatactggatgctggaccagagcagaaaacccggaaagcctacctctacaaagaccttcaggatgtcgttgtggaaggggtaaggctggttgatgagtccgtcattataccactgggcgatgatggtgtccacatattcaaaaccgcggccgatataggtgatagaaaattcatagtaggggttcgccatgctccacagatagtcccgtcccatcatgtcaatgccaaaactgttcagcaaccttgaaataacaccgtagcgcacacagtagaggaatgccagaaaaaacaggatgcagcagacgcccactgccgggtaaaaccagccggggactttgcgcttgcggagaagcagagcaatcaggacgaacagaaccaccgccgggatggcgatgcgcttcatgccgaccagaaaaaaccagcagcagagcagcagatacagccagcgcttgcgcttttcctgccgggtagtacgaggagcaaaaacggcgtagtacaagatcatctgcccgaacacaaaggtcaggtcgtgaatctccagctgcagcgcatagccatccgcatcaccgaaggtgatcaaacaggtaacgagagactggatgctggctgcaaaaccgtagccaggaatgctcagcagcatgatggccgtgttggcaatgcagatgctgatggtaaacagctcgatggctttttcccggaacagatagaccagcgccacggcagtgaggatggcaatactctggaacacgatcttggagcagcttcggatcatggaagacactgcggcaaagctttcgatccagatgaccatcgaccagaaaaacagcgccgccatcagggacatataaagcagggtaggcttccataactcccggagacgcttttcgtccgggtaaaacagggtgtacagcattgccagcccgatcacccccagagagatggctttgggaaggccgcccactgcgctgttgattggtttccactctcccagcccggcaccggccaaaaagaccacgcaaccgatggtcagcagtttttgccacagcgggctgtccttataaaacaaagaggccggagttttccggctgtaatcctttttggtcaggatctgatccaatgtgtgcatgaaaagggctctccttttattgtgggtgttcccgcagccgccggggggttacgcctgccctcccagttgcaggtactgctgctgtaagcgggcggcggcgatgttgatatcgtagcccgcctgtcggatcagttctgcaccagcagatcggtcgcagggctggtggagcatccgctgcaagcctgctgcccagtctgcattgctggcggaaagcgggatctggatggcatgggaagaaagcagcacctccgccggcactgcgtccgaaaatacgcaccccagcccagcggcttgcgcctcgatccccaccaccggcagaccctcaaagcgggagggcatgacgaagagatccatcatctggtaccagtcggccacattgctttgcaacccggcaaacaggatatggtctgtgatgcccagttcctgcgcctgtgcacggacagcctgctccagcctgccggtaccaatgagcaccagcatcgcccggggttccagctgcaaaaaggcggcaaagatttccaatagacgctcgtggttcttgcggacatcaaagcggcctacatgacccagcaccacccggtcctccagcccgtagcgcgcccgcatttcggcgcggacggcgggggagaagcggaaggtctccggctcgatggcgttgggaatgatctgtccccggcgctcccagtccgctttgccaaagtagtagatgcccgcatcccggccgcaggcccacaggtgggtggcggcgccgggcagcagctgcttacagaacatcttcagcggccacttgtagtcccggacgatccagatattatgggcgtgggcaatgcgcacttgcagcccggccttctccgcacccttcagggcataaagccccatcgcctcgttgtgggcgtgcaggatgcggatgcgggggtctgtggccacggtctgctgcacaaagcgcagatacgccgggtagtgcagcgggtttaatcccggactctggtagatatgcccgcccagacggcggatctcgtcgtcgtaatcgccgggcttttgcttgttgacgataaaatcaaactggaccttttcgcggtcgatatgccggtagtagttcatcagcatggtctcgatcccgccgcggtccatattgctgaccgaatgcagcactcgtatcatgggtactccttacattataacaactgaaatcttctgccgtagcggcaccacagcccaaagtcctgctgccgcagcgcccgggcaccccagcgggcacggcggggcagtgcgccctcttgcggcagcgcctttgcgtacaaagcacagcacagccggaaaacagcctgctgcgtttccggcggcaggccggatacagtggcatagcagaaagccgaaagctgcagcgtcagggtgcagcggtacaacgcatcgtggggcaggcccagcgcagcatcctgcactgccagctgctccatgatccagtagctctgcacggcggcagggcggtgctgacttgtggcggtaagccccttggggtttttgcgccacagatagaccatctccggcacagaggccacagtctttgccagccggaataccagaaaatggatgatggcatcctcaaagcaggtatagtaagccggaaagcgcacctgtgcaaacagctcccgccggtacaccttgccccatggcatcccgggcagctcgaaccgctccggcgcggcagcaccggcgtagactgccgccgggtagcgctgcaccgggccgtgggtgccgtcggtgtacaggtactgccagccgccctgcaccacatcggcgtcaaggcgctgtgcggcctccagcagggtgcggatggcaccgggcaataacagatcgtcgctgtccacgaacatcagccagcggcccacggcgtggcgtagcccctcgttgcgggcggcggcggcgctgcggggcgcactgcaattgcacagcaacaccccgggcagtgcccggtagcgttccagcacggcggctgtgccgtcggtggaatcgctgtccaccacgatcagctgcacggtgcagctggtctcctgctgcaaaatgctgtccagacaggggccgatggtagcttcgccgttgtacaccggcacaatgaccgaaagggtcaccgtcgggtcctgcggcggcagcagcgggcaggtctcttctgctgcgggtttcgggcacagggctgccagcgcggcgcggtcggcctgtgtgctgtccggcagcggggcaccgccccggtgcagcagatggtacagcccaaggtctgcatggccgcaggctgcgccgcacacggcggcagcgcccgccagcagacggctgcgggtgtggcagtggatcagctggtaagcgcgtcggttctggatcatgcttcaccacgctccgttccggcaaggacagcgccgccctcctctgcgatcagggccatctttttctgtgcgcagcgcacaaggtcgcgcacatggtagagcttctcctccgaggcggtggcccatgcggcggtgaacaggatggggtactccgggttgagcttattgtactcgtccacctgactttgcaggatgcggatcatgacctctgccttccgggtgctgcattcatcaaagaaggcaaggaacttgcccgcgccgttgtagcccaccgtgccgtcggtatcgcccatcagctgcaaaagaccggaaaaatccttcaggatgccgtcacccacatggtagccgaagcggcggctcatctcggtcaggttgtccagctgcaaagcaaagcaggtatagtcctccggcaggatgcggtcggccatgccggtgatatacacgttgagcttttcgcggttgggcagaccggtctttttgtccacatacagcagataatccaccgcatccgagatgcggcccagcagaattgcgccgcagcagccgatgacaaagaacagcaccagcgcaagcatcaggtacagcttgacattgatggcggcagccacctgcaccgagctgatcatcttcagataatccgcgctgatgtacaggttcagctccttgctgctggtattgatgatctcgtagtagcttttcagctgcgcctcgtagtcgttgatcatgctttccattgcagcatgctgttcgcttgtaccgccaaaatccacgttgcggaaactttgcaggatctcctcctgaaactgccggtcgatctggctggatgcgacctgctgttccagcgataccagtttcagcaccagaccgtcgtaggtggtctgtgccttatcgccagcaccttccagctcgatgttattcaggatatagtccgaggacaccacctcgccccggtcagtaaagtagttttgcagcagatcggcgttcttgtacacatactggtcggtcaggctccacagactgtcccgctgctcggtggtgatctgttcgttctgctttgcagtttcgatggtgttggccagatattcctgcagcaccgtgccgtcccgcacctgcgggccgttgagcacataggcgtacagcgccgggatggtgtattttttgaagtcggaatagatatcgcacaggtctgcataggtgtagccggtgcgggaggagcgaaaattcgggtagtgctcccgcttgctcagcagatagtcctgcatctcgttggtatcgttttccagaatgcggatgcactcgtagtaatcgtagccgttgtccagcagaccggacgaggggttgagcgagagcttctgctccacatatttttccgtataataggtgcagtagctctggatgatggcatccagcatattgcgggcataacccgcgccctgctctccatccaccacaaggctcaccttgtaggtatccgggaaataggtcacctcttcgcccttttgcagcagtgcctcgttgatggtctcttgatcttccgagatcaccggggtcaccgagatgttggaacggatggtgctcagccgcccggaagcacccagtgcatccatggcctgcgagatgacggtggaggagtaaatctcgttgacgtccagctcgctgccgtccggggtgtagccgtccgagatgccgtcgttggtatagcggataatgaccgatgcagtgtacttctgcctaccgtctgcatacaggtagatggcggccgcacctgccagcgacaccagaaagatcagcaggctgaaacgcttcagatagcgcaggatctcaaactttttcatctgcggtgccttgcctttctgcgtttacgttcgtggagcagccatgcgctgcccagcatcacggcaacggactccatcagggtctttttcaggctcaggcgctgcaggaaggaggccgagccgtaggtaaaggtaatatagttctgggatttgtacttgatatacgccttgtccagtacaaacagctgctccgagatctcgttgatggcggtctccagcttgttcaccatggcctgcgcctcggccagacgcggctggccggcatccagctcccggatcttctggatcacataattcgtgctcacgatctcggactggtagtcggtggcatcggccagagaagcgtctgccgctcgcgccagcgcatccatggcggtcttggtgcgggacatatagtattcgctgtcctcgtccacggtggggatcatcatgatggaggtcatggacttttcgtagatggaaatgccctttttgtcggcgtcataataagcctgctgggtgcgcatggcaagatcgtcgatcttgttcttgtattccagaatgctggtcagcatggacgggtcgcgggcaacgccgccctcaatgacaaaggccatggcattgggcaggtcgtaatccaccagattgttgatctttttacccagcgtggtaaagttgttggtggcagggtcggggtttgcctcgtccgtaaagcttttgttctcctgcagacgagcgttcaggtagcggttcagcccctcagtgcgcacctccagctcgttcagccgtaggtaaggctcacacgcagaggtcacttccagcttttccttcagcaggctctggttgtcgcagtagttgctctgaaagatctcccggtaggattcgcacacgctctgcaaaagatccgtagccttgcggctgccaagctccagcttgcgggtattgatggaaagatagtagttggtgctgatatactcgctgccgttggcgctgccggtgccttccgggctgagataaaggcactgggccagctgggatgcagtcaggctgtcctgcaagcccacccgccggatggcgcgttccatcacctcgtccgaaacgatctcgtaggcgttgaagcgggtcttgttggggttcatgccaagcgccgcctcggagtaattgaaggagaggctggcggtggcgctgtccgcacttttgaaatagtgaaccagcccgaacagacagcacaaggtcagcaggcagaaaaacagacggtatttattgatccagatatggcgcagcgcctgtttgatcttttctttgatgtcatccatggcattctacccttttgcagcggcctgcacgcgcggtgcagactgcttagtcgatgtcaatgaccgaaagctccggcacgttattgatgcggggcacccagctggaatcgcccagtccccggcttacaatgagggtggcgttgttggcaagcgtatagctgcccccggcatagtcggggaaaaagccctcctcggcggtataaagcggaccgatcttcggcagacgcacgatgccgccgtgggtgtgcccggccagtcccagctcaaaggaataattttccagatgctcgggaaagtaggtgggaacgtgtgccagacagatgcgcaggtcatagtccgtctgcggctccacgctgtccataaaggtactggcaccgtagttgtaaaagtcctccgggctgccctccacgcccagaatgctgatgacattgtcgtggatggtatagcgcgcctcctgattgcgcaggacggtcaccccggcggcggtgaacttttccaccagttcccggtcgttgtccagaaaatacagctcgtcctcgtggttgcccagcacgccgcataccggggcaatctcgctcagctgacggaacagagaaagcatattatcataattggtgccttcgccgtaggtcacaaagtcgccgcccagcaggatcagatccggggcaaggctgcggacatcctgcaccagctcacagttatctgctccgtattcccgcagatgcaggtcggtcagaaaaacgacccggcaactctgggtcagcttgcgggaatggatctgatagaactctgccgtatagtgggtgcggttatagcagatattctgccacagcgccccgcccagcagggcaagcagggcaacaagaaccagcagcgtcagcagcacctgcttccagaggggcgttgccctctgtgcgcagctgccgctgtgtgtgtgtctgccgctttgtgctgcgccttttccgtgttttgctttgataaaggccacatcctttctgccggggaacgttgcatagagaaggccgcagcccatctctccaaaaacggatacaaaaactgatatataaataaattataacatatttagtaggaaaagcaaagagtgcgtctctgccatgagcggatttcacatttggaagttcccatcaaaaaagggatgccgcgcacgcagcatcccttttgtatatttgcagatcaatcgtcgtcgctgtccagcttgagcacggcggtaaaggcttcgctgggcagggaaacgctgcccagctgacgcatcttctttttgccttccttctgcttttccagcagcttctttttacgggagatatcgccgccgtagcacttggccagcacatccttgcgcatggccttgaccgtctcgcgggcaatgatcttgccgccgatggctgcctgcaccgggatctcgaacaggttgcgcgggatgttgtcccgcagcttttcgcagatgcggcgtcccttggcgtaggcgttgtcccggaacacgatcatggacaaggcgtccacggggtcgccgttgagcaaaaagtccagcttgaccagatcgctctcgcggtactccttaaactcgtagtcgtagctggcgtagccccggctgcggctcttgatggcgtcaaagaagtcgtacacgatctcgcccagcggcagcgcgtagtgcaggtccacgcgcacatcgtccagatacttcatatcgatcaggacgccgcgcttgctctggcacagatccatcagaccgcccacatagtcgttgggggtgtacagatgcacatccacaaagggctcctcctgcttgacgatattgctggggtccgggtagctggaggggttgtcgatcatttccactgtgccgtcggtcaaagtcaggcggtagcgcacgctgggggtggtggtgatgatgtccagatcgaactcccgctccaggcgctcggtgatgatctccatgtgcagcagacccaggaagccgcagcggaagccgaagcccagcgcggcgctggtctccagttcaaaggtcagagaggcgtcgttcagctgcaatttttccagcgcgtccttcaggtcggggtacttggcaccatcggcggggtagatgccgcagaacaccatgggcttgacctgacggtagccgggcagcgcctctgcggtggggcgctctgccagcgtaacggtatcgcccacgcgggtgtcctgtaccgtcttgatgctggcggtcaggtagcctacctcaccggcctgcagctgggcgcagggggtcagggaggtggcacccatgtgacccacctccaccagcgtgaactctgcgctggtggccatcatgcggatggtgtcgccgggcttcaccgtgccctcgaacacgcggatgtagacgatgacgcccttgtagctgtcgtagatgctgtcgaagatcagcgcctttaagggggcgtccgggtcgccggtgggggcggggatatcgctgaccacacgctccagcacctgatcgacgttcagaccagtcttggcggagacgcggggcgcgtccatgcagggcaggccgatcacgtcctccacctcctgcgccacctcgtccgggtgggcgctgggcaggtcgatcttgttcaggatgggcaccagttccagatcgtgctccagtgccatataggtgtttgccagcgtctgcgcctccacgccctgcgtggcgtccaccaccagaatggcgccctcgcaggcggccagactgcggctgacctcgtaggcaaagtccacatgacccggggtgtcgatcaggttgaactcgtaggtcttgccgtcctttgcagtatagttcatggtcacggcacgcgccttgatggtgatgccgcgctcgcgctcgatatccatgttgtccaagatctggtcttccatggtgcgctcgtccacgctcttggtcagttccagaatgcggtcggacagggtggatttgccgtggtcgatatgtgcaatgatgcagaagttgcggatgttgtctcttgccatgtagttcctccgggcagctttatgcttctaagatccagtcctccacggccacgatctgtccgtggtcgcggtagacgcggggcacgcggcgggaaacgccgcacagcacttcgtaggggatggtatcggtcttgcgggcaatggtctctgcggtgtcgctcacggtgccgccccacaggatggcttcatcgtcctcgcgcacttccggtacatcggtcacgtccaccatcatctgatccatacacacccgccccagtaccgggcaggccttgccgtggatctccaccacgcccttgccgcagctcaaaagccggggatagccgtcggcatagccggtgcaaagggtggctaccttggtgggcttttcggcggtgaagcggcggccgtagctggcgcactggccgggctgcatctccttgatcatgctcaccacggtcttaagggtcattaccggcttaaagcgcccaaagcgtacctcgtcgctggggtcgtagccgtacaggatgatgccggggcgcgccatgcagcgctcccggggcagtccctccggccagtccgggtgcagcatgaccccggcagagttatcacagtgcataagggcaggctcccgcccggcggccttcagtgcgtggaaggctttcacgaacagtgcgtgctgctcggcggtgtaggccacattctccggggcggtatcatcggccacggaaaaatgctggaacaggccggtcatttccagcccgggcagcgcacaagcctccagcatctcccggatggcggcgtcaaaatcggtgcgcagggcaaagccgatgcgtcccatgccagtgtcggccttgaggtggatgtgtactttgccccctgccgccacggcggcttcgctcagggcgcgtgcctgcgcaagggagtagcaggccacggtgatgtcgttctggatcagggcggcggcgtaggcgggctgcacatgccccagaatgaggatgggcaaagtctgccctgccttgcgcagctgcacggcctcggtcaggcagctgaccgccagccatgcggcgccctcctcggcgaacacccgggcgcactgtaccgcgccgtggccgtagctgtcggccttgaccactgcgcacaggggcagcgcccctgcccgggcctttacctcccggaaattataccgaagggcctcgaggtcgatctcggcccagacgtgtttttcaaacggttgtttctgcatgatctgtttccttttttggtacgataaagctgccccggcccgtgtggacgggacgccagccgtcaatgccgctctcctgcaaagcatggagagtcttttggcggaaggcgtggtcggtacggcagcgctcctgcacaaattctttggtctgttcccgcacggtaacgccgtctgcggggcagcggctcttcacgatgggcaagcccgcctcccgcacggcgcactgcacctcgtactcggttgccagcagcatggggcggatgagggtgagatcccgctgggagaggtaggtcaccggcgagaagcagccgatgcgtccctcccgccagaggttcatataaaaggtctccacggcatcgtccagatgatgccccagcgccaccttgttgcagcccagctcctgcgcggcggtgtgcagcgcgccccgccgcagcttggcacacagggcgcaggggttcttctccttgcggtactcgaacaccacagggccgatctcggtgcggcgcacctcgtaggggatgccgtgctgccggaacagctctgccagcgccgagtagtccatgggctgatggtcgaactgcgggtccagcgtgaccgccaccacctcgtaatcaaagccgatgtacttgcgcagcatggaaagaccgatggtcagcgccacgctgtccttgccgccggaaacgcccaccatcacccggtcgccgggggcaatcatttcatagtcctgtacggccttgcgcattaaaccgcagagccgctgcattgcacgaagatcactcatgacaggctcacgctttctaccagattgaccacatcgctgatggacgccagcttggtcagcgccgagacatagaccacatcgccgctgtcgtaggtaatggtggccagcacggcgtagtaggtgcggatatcgcagcgcaccgcctctaccgctgcaccctccacggtcaggttgaccttgcggggcttgatgacgccgtaggcctgcttgaggtcggcttccgagtcctcgataaagctttcgtagctgtcggcggtgccccgctgtaacaaaacggcctgatagtcctcgctgtctgccgtgtcggcggtggcaagctccagcacggtgccgagggttgcgtcctcggtcatgcggcacacgctccacacgctgctgtcgtagtagacagagatgccgttcgtgccggtatagtgggtgtcgggtgtcgcgggggtctgccggttcaccagcagggtgagcaccatgtaggctgcgatgcccagacagatgaaaatggccatcgccgtcagcagcttggagctgcgacgctgcgccgaagaagtgcggtcgatctcatttggcatggatgtattctccttgtgttggcaagggcagctgtgcaccgcccatatcctttatagtataccacaaccgcagcgggatttgtagcaggcaaatggcaaaaatatgccggtgtgggcaaaaaacttttacaaaaatcggaattcagaaatcaagaggatttgagagaaaacaagcgattttgagagtttcaaaaatttccgccgaaaaaatccaaaaatcatgttgacaggcgcgtttttgtgttgtatactgacactcgcgccccaaaagggcgcctgaaacgtacaaaaagcttatcaggaggaaatagatatgagcactactctcgtaaagcccgctgaagtcgagcgtaagtggtacctgctcgacgctaccggcaagagcctgggccacgtcgctgctgaggccgctgttctgctgcgcggcaagcagaaggtcgattacacccccaacgtggactgcggcgatttcgtggttgtcatcaactgcgacaaggctgttctgaccggcaagaaggccgagcagaagttccacatcacccacagcaagtacatcggcggcctgaagaaggtccagtacagcaagctgatggctgagaacagcgatctggctatgacctacgctatcaagggcatgatcccttccaacaccatcggtgataaggctctgacccgcctgcactgctaccagggtgccgagcacgctcacgctgctcagaagcccgagaagatcgagttctaagaaggaggcaatcgaatatgtacgaaaccaaaccttatttctacggcactggtcgtcgtaaggattccgttgcccgcgttcgcgtttacaccggcaccggtaagatcaccatcaacgatcgtgatatcgacaactacttcggtctggagaccctgaagctgatcgtccgttctccgctggtcctgctgggcctggagggcaagtatgacgtcgtcgtccgcgtttccggcggcggtgtttccggtcaggctggcgctatccgtcacggcctgagccgcgccctgctgcagcagagcgacgagaaccgtcctgtgctgaagaaggctggcttcctgacccgcgatcctcgtatgaaggagcgtaagaagtacggtctgaaggctgcacgtcgtgctccccagttctccaagcgctgattatatttcagacgcaactttacggctctgcttcggcagagccgttttttgttgcccccttttccggagaacaggggagcacgactgcgcatctccggcggttgccccgcaaggggcgagccggaggcgcttacaaa

SEQ ID NO: 731 - DNA, 25879 bp, unidentified
  source 1..25879: mol_type = unassigned DNA
caccaagcagatgacctacgccgccctgagcggctttggcgagaccatcaagaccgagggcaaccagaacaatgaactgggcatgccccgcaccctgatgcggctggaaagcagcaccgagtacgcggtcatcgagatgggcatgagccacgccggcgagattgaccgtctggcgcgggcagcacggccggatgtgggcatcatcacctgcatcggcgtgtctcatatcggcaatctgggcagtcaggagaacatctgcaaggcaaagctggagatttgcaacggtctgccggagggcgcgccgctggtgctgaactacgacgaccccttcctgcgcaaggcagtactgcccgcccatgtgcgcccggtgtggttcagcctgagcgatgaaaacgcagacgtctgcgccctgtccatccggcaggagactgacggcatgagttttgtgctggaggatcaggagcacggcacctttgtggtgaatatccccgccatgggacgccacaatgtggcaaacgccttggctgcctactgcgccgctacccgtctgggctgcgacgccaagagggtcatccggggtctttccaactttgagcagaccggccgccgccagaaggtggtggacagcgagggcgtgaccgtcatcgaggactgctacaacgcaaacccggacagcatgaaggccgcgctggcgatgtttaaggacttcccctgcaagcgccgctttgccctgctgggcgatatgctggagctgggcgatctgagccgcgaagcacacgaggagctgggacgtcttgccgccgagagcgggctgtattgcctgatcacctacggcgagcaggccaagcgcaccgccgtggtggctgccgccaagggggtagagaccctgcacgcagaaaattaccgcgaggccgccgatgccctgctggaccgggtgcagcccggcgatgctgttctggtaaaggccagccacggcatggcactggaaaaagtgctggatatcttctacgaagagcataaagaagcagaagtataactatttggcgaaatggagtgtctgagttatggagcgtttcgccttggcagcggcggtggtgctgggctttgcccttacggcagccctgtgcagcctgtttgtgccgctgcggcgggtgctggaacgccgcgaacaaaaccagcagccggtacagtctgagcagccccggcctgcacccctgcgcgccccgctgtggggcggactgtgtgcggcggcgggcacggtggctgcggtgggcgtgggctggcttgctgcctgcgtgggtcagccggagctgctgggcagcgagggccggttgatgacacggctgctcacggcgctggccggaagccttgcctttggggcagtgggtcttgcagaggaccttgcccggatgcgcagcccggcggcgctggggctgcggcgggacgtgcggcttttgctggaagcactggccgcggcattcgttcttttgctgctgcgggcagcgggctgtctgccccgggggctgggtgtgcccggggcggggtatgtgctgctgggcagcgccgtgccctttttgtgggcggtgctcatggtggcactggccgagtgcgcccgcatcgccgagcgggatgaaggcacggtgtgcggcgcggcctttgtggctatgctggcgctgatgatggcagaggccggcttgggcgtgcccgggctggcggtgctgcccgccgcgcttgccggggcactggtggcgctgctgctgtgggcgttccccccggcaaggctgggggtgggctgctgcggcagcctgctggcggcgggtgccatcggctgcatcccgctcagtctggatatgaccagcctgactgtgccgctggcgctgcccttctgggcggcaggcggtcttttggcagcgcagctgctgggtgcaaaacgcaccggcaagcccttgcgctgctgggtaaaaaagcataaaatgagcccggagacggtgttcctgtgcagctttgcgctgagcgctgtcggctatgtactggcgctggcgctgctgcgctggtgctgaccgggcacagagagggaagggagcgcagatggcgactatccgcaaaaaacacagagcgccggtgccggtgttccagcgagacccgggcccgtggtcccggctgctgatcgactggctggccacgctggctgttattatgatctttgggctggtgatgctgttcagcgccagctacaccaccggttacctgcgcatgggcgacagcttccactacatcaagcagcaggcgctgtgcatgatactggggctgggctgtatgttcctgataagctatgtggatcaccgttttctgcgcaagatggtggtgccggggtacatcatcgtgctggctatgctggccgtcaccctgaccatggcacccctgaacggctgccgccgctggatccgctttgcaggccttacgctgcaatcctcggaggtggcaaagtttgagatgatcctgttcagttcccatcttgcagccaaggcgccgcaggtggagcggctggacccggagcgccgcatcctgcttaccccccgggaatggctgcgggtgcgggtgtggaagcagctggtggtgccggtgctgccccttataccggtggtcctcctgctggcgatggagccgcacatgtccggcatcgtgctgacggtggcggtggtgggcaccatcctgctgctgtccggcagcggcggtgtgctgacatgggcgggtgccatcacggcgggcaccctgctggagaccctgctctcccatgtggactctatcccctacctgcaaaagcgtctggacggctggacgcaggatctgagccagatgaccgaccagaccgtgcagagcctttatgctataggctccggcggactgaaggggctggggctgggcaacagcgtggaaaagcagctctggctgccggaaagcaccaacgacttcattttcagcgtggtgtgcgaggaactgggcttcattggcgcagtgctcatcatcgtgctgttcgtgctgttcatcgtgcaggggctgctcatcgcctataaggcggaaaatctgtactgcaccatggtaggcatcggcatcatggcgcagatcgcgtggcaggtgttctgcaacatcgccgtggtcaccaacaccctgcccaacaccggcatcagcctgcccttcttctcctccggcggtaccagcctgatcctgctgctggcagaaatgggcgtgatggtgaacattggccgcaacggcgagcgggcagcgcagcagcgggagcagatgcgtgcccagcgggaggccgcccgcgctgagcgggaagcagagcttgcacgcaagaccattgatctggcctctgcccgcgcagcccgtacagaacagtaaaacaaaccgcaagcccgcccggccgcaggccgggcgtttataaggaggaatcaccatgcgtgttctcatcgcagccggcggcactgccggacatatcaaccctgcactggccattgccggtgctctgaaaaaagccgaccctaccgccgagatccactttgcaggccgtaaggagggcatggagtaccgtttggtcacacaggcgggctaccccttccaccacattgagatcaccgggtttcagcgcaagctcagtctgcacaacatcaagcgcaatatcattaccctgtggaatctggccctctccggccccaaggccaaggccatgatgaaggaagtaaagccggatctcgtcatcggctgcggcggctatgtgtccggcccggtggtgcgctgcgccgccaaaatgggcatccacaccgccctgcacgagcagaacgctttccccggtgtgaccaacaagctgctggccccggatgtggatatcgtgtttgccgccgtgcccgccgccgtggaaaagctgggcgcaccggacaagacccttgtggtgggcaatcccgtgcggccggaggtgtttgtacaggccgcgaatcgcgaggccatccgtgcacagctgggtgcgggcgaccgcaccgtcatcctgtccttcggcggcagcctgggcgcacgccgggtcaacgaggtggtagcagacctgtgcgcctgggaacagcatgagcacaagccggtgctgcacctgcacgccaccggtcagtacggggtgcagctgtttgagcagctgcaaaagcagaaggattttgcccccggtgacagccttgtggtaaaggaatacatcaacaatatgccggagctgttggcagcggcagacctcgtcatcagccgcgccggtgcgctgacgctggccgagctggaggccgtgggacgcgccgctgtgctgatccccagccccaatgtggcggagaaccaccagtactacaacgccatggagctgcagaaggccggggcggctgtggtcattgaagaaaaagacctgaccggtgaaaagctggtgcagactgtttctgccatgctggcacagcccggcaagctggccgagatgggcaaaaacgcccgcagcctgtctgtggacgacagtctggaccgcatcactgcggcactgctcaagctggtaaagaccccgtgatgcagccccggaataaacaggaaagaaggtgcgaatgatgcagcagaaccgtgaccgcaacggcagaccccggaacccgagaccctatgacctgaaccgggatgtggtgcgcacctctgcgccttcgcagaatcataatacgccccggagcaccggcagcagccactacggctacaacggcgagccgctcagccgcccgccctcccgcagcgccaacggcagtgtgcgctcctcccgggcagataacagcatccagttccccacccagacccaatcccagccccgccgcccggcgcaggggcagggaagcaataccacccagtatcccgccggtaaccgcccggcgggcagcagaccaaaaaacgcgaagtccggcggcaaacagcgccgcccggcaaacaatgcccgcagcgggcagagcagccggaaaaaccagaacgcgcaaaaccgcccgaaccggcagcacccggcaggcagccagagcgccccgcagcaaagccctgcccggcgggaaatgcgcaaaaagcgcaaggtgacccgcgccacattgcggcgccgccggatgctgcgccgcctgaccgcctttgccatgctgctgtgcgttattggcgcgggcatctacctgaccatgaccatgctgttccgcatcaactccattcaggtgcagaccccggacggcaagcaggtgaccgagatcgcgggctactccgcagacagcattttgcagcggatgggcgtgcagctggaggaaaacatcttcagctttgagcccggcgaaaaggccgcggtgctggagcagaatttcccgctgctgggctccatcaaggtgatccgggactaccccaacaccgtggtggtgcaggtgaccgaggccgtgcccgcctacgcggtgcaaaacggcaataaatggcttgtgatctcggacaaatggaagattttgtccgaggaaagcacccagcctgaggggctttgcaccctgtacggcggcaagctgcaggataccaccccgggacagggcttctggttcgtggaggacgcggacgcggcaagcgcctccgggtcggaaaccgccgaaagcgaaagcacggtgagcaccgagaccgcccgcatggaagcgctgcgcaccctgcgcagcaagctggaggaatacggtctgtcgcaggacgtgacacggctggaggtggcagacaccgagcagctcgcatttttgtatcaggaccgcatcagcgtgctgctgggtacgctgaacgatctggattataagctggaccgcgctcgctatgtgctgaccaacgccgacggcaagggctgcggccccaccgataccgggcggctggacttcagccataccagcgccagcagcacacgcaagatctattttgcacagggcgagcccaccctgccctccggctatgtggtgccgcccaaggcagaggaacccgctccggcagaggatgccgccgacagcaccgacagtgcagaaagcacggatactgccgacaccaccgaaccggcggctgaaacggacaccgagcagctgcccctgacccaccctgaccgcatgacggccaacgaagaagaaaaccccatgtaaagaagctctatggaggagactgtatgaagctggaacaactgatggaaggcgtgccctttacccttgtgcagggcagtctggatactgagatcgcagatatcatctacgacagccgcaaggctgccccggggcttttgttcgtgtgcatcgtgggcacccagcgggacagccacgcgtttgccgccgactgcgccgccaagggggtcagcgcgctggtcatccagcacgacatcgacctttctaccctgcccggggtgaccgtggtcaaggtggagagcagccgctatgccatggcgttgatgagcgccaacctcttcggcaaccctgcccggcagatgaccatgatcggcgtcaccggcaccaagggcaagaccaccaccacccacatgatcaaaagcgtgctggaggccgcaggccgcaaggtgggcatgatcggcaccaacggcatctactatatgggacgccacaaggacaccgccaacactaccccggaaagctacgagctgcaaaagaccttccgggagtttctggatgccggctgcgataccgcgctgatggaggtatccagtcagggcctgatgatggaccgcgtggcgggcgtgcactacgatgtgggcgtgttcaccaacctttcgccggatcacatcggccccggcgagcacaagacctttgaggagtaccgcagctggaagggacagctgttcaagcgctgcgatgtgggcgtggtgaacattgacgacgagaacaccgccgccctgctggaaggccacacctgcaagctggtcacctatggccgcgatgaaaaggccgactaccgcgagaccggctacaaactgctgcgcacccacgattttctgggcgttgccttccacgttaccggcaaggacgagatggacgtcaaggtgaatatgcccggcgagttcagcgtgtacaacgcgctggccgcactggctgtgggcaaggtgctgggtctgccggatgccgccatccacgatggtctgggcaagtgcgtggtgaagggccgtgtggagctggtgcccatcagcaaaaagttcaccattctgctggattacgcccacaacgaggtatccaccgagagcctgcttaccaccctgcgcgcctacaagccccaccgtctggtggtggtgttcggctgcggcggcaaccgctccaagctgcgccgctacggcatgggcgagatctgcgccaagatggccgatttctccatcctcaccgaggacaacaaccgctttgaaaaggtagaggatattattgcggatatccgcgagggcatgaacaagggcaacccggacgcgaagttcgtggagatccccgaccgtctggacgcgctgcactacgcagtggatcacgcacaggagggtgacctgatcgccgtcatcggaaagggtcacgagacctaccgcgaccgcgagggcgtcaagacccccttccttgagcgggaactgctggaagagtacgcacagcagatcgggctggaataagaaaataatattattattgcgggaaaggccgctgcacaaagtactgtgcagcggcctttttgcgtctgtgggagcccctatataaagaggaagcaaactgtgtcgaaaatgtaaaagataaaaatttttaactaaaaccattgacttatccaacggtttgattataatggtcgtgttcgatacctcataaattttaggtaaataattaaaaacaaacagtgaacataaaggagaatactactatgactttcgaggaaatgaagaagatcgttgtcgataccctgagctgcgatgaggacaaggtgaccatggaggccagcctgaccgaggatctggaggccgacagcctggacgctgtggagctgaacatggcactggaagaggcctgcggcgtgtccatccccgatgaggagctggcaaacctcaagaccgtgggcgatatcttcaactacatcaatgcccatgtctgaggctgaccgaggcgaaacgagatgaacagtatcaaagacctgctgccgggcagcatgcgggagcgcaccttccagctgaaggcccggcgggatgcgggtgccgtgtggaacgacccgcagttcgtggaatgcaaaaagtgcggacgccgcgccacccgccagatctggaacaaggcacagtacgtctgccccaactgcggggtgcacctgcccatcggcgggtactaccgcctgagcctcgtccttgacaagggcagcttccgggaattggacgccgaccttgccccgcaggatgtgctgcagtttcccggctacccggaaaaactggaagcacagaccggcaagaccggcctgaaggaggctgtcatcaccgccacggggcgcatcgagggcactccggttgtggcagcagtgctggacagccggttctttatgggcagcatgagcaccaccgtgggcgaaaagatcacccgcgccgtggagcacgccaccgcaaagcacctgccgctgatcatcttctcggccagtggcggcgcccggatgcaggagggcatcttcagcctgatgcagatggcaaagacctctgccgccatcgagcggttctccgcccggggcgggctgtacatcagcgtgctgacccaccccaccaccggcggcgtgactgccagctttgccagccttggcgacattatgctggcagagcccggggcgctgatcggttttgcggggccccgggtcattgaacagaccatcggcgaaaagctgcccgcaggcttccagcgcagcgagttccagtacgagcacggctttgtggacaaggtggtgccccgtaccgaaatgcgcgaaacactggcgcagctgctgcggctgcacgcctgaggagggagcgccttatgatcaaggacatcttacaacagctcgcaccgctggatgaaaagatcgctgctctgcgcggtgacccggcggacgagaacatgaccgatatcaccaaccacgctgccgaactggcagagctttccgcgcaggaggacgctttgctgtccggctgcggagcgctgaccgcagaggacagggtctttctggcacgccacccggagcgcccccacatcgatgagatcgtggatgcactgttcaccgacttctttgagcagtgcggcgaccgtcagtgcaaggaagatgccgccattctgggcggtgtggcgctgttccacggccaaccggtcacggtcatcggccaccgcaagggcagcacgctggaagaaaacctgcgctgcaacttcggtatgcccgggccggagggctaccgcaaggccctgcgcctgatgaagcaggccgaaaaatttgaccgtcccatcattaccttcatcgacaccccgggcgcataccccggcaaggacgccgaggagcgcggacagggcgaggccattgcccgcaacctgatggagatgagcggcctgaccgtgccggtgatcgcagtggtcaccggcgaaggctcctccggcggcgcgctggcgctgggtgtggcaaaccgcatcctcatgctggaaaacgccgtctactcggtgctgagccccgagggctttgccagcatcctgtggaaggattcctcccgcagcggcgaagcctgcgagatcatgaagctgaccgcacaggatctgtacaaggacggcatcgtggaggagatcatcccggagccggtgggcggcgcacagcgcgcccacggggtactgttcggcaatctggacgaggcactgcagcgtcagctgcgcagccttgcccgcatgaacggccgtcagctggccgagcagcgctaccagaaattccgtcagatcggagaaatgaggaaagcatgaagggtttgcgtctgatcgccaccggcggggctttgcccggccgcacggtcaccaacgaagagctgagccgcaccgtggataccagcgacgagtggatcaccacccgcaccggcattcgtacccggcactactgcaccgagggcgaaaatgccgctacactggccattgctgccgcaaagcaggcgctgcagcgcagcggtcttgctccggcagacattgcctgctgcgtctgtgccaccctttccgcgccggacgccaccccaagcgtggcctgtcaggtgcaggcggcgctggcactgccggaaaaccgccctgcactggacgtgaacgccgcctgctccggctttttgtacggcacggcggtggcgcgcggcctactggctacgctgggcgggcggtacgcgctggtcatcggcaccgaggcgctctcccgcctgatggaccccgccgaccgctccacctgtgtgctgttcggcgatggtgccggtgcggcggtgtttgaactgaccgacacctccgcgccctttgccatcacgctgggtgcccggggcgatgccgccatccatgccggcggccccagccgcgcaggctcggcacccatcagcatggacggcagggcagtgttccgctttgcggtggatgccctgcccaaatgcctgcacaccgtgctggacgagaccggccttacgctggacaatctggactgggtggtctgccatcaggccaacagccgcatcatcgaccactgcgtcaaggcgctgcacgccgacggtgcaaagttctacaaaaacatggaccgccacggcaacaccagtgctgccagcatcccggtggcgctgaacgagctggctgaaagcggccagctgcaccccggccagacccttgcctgcatcggcttcggcggcggcctgacatggggcggcatgatcgtggaatataaaggataaagaccatgaaacttttaaacgagatcctggggacgaaataccccatcattcagggcggcatggcaaacattgccaccggcgagtttgccgcagcctgctccaacgccggtgcactgggcatcatcggtgcgggcggcatgaatgccgataccctgcgccagaacatccgccgctgccgagagctgaccgacaagccctttggtgtaaatatcatgctcatgcacccgcaggcagatgcgtttgcccagatcgtggtggaggaaaaagtcgccgtggtcaccaccggcgcaggcaacccgggaaaatacgtttccatgtggaaagctgccggtatcaaggtgatcccggtggtggctgctgccgtgctggcacggcatttggagccgctgggcattgacgccgtcattgccgagggcaccgagagcggcggccatgtgggcgagatgaccaccatggcactggtgccgcaggtggtggacgcggtcagcgtgccggtcatcgccgcaggcggcattgccgatggccgtcagctggcggctgcgctggcgctgggcgcctgcggggtgcaggtgggcacctgcctgctggcaagcgaggagtgccccattcaccccaactacaaggccgcgctgctcaaagccggggacagtgacaccatcgtcaccggacgcaccgtgggtgcaccggtgcgtgtgctgaaaaaccgcatgagccgggagtatgtccgtcaggaaaaggcgggcgccgataagatggagctggaaaaatacacgctgggcagcctgcgccgcgccgtctttgagggcgacacggtaagcggcagcctgatggccggtcaggtggccggaatgctgcacgaggtgcgccccgtggcggacatccttgccgacctgtggcagggcgggaggcagcgcatcgccgcgctgaacaccgaatgctgacccttggcggcaagcccctgcaagtacccattttgcagggcggcatgggcgtaggcgtctcgctgggcgggctggcaggtgcggtagcagcctgcggcggcatggggtgcatctccaccgccgatgcaggctaccgcgagccggattttgcccgtgacccggcggcagccaaccaccgcgccctgaccgcagagatccaaaaggctaaggccattgccgggggcatgggtctggtagctatcaacgccatggtagccacccgggactatgtcgaggctatccgcaccgccgtggcggcgggggtggatgccgtggtctccggtgcgggtctgccgctggagctgccgggcattgtggacaccaaagaggtagccattgcgcccatcgtatccagcgcccgggcggcaaagctcatcctgcgccgctgggcaaagggctttgaccgtaccgccgattttgtggtcatcgagggctgcaaggcgggcgggcatctcggctttgccgaggaggacctgctggccgaccgctgccagactttggacgagattctgcccggggtgctggccgaggtaaagccttacgaggaacaatacggccacgccatcccggtatttgtggcgggcggcgtgtacaccggtgccgacatggcacactttacaaagcttggcgctgcgggtgtgcagcttgctacccgctttatccccacctacgagtgcgacgcttcccagacctacaaggacgtgctgctggcggcaaagccggaggatgtgcgcatcatccacagcccggtgggaatgcccggccgcgcgctgaacaccccgctggtgcaggcgctggctgagggcaagcgcttcccgcccaagcactgcgctcggtgtctcaagacctgcgaccccgccgctgtgccctactgcatcacccacgccctcatcgaggcggtgaagggcaacgtggaggaagggctcttcttctgcggcgaaaacgtgggcaggctggaccggatgcgcaccgtgcgcgagctgatggacgaacttgtgaccgaatggaggcagaacttatgaagcttgccgtactttacgccggtcagggtgcgcagcaccccggcatgggcaaggaattttacgaagcatctcccgccttccgggcggcctttgacagcgcagcgctggattttgatctgcaccgcgtctgctttgaggacccggacggcgttttgaatcagaccgaatatacccagccctgcatggtggcctttgcctgcggtgtgaccgctgtgctggccgaaaagggcgtaaagcccgcctatctggcggggctttcgctgggcgaatactccgcgctgcaggcagccggggtgttcaccgcaaagcaggccattgagctgaccgccttccggggcaaggccatggctgaggccgcaaaaggccttgattgcggcatgaccgctgtgctggggctggacagagaaaaactgtctgcctgctgcgagcaggcggctgaggcgggctgtgtgcagatctgcaactacaactgccctgggcagctggtcatcggcggtgaaaaagccgctgtggagcaggccgccgcgctggcaaaagaagccggtgcccgccgctgcatcccgctgaaggtcagcggccccttccacacaaagctgatggctcccgcaggggatgcgctggcacagcgctttgcgggcgaaaacttcggcaccatggagacgccggtgctgttcaactgtctggggcatgaaaaggccgagaccgacagcatcccgcagctgctggtaaagcaggtgcagagcagcgtctacatggaagataccctgcgccgtctgggtgagctgggcgtggaccacattctggaagtcggccccggcagcgccctgagtggttttgtgaaaaagactctgcccggggtggtctgcaccgcagtggagaccccggaacagctggatgcggtgctgaccgcatggaaggaagcagaatgagcgaagaaaagctgacccgcgccgccattgttaccggcggcagccggggcattggccgcgcagtgtgcgtggcactggcaaagcagggctgcaacgtggtggtgaactactgccacggcgcagagcctgcggagcagacggcagcgctctgccgcgccgagggcgtgcaggcggtgaccgtgcaggcggatgtatccaccgccgagggctgcaaggcgctgttcgatgccgctgccgaggcctttggccgggtggatgtgctggtgaacaacgcgggcatcacccgggacaacctgattttgcgcctgaccgagcaggattttgatgcggtgctggacaccaacctgaaaagcgcctttctctgctgcaaggaggccgcccgccgcatggtgcgccagcgctatggccgcatcgtgaacctttccagcgtggtggcgctgcggggcaacgccgggcagaccaactacgccgccagcaaggcggggctcatcggtctgaccaagagccttgcccgggaactggccgcgcggaacgtgaccgtgaacgcggtagcacccggctttatcgacaccgacatgactgccgtgctgccggaggcggtgcgcaccggcatgacgcagggcatccccgcgggccgcgcaggccagccggaggatgtggcacaggcagtggcgttttttgccgcagaacaaagcagctatctcaccgggcaggtgctctgtgtggacggcggcatggcaatgtaaaggagaacccttatggaaaaacgcagagttgtgatcaccggccttggcacggtgaacccgctgggcaacaatgtggcggacagctgggcagcagcccgtgccggtaaatgcggcatcggccccatcacccagttcgacaccaccgacttcaagtgcaagctggccggtgaggtaaaggattttgaccccgagagcgtggtggacaaaaaggaagtccgcaaaatggcgcgcttcaccctgctggcactgggcgctgccgccgaagccattgcagacagcggccttgataccgaggccgagggcaaggacatcggcgtcatcctgtccagcggcatcggcggtctgcccacgatcgaggagcagcacgcccgcggcgaggaaaagggcatggagaaggtaagcccctactttgtgcccatggccattgccaacatggcagcggcgcaggtggccatccgcttcggtctgaagggcatgtgcacctgcccggtcacggcctgcgccggcggcaccaacgccgtaggcgacgccttccaccgcatccgggacggctacgagccggtgatggtctgcggcggcgcggaaagctgcatcagccccttgggcatcggcggctttaccagcatgaaggcactttccaccgccaccgacccggacgctgccagcctgccctttgacgcccgccgcggcggctttgtcatgggtgagggcagcggtgtgctggtgctggaagaactggagcacgcaagagcgcgcggcgcacacatctatgccgaggtggtgggctacggtgccaactgcgatgcctatcactttaccgctccggctcccggcggcgcaggtgccatcgactgcatgaagctgaccttggtggatgccgacatcgcaccggagcaggtggatcacatcaacgcccacggcaccggcacccacatgaacgatgcctgcgagactgccgccatccacgccgtgttcggcgcacacgccaaggagatgaccgtggtcagcaccaagagcatgaccggccatctgctgggcggcgcgggcggcatcgaggccgtgttcaccgcgctggcgctgcgggatcagttcgccccgcccaccatccactacgcccagcccgacccggagtgcgacctggactatgtgcccaacaccgggcggcagcaggagatgcagtacgcgctgagcaacagcttgggctttggcggccacaacgcctgcatcgccctgcgcagatgggagggctgacccatggcagagccccgtaccgtgcgtgaaaacgccaacaccctgagcagtgtacagatcgcggagatcctgccccaccgctacccctttgccctcgtggaccgtgttctggactacgagccggggcagtgggccatcggccgcaagtgcgtcacccgcaacgaggaattcttcaacggccacttcccggcgcagccggtcatgcccggcgtgctgctgctggaggcgctggcacagaccggcgctgtggcagcgctgagcctgccggaaaacaagggcaagctggcgctgttcggcggcatcaagagtgcccgcttccgcaagcaggtcacccccggggacgtgctcaccctccactgcgagctggtacagcagcacggcgctgtgggcgtaggcaaggcctcggcatgggtggatggcaagtgtgccgtcaccgcagagctgacctttgtgctgaccgacgcagcagaataaaatgaatgcaaaaagagataggcaatccctttcgggaaagcctatctcttttttgtgtctgttccggtcggtttactctgcggcagctgtcccggcgtctgccgcagcagcgggggcagactctgtcggggcggtcgctgcctgttccttttccatccactcccgcacgcggtcggggcggttggtgatgtaggcatcggcgctggtgcgcagcaggctgcggacggaatcttccgtgtccaccgtccacaaagacaccttgatgcccatctcgtgcagtttgtcaatgaaaccggcgtttttgtaggcggtgtggtactcacagctgacccactccggcacaaagtccagactgcggatataggtgggcagatcccgttgcgccatcaggtttttgtagatctcgttcaggctttcgccgggaaagtttgcccgcagcatacttaccttatcgctcatccagcgggtcatccagctacagttttcctcgtcggctgcgctctccggcagggcagcgtccatggcttccatgtcgtctatgccgttggtcagtcccagatccttccagatgatgggcggcggcagcagcatgctttccagctcgccgtataccagtgcacctacccgcagttcgggcagcagctgctttgcctgccgcagcagcgcgtggttgaaggaaacaaggatcacctgttctaccatctcggtctgctgcagcacttccagcacccggggcacaaagtccgggtcgttgtccatggtggatttcagttccagatgcacggtgcatcccggcatctgcctgcacagttccatggcctcctgcagggtggcgatcttctcgtcctgaaagatggcgcctttccagctgccaaaatccagctctttcagatcgcccatggtcatatcgtagatcttgccggaaatatccgtgtgcagatcgatcatatagtcgtggtggatcacaagcccggcgtcaatggtctgctgtacgtccatctctacgccgtccgcgccaatctccatggcttttttaaaggcagtcagggtgttttccggtgcaagataggaagcaccgcggtgtgcaatgatttgtggtgtcataaattttctccgttatcggttcttcctcacacttttacgccccggcgctgccataccgcaaacagtgccggggcgcttgctcaggtcaggtcctcgccgtctgaagcgatgacctttttataccagtaaaaactgtccttccggctgcgggcaagggtgccgttgccgtcgttgtccttgtccacatagataaagccgtaccgctttttcatctcgccggtggaggcgcttacaaggtcgatgggcccccatgtggtgtagcccatcaggggcagaccgtcctcgttgatggccttttccatctcctcgatgtgcgcccgcaggtagtcgatgcggtagctgtcgtggatggagccgtccggctctacggtatccaccgcacccagaccgttctccacgatgaacataggcttttcgtaccggtcgtagatggtgttcagcgtcacccgcagacccaccgggtcgatggcccagccccactcgctggctttcaggtaggggttcttcaccgatgcagacacggcgttgccttccgcattctctgccgccatcagctccttatccaccgtgatgcagcgactggaatagtagctgaaggatacaaaatccactgtgccctcccgcagcgtgcggtcgtcctcgggctgtgtgtgcagctgcaccccggcgcgctccatccgctttttagcccacacggggtaagcgccgcgcacctgtacatcggtaaagaagtagttgtcccggtctgcctcctgcgccgcccgtacatcctccggggcgcaggtgcgggggtagaactgacccgccgccagcatacagcccaccatggcatccggcattttttcgtgcgccagctttaccgcctttgcgctggccaccagctcgtgatgggcggcctgatacttgacctgctccacattctcgccggggtggaataccagcccggcgccggtaaaggacaggtgcagcagcatgttgatttcattaaaggtgagccagtacttcaccttgcccttgaagcggtcgaacagcacctcgcagtagtggacataggcgtccaccatgcggcggtctttccagccgccgtattttttgatgagggcaatgggggtgtcaaagtggcagatggtgaccagcggctcaatgccgtacttatggcactcgtcaaaaatgctgtcgtagaaggccagtcctgcctcgttgggctgagcatcgtcgccgttgggcaggatgcgggtccatgcaatggacagccggaagcacttgaagcccatctctgcaaacagggcgatgtcctctttataatggtgatacaggtcaatggcctcgtggctggggtagaaatgtgcgtcatcgcagcccagcatttccatatagcccgttgccaccggaaaacggtccgggccgaagggggtcacgtccaccgtagccagacccttgccatctgcctgccatgcaccctcgcactggttggcagcggtagcgccgccccacaaaaagcccttgggaaatttgcccatactctttacctccttgtttacttttgcgcccctgcggagcgcagatatacgcatactactatgataccgcaaccggcggcgcttgtccatgactgcattttgcaaaggtgcgtgcatttggggataaagtacgacttttatcgtcaaaacgccgaaatttcctactgttttttgcgcacttttcacgataaaaacacaaaacttgcctgtttttcttttattctgttccttttaaaccgcgcggcagtatggtagaataatagggtaagaactgcgctgcgctgctgcgctgctgagaacatggaaaaatggagtgtttgattatgactgagttcaaacccatcaaagaaggcaaagtccgcgagatctacgacaatggcgacagcctgatcatggttgccaccgaccgcatttctgcgtttgacgtcatcctgaaaaataaggtcaccaaaaagggcaccgtgctcacccagatgagcaagttctggtttgattacacccgcgatctgctgcccaaccacatgttgagcgtggatgtgcaggatatgccggagttcttccgccagccccagttcaccggcaacagcatgatgtgccgcaagctgaccatgctgcctatcgagtgcatcgtgcgcggctacattaccggcagcggctgggcaagctaccaaaagaccggcaaggtgtgcggcatccagctgcccgaaggcctgcaggagtccgataagctgcccgagcccatctacaccccctccaccaaggcagagatcggcgaccacgacgagaacatctcctacgagcagagcatcgacgtgctggagaagaagttccccggtcacggcttggagtacgccaccaagctgcgggactacaccattgccctgtacaagaagtgcgccgagtatgcactgtcccgcggcatcatcattgccgataccaagttcgagtttggtctggacgaggacggcaacgtggtgttgggcgacgagatgctgaccccggactcctcccgcttctggccgctggagggctacgagccgggtcacagccagccctccttcgacaagcagttcgtccgcgactggctgaaggccaaccccgacagcaactacgacctgccgcaggatgtcattgacaagaccattgccaagtatctggaggcctatgagctgctgaccggcaaaaagctgtaagcgtacatatagaaaaccaaggctgctgcggaaaattttccgcagcggcctttttgcgtcccaccctcttgacaaggggcggggagatgggtaatatatgtatcgcatcaaacagttttacatcgaacaatttgaacagaggaaaaccattatgtgtacacagcaccctattgaagagccctgcaagctggacccgccgtgggaagggccgcaggtcatccccgcccagctgcaccgggtggataacctgatcttccgcaggctgaaccagttttcccgcgccaacggggtagagcagaccacccccatgcacgggtggatcatcgagtatctctaccgccaccggaacgagccggtgttccagcgggacatcgagcgggagttttccatcacccgctccacggtgacgaacattttgcagctgatggagcgcaagggctacatccagcggctgagcgtgccgcaggacgcccggctcaagcagctggtgctgaccgaggagggcatccaacggcacgaaaagaccctgctgtccttccaccagaccgacgactatgtggccggactgctgaccgaggaggagaacgcagaactgctgcggctgctgaacaagctgcgggaagcactgaaataacgatcttttccgtcaaagcgccgaaaaaggacttgttaaattagcaattatgaacatttttcgaaagctattgacatttaaattgttttgtataaaattgttttgtaccaaacaaataaaattaacaggagggaactcagatgatcaaaaagcttgtgtcgcatctgggcgagtataaagccgcctcgatcaagacaccgctctttgctgcgctggaagccattatggatgtgctgctgcccaccatcatggcctttatcatcgaccagggcattgaaaagggcgatatgaacgccatcatccgctacggactgcttacctttctggtggcagccattgcgctggtgctgggcgtgctggcgggcaagtacgccgccgaggcatccaccggctttgccggaaatctgcgcgatgccatgtatgaaaacatccagcattactctttttccaacatcgacaaattctccacggcgggtcttgttacccgtatgaccaccgacgtgaccaacgtgcagaacgccttccagatgattttgcgcatgtgcgtgcgcgccccggtgcatctggtgtttgcaatgttcatggctgtggtcatcggcggcccgctgtcgctggtgttcgtggtggcaatggcctttctggtggcggtgctggctgccatcatgatccccaccttccgcatctttgaccgggtgttcaagaactacgataacctcaatgcctcggtgcaggagaatgtctctgccatccgcgtggtcaagagcttcgtgcgcgagggcttcgaaaacgaaaaatacactgccgcctgcgagagcctgtacaagcagttcgtcaacgccgaaagccgcctgagcttcaataaccccgccatgctggtggcggtgtacggctgcaacatcgcgctgagctggttcggcgcaaaatatgtgctgcacggtgccattaccaccggccagttgaacgccctgttcggctatatcatgaacatccttatggcactgatgatgctgagcacggcctttgtcatgattgctatgtccgccgcttctgccaagcgtatcgtggaggtgctggacgagcacaccgacctgcccccggcaaagcagccggtgcagcaggtggcagacggcagcatccagttcgaccacgttaccttcaagtataagcacggcagcggtcagccggtgctgaacgatatcagctttaccatccggcccggcgagacgctgggcatcatcggcggcaccggcagcgcaaaatccagtctggtgcagctgatcccccgcctgtacgatgccgagagcggcaccgtgcgcgtgggcggcgtggacgtgcgggattataaccttgatgttctgcgccgcgaggtctccatggtgctgcagaagaatgtgctgttcagcggtactattctggataacctgcgctggggcgatgccaacgccaccgaggaagagtgcatccgcatggcaaagctggcctgcgcggatgagttcatccagcgcttcccggataagtacaatacatggatcgagcagggcggctccaacgtgtccggcggccagaagcagcgcctgactatcgcccgcgccctgctgcgcaagcccaaagtgctgattttggacgactccaccagcgccgtggataccgcgaccgatgccaagatccgcaaggccttccgggaggagatccccggcacgaccaagatcatcattgcacagcgcatttcctcggtgcaggatgcagaccgcattctggtgctggagaacggccagatcaacggtctgggcacccacgcagagctgctggcgaccaatgccatctatcaggaggtctacaacagccagacgcagggcggcggcgattttgacaagcagggaggtgcgcagtaatggcagtaaaagaagtacatggccccggcccgcggggcgcacgggggccgcgccccaaggtggaaaacccgggcaagctgctgaagcgcattatggatgaggtgttccgcaactatctgccccactgcatccttgtgcttgtctgcatcgtggtcagcgcgctggccaatgtgcaggccagcctgttcttgcagaccttgatggacgattacatcgtccccatgacccgccagcaggaccccagctttgcaccactggccggtgcattggtgcggatgtgcggcatctaccttgtgggtattctggccgcatgggccaacgcccgcatcatggtcaacgtaacgcagggcacgctgcgcaatctgcgcaccaagctgttcacccacatggaaagcctgcccatccggtattttgacactcatcctcacggcgatatcatgtccgtgtacaccaacgatgtggataccctgcgccagatgctcagccagagcatcccgcagctggtgtccagcgtcatcaccatcgtgtcggtgttcttcagtatgtgtatgctcagctggcagctgaccatcgttaccatgctcatggtggcgctgatgctgttctgctccaagcagatcgcaaaaagctcctccaagtacttcatccagcagcagcgggatctgggcaaggtgaacggctacatcgaggagatgatggaaggccagaaggtggtcaaggtgttcacccacgagcagcagacccttgccggcttccgtgagttgaacgaccagctgaaggaaagcgccaagcaggccaatgccttctccaacatcatgatgccggtcaacgcccagctgggcaacatcagctacgccatctgcgcgctggttggtgcagccatggccgtgggcggcgtcggcggcatgacccttggtaccgtggtggccttcctcagcctgaacaagggcttcaatatgcccatcagtcaggtgtccatgcaggccaacagcgtcatcatggcactggccggtgcagagcgcatcttcaagatgatggacgagcccagcgagaccgacgagggctatgtgacgctggtaaacgccaagtacgaccgcaacgaccagctggtggaaactgccgagcgcaccggtctgtgggcgtggaagcacccccaccacgacggcactaccacctaccacaagctggcgggcgacatcacctttacggacgtggactttggctatgtgccggaaaaaacggtgctgcatgacatcaacctgtacggccgtccggggcagaagatcgcttttgtcggctctaccggtgcaggcaagactaccattaccaacctgatcaaccgcttctacgatattcaggatggcaagatccgctatgacggcatcaacatccataagatcaaaaaagctgacctgcgccgctcgctgggcatcgtgctgcaggacacccatctgtttaccggcacggtgatggagaacatccgctacggccggctggaggccaccgatgaagagtgcatcgccgccgcccgtctggccaacgcagatggctttatcaagcgcctgccggagggctacaataccatgctgaccggcgatggcgccaacctctcgcagggacagcgccagctgcttgccattgcccgcgcagccgtggcagatcccccggtgctgattctggatgaggcgacctcctccatcgatacccgcaccgaggcgctggtgcagtgcggcatggacggcctgatgtatggccgcaccagctttgtcatcgcccaccgcctgtccaccgtccgcaatgcagactgcatcgtggtgctggaacagggccgcatcatcgagcgcggcagccacgacgagctgattgccaaaaagggcaagtattaccagctttataccggtaatctggccgagaactaaacaatttcccaccttcttacaaagccgccgcacagccatgccgccgtgcggcggctcttttttactcccgtgaaaatggtatacaaatgccccgggctgtgctagaatggagcaaacgagaaaaaggctggtgagtgtatgcaccctctgacggaatatccccgcccggccatgcgccgggacagctacgagaacctgaacggcctgtggcagtacgccatcaccgcctcggcacagcgcccggcgggctgggacggcgagattttagtgccctacgcgccggagtgccgcgcctccggggtggggcgcacattgcagcccgggcagtggctgcactaccaccgatattttgcgccgcccgccgggacgggcggacgggtgctgctgcatttcggcgcagtggactacgcctgcgccgtgcaggtgaacggccgtctggtgggcggccaccggggcggctactggccctttacgctggatatcaccgcgcagctcaacggcataggccgcaacagcctgtgggtggcggtgcaggaccccaccggccacggcacacaggcgcggggcaagcagactttgcagcccggcgggatgttctatcccgcgcagagcggcatctggcagacggtctggctggagcgcgtgccggaaaattacatccagtctctcaccgttacgccggactatgatgcccgcaccgtgaccgtgaaagcccatacctctgcacccggcggcgcggcgaacctgtgggcggtggtgcgcgccgggggtgtgaccattgccgaggactggggcagcgatgaggccggccaagacggcacggtgacgctgcatattgcggacgagtatttcttcccatggagcccggacacgccctttttgtacgacctgaccgtgggcactacgcagggagaggaagagcagttcgacaccgtgcacagctactttgctctgcgcaagtggagctgcgcaccggacgcaaggggcgtgctgcgcttttgcctgaacgataagcctatcctgctcaacggcctgctggatcagggctactggccggagggactgtacaccccgccctcggatgcggcggtggaacgggagctgagcgaggtaaaggcgctgggctacaacctgctgcgcaagcacgcaaagatcgagccgcagcgctggtactaccactgcgacaagctgggacttgtggtctggcaggatatggtcaacggcggcagtaagtataacctgtggttcgtcacctacctgacca

SEQ ID NO: 732 - DNA, 7299 bp, unidentified
  source 1..7299: mol_type = unassigned DNA
tcatttcaaaacaaccgtaaagcagctgccgctgccggggcggctgtccacagtgacagcgccgccgtgcagggcggctattttttgtgccatggcaaggcccaagccgttgccctgcgtccggtggctggtgtccccctgatagaactgctcaaagatatggcggcaggtttcggcgtccataccgcagccctggtcagtgacagccacaaccgggctgccctgctcgctgtgcagtgttacgcttatgattccgctcttcgggctgaacttggcggcgttgtccagcagattcagccagatctcctttaccagcgtctcgctgccgtggtaggtgcagggggccagctcggcctcaaactgcagcggcttatcgcgccacttttgccgggtcacaaggatgcactggcgcagctgctcatccagcgaaaagtctgtgcagtcggtcagaatggtctgtgcctcgatacgattcaatagcagcacactgccggaaagctgcgccagccgcctgctctcatcgcggatgatttgcagatactcgcgctgctcctccggggtgacatcctcgtccagcagcaggtcggcaaagccgctgatgctgacgatgggcgtcttgaactcatgggaaaagttattcacaaaatccttgcgcagcagctccgtgccggaaagctcctccgccgctttgttgaaggctgctttaaactcccggatctcggtaggctcatacccgtgggcagcaggctgcagacgcacggtgaagtcccctgccgccagccggttcatcgcctgtatgatgtttttgataggctttattaatacaaggcgaatcgcaaccacaaggctgacggccatcaaaatacaactggcatacaaaataaccagcgcaccgccgatgctgacgctgccgtcttggataaaaaagccgtggtcagcctccaatacaaccagcaccgtgacagcggtcagattcagtgtaacaatgaaaaagaggttcagcaccagcagcatcgtcaaatttacggtgcgtatgcagtcgcgcagcttgtttacaaattgcgccatattacaccttctttatagcacggtagccaatgccgcgaatggtctgtatctcaaactccggccaatcgtaaaagcgggtgcgcagccgattgatatgaacatttaccgttttgtcgtcactttcgctgtccatgccccagatctcatccagcagctccagccgggtaaaggtcctttccggataagccagcagcttgtataggaggttgaactccttgggcggcagcacctgtgcatcgtggccgcgccgcacggtatgggtgtcgtagtccatctcgacatcccctatcgtgattttgtgttcatccacgatgcgggcgcggcgcagaagcgccttgatgcgcagcacaagctcctgccggtccggcggttttgtcatataatcatcagtgccaacgataaaacccatgtgcttgtcctgcggcatatccttggccgtcagcattaaaataggcagcatgctgccgctttcccggatggtcctggtcagggtaaagccatccatccggggcatcatcacatcgcagagcagcagatctatatggttgtggtcgagcatttccagtgcctgcacaccgtcggcagcaatcagcggctcatagcccgctcgctttacgatggcgcaaagcagacgcgccgtgctggggtcatcctcggcaatcaaaatacgaaacatccgtgtatcctccttagttctattatagtacagcgcaaagataaacgaaagataaacattcccgtttaccaaaggtttattttggcggtgtatccttaggagcatcgaaacaaaaaacaccctacgggaaaacggaggatacagctatgaaaaccatctatcttgtcaccggtgctgccggatttatgggcactaatgtctgcgcacagcttttggagcgcggtgatgctgtgcgtgcttttgtgctgaagggcgaccccgctgtaaaattcatgccgaaggccgtcgaaatttttgagggtgacctctgcagtgccgaggactgcgagaaattctttgccgtggagccgggcgtccagactgtctgcatccactgcgcgagcatggtgacgatcaacccgaattacagtgaaaaactcatcgccgtcaatgtgggcggcaccgaaaatatgctgaatgccgccaaaaatcacccggagtgcaaaaagttcgtctatgtttccagcaccggcgccatccccgagctgcctaagggcgagagcatccatgaggtatacagctttgttccctacgatgatgatcgcgtggtcggctggtacagccgcagcaaggcaatggcgacccagaaggtgctggacgccgccgctgacgggctgaatgcctgcgtggtgcatcccagcggtattcttggccccaacgaccccgccatcgggcagacgacccgcacgctgatccagattttgaacggtgagatgcccatcggtatgcagggctcgttcaatcttgtcgatgtgcgcgacctggccgccggtacgattgccgccgctgaccgcgggcgcaagggcgagtgctacatcctttccaatgacgaggtttcgctgaaggaactctgcgaaatgctgaaggcagaaaccggctgccgcggctgcctgttttacatgccgctttcttttgcgcattttgccgccaagcagatggaggcccgcgccgccaagaccggtaagcctgctgtactgactgagtttgccgtttacaatctggagcgcaacaaccattttgactgctccaaggcaaaaaatgagcttggctttgccccgcgtccctacaaagaaacactgcatgatttggcggtttggctcaagcaggagggaaaaatcgcatgaagaaggtttgtgttatcacaggcggcggcagcggcatggggcttgccacggcgaagctcgtctgtgaagaaggatattacacgattttggtggggcgcacggcgtccaagctggaaaaggcagtcaacgatctgcgcagtgcaggcggcgaggccgaggcgttcagctgtgatgtttccgaccgtgaaagctgttttgcgctggccaaatacgccgccgaatgcggcgaagtaaaagcggtattgcacatcgcgggcctcagccctcacatgggcgatgttgaaaagattttgcgcggcaatgcgctgggcacggtgaatatcaacgatgccttttatgaggtcatggcaccgggcggctgtgtgatcgacacctccagcatgagcgcctaccttgccccgcagtttatcatgcccaagggtgcgtacaagctggcgcgcaccgaccgtgaaaaattcatcaaaaagctggtggcgcgggcaggcatcgcccctaaggacgctcgcccgggtctggcctacgccatcagcaagcattttgtaatttggtttgctaagaccgatgccgcacgctttggcgagaaaaatgtgcgttgcctgagtgtgacacccggcaactttgacacgccgatgggcgcactggaaagcaggcaggcggatgtattcaaaaaatactctgctctcaagcgcaacggaaagccggaagaaatcgccgctttgtttgcgcttcttctggatgagcggctgggcttcctgaccggagcagacattcttatggacggcggcgttgtggcaagcggcgccagcggattgagcaaataaaaagggcagcaaagtaaaccccgattttagcttttggggtctgctttgctgccttttgaattttgtgctttcgcttggctgtactttagtgcagctcgctttcgcagcggtccagcacggcggcgataacctgatccatgtcgtaatacttatactcacccaggcgtccgccgaagatgaccttcgactcggcgtcggccagcttcttgtactcggcatacagtgcgccgtttttagcatcgttgacggggtaatacggctcgtcaccgggcttccactcggaggaatactcacggctgatgatcgttttgggcaggtcgttgccgttctcgtccttgccgaactcgaaccatttgtgctcgatgatgcgggtccacggcgtctcgcggtccgtatagttgacggcggcgttgccctggaagctgggcttgtcgagcagctcgttctcaaaccggacggagcggtactccaacgtgccgagtttgtagtcaaaataagcgtcaatcgggccggtgtagacgattttgtcagccagtgcgtccagcgcgaccttgttttcgaggtaatcggtgttcagccgcacctcgatgccgtccagaagattggcgatcaccttggtgtagccgccgatgggaatgccctgatacagcgcgttgaaatagttgttgtcaaaggtcagccgcacaggcaggcgcttgatgataaatgccggcaggtccttgcaatcgcggccccactgcttttcggtgtagcccttgatgagcttttcataaatgtcgcggcccacaagggagatggcctgttcctcaaggttctgcggctcgtgggtgatctcacggcgctgctcctcaattttggcggctgcctcctccggtgtgacgacgccccacattttattaaaggtatacatgttgaagggcagcgaatacagctcacccttatagttggcaacgggagagtttgtaaagcggttgaactcggcaaaccgggtgatatagttccagacctttttgttgttggtgtggaagatgtgcgcaccatacttatggacgttgataccctcgatgttctcggtataaatgttgcccgcaatgttggtgcgcttatccacgaccagcacggatttgccgtgggccttggcctcatgggcgaagatggcaccgtacagaccggagccgactaccagataatcatatttcatataacaggtgttcctctctttaaaaatcacagggatattgtgcggtaatggcattgagagccttactccaccgtcaaaaagcggcagaaaggcgtttcagtctctgccgaatagatctcttgtgtagaccttgtcctgcacatcgttgaggcaggcatcgtagcggttggccagaatggcctgactctgccgcttgaatttgtccagatcgttgaccactgccgaaccgaagaaggtcttgccgttctccagcgtaggctcatagatgatgacctgtgcgcccttggccttgatgcgcttcatgacaccctgaatcgagctttggcggaagttgtcgctgttgctcttcatcgtcaggcggtagacgccgatcgtgacgggcctttcgcggctttcgtcaaactcattttcctgatcgtagccgtagtacccggccagcttcagcacgcggtcagcgatgaagtccttgcgggtgcggttggactccacaatggcctcgatgagattttccggcacatcggcgtagtttgccagcagctgcttcgtgtccttgggcaggcagtagccgccgtagccgaagctggggttattgtaatggctgccgatgcgcgggtcaagacatacgccgtcaatgatctgcttcgtgttcaggcccttgctctccgcgtaggtatccagctcattgaaataggcaacgcgcagcgccagataggtgttggcgaacagcttgacggcttcggcctcggtaaagcccatgaagagcgtatcgatgttctccttgatggcaccttcctgcagcagtgccgcaaattcgtgggcggctgcgacaaggtgcgcatccttcggatcggtgccgacgatgatgcgggacgggtagaggttgtcatacagggccttggactctcgcagaaattccgggctgaacaggatgttccggctgccgagcctttcccgcaccgacaccgtgtagcccacgggaatcgtcgatttgatgaccatgagggcgtttggattgacctccgtgacaaggcggatgactgcctccactgcagaggtgtcaaagtgctgggtctggctgtcgtagttggtgggtgcagcaatgaccacaaagtccgcatcggcgtaggctgcctttgcgtccagtgtggcggtcagatccagctccttctcagccagatatttctcgatgtaatcgtcccggatcggcgatttgcgcgcgttgatcaatgcgaccttttccggcaggatatccaccgccgtcacatgatggtgctgggaaagcagcgtggcaatcgaaagccccacatagccggtcccggccaccgcgatcttatattttttcataacagttatactccgcagctgcgaattttccgtaaggcagcggtcaaaattacgccgtgccggcttaccgtatgtaggtttattatagcacgtcaccggccacaattcaacattgccgcttccatcagaattgtttgaacaataatccagtattgaaaacaatcgtctctactcagtctttgatgtatctgctaagatagaatcacggtactggcgtggtgtcagaccggtttgtttacggaaaacacgataaaagtaattgtcatccaggaatccgatctgctggcagatctgtgcattggacagattcgtatcgcaaagaagcttcatcgctttttggatgcgcagatgcgtgatctgctcgttgatgccgcagccatagagctgccgggaaagatagtacagcccggtacggcttaacgaaagatcacggcagatcgtttcgtttgtcaatgtctcatccagatgtttcgccaggtagtggctcagtttttcctgcgcactgcccgctgccagccgcgtcagtcccttttggtacaatgcagccgccgccaaagccagcagatccgctgctgatttcagcaccggatagggcgtgcgcggcaaggcattataggctttttgcagtgccgctttatcaattgcgtaagccgagcagcatttttgcgcatagctccactcgctctgctcatcggccccctgtacaatgtggctcaacagcaaaaagcccacaacagcaccatcgatttggaccggcgtgatcacttcgatcaaccccgcatggcaggggtagatgatcgtctgcttttgccgcgttgccttgcggcaagccgcctggtcacacaggtaacagccggtctttccatcaggcacactgcggatcaagcggcaataagctggcagttccggcggataggcaagcacttcgattccatacgaatcaaaaacggcggagcgcagccccgtaaggcagtgaaaatcctgcaagaggaccaaaagctcctttttattgaaaacggttcccat

SEQ ID NO: 733 - DNA, 22530 bp, unidentified
  source 1..22530: mol_type = unassigned DNA
ttacatttctttctcaaacttatcgatcttcccgaccttgccgatgaccgcgacggtatctccctctttaaaggtataatcggcggagaactccacgttcgtctgctggccgtgctcgacggcgatgatgttgatgccgtaggccttgcgcagatccagcgtccgcacactcttgcccagcatcctgccgcccaccgtgatgcgccgcacctcgacgccgtcgccgagggcgatgtagtccagcagattgcccgagatcagccgcttgccgatgcgcacggccatgtcggcctccgggtagacgacctcggccccgagacgcttgagcacctcgccgtgcacctcactggcggccttggagatgacgtgcggcacgcccagctttgtgacgagcatcgttgtcagaatgctgatgtcgatctgctcaccgatgcagatcgtgaccgtgccgcagttctgcatgccggtttccttcaaagaggtctcgtccaactcgtcgatgacaaacgcatagtcggtgtagccgcgcacggccttgacctttgcctcgtccttgtccacggcaatgacctccttgccggcggcggccagcgtcttgaccagcgccgtgccgaaccggcctaacccgattacgccgtagctctcggcggcatttttctttttgtcaaacatacgtgtaccctttctgcgccgcgccgggcggcagagtatgtagggacgcattctatatgcgcccgcggagccgtgcctgtggcaggcgggcacgggcggatatggaatccgcccctacggtggttgccttgcggcttcgcatttacccaatcgtaatggcttcttcggtatagcgggcggtgggctcggggcgctccacccagagggagagcagcgtcaccgcgcccacgcggccaatgaacattgtcaggatcagaaccacccggctggcagggcataactccgccgtgatgccggtggaaagccccgccgtgctgtaggccgagatctgctcaaacagcaggcggccaaaatcgagctgcggctccagcacgcagagcgcaaacgtgccgccgcccacgaccatcagccccatcagcatgatggtcgcggccttggacagcgagctgtccggcagacgccggtggaacgcgccgagccgccgcttggagaagatggaccgcacctgctgcatcagcacaaaaaatgttgtggtcttgatgccgccgcccgtcgagcccggcgatgcgccgatgaacattaagatcatgatgaccagcagacccgcgttgcttatgctgccgaaatccacgctggaaaagcccgccgtgcgggccgtcatgctctggaaaagcgccgccagccagcccatgtggtcggtcagctgcaaaagcaccgcgccgcccaccaacagcaccgctgtggtggagagcacgaccttggtgtggaacgtcattctgcggaactgcccgcggcagcgccccacgtccagaatgaccatgaagccgatgccgcccacaatgacgagcgcatcggtgacgagattcagcagcagatcgttctgataggggatcaggctctgcccgccgcccagtgcgtcaaagcccgcgttgttgaaggcggcgatcgagtggaaaatgctcagccacaccgcctgcagcggcatgtgatcgcgggcaaacgaggggaagcagagcgccgcaccggcgacctcgcagatcagggtcatcagcaggatggcccgcacaaggcgcaccatgccctccaggctctcgacgttcagtgcctcccgcacgagggagcggccctttaagctgatgcgccgcccggcgaccagcgccagccccatgccgatggacgcgacgcccagaccgccgatctgtatcaaaatcgcaatgacagcctgcccgaacaggctgaacgtgtcgccggtgtccaccacgaccagcccggtcacacagacggcgctcgttgcggtaaacagcgcgtccagcgggccgacgtgtgcgccggggtgtacggcaaacggcagcatcagcagcgccgcgcccagcaaaatcagcagcgcaaagcccacggcaatgatgcgcgccgggggctgatttttcaaaaatctggcaatggcattgtgtatggcgctgcgtagctgctgcatggccgccctccgataagcaaacgataagcaaatataaaagcagcgggccctccgattgctggaaaagcccgcacagccccgcggaaaaatgggtcgttaccccactatagcatgaatgccgcacagcgtcaaggcgcttttttgccctgcatgccttgcgctttgcgcccaaatgcggtatagtttaaatagctagaaacctgaatcaggagaaaccgaatgaaacaacaaacaaagggcggggctttgcacaggctctggcaggcgctgccgtggctctggatggcggcggcgtatctgtttgacctgtggtaccagcttgtgcccggcaaatggatcgtcgattccgacctcgcgtcggagatgatcctctccgacctgctcaacaaagagggcagcatcatcagccacaactggttctactccacggaattgaaggtcgtcaatctgcaatggttctaccggctggggctgctgcttttcccggatgactggcatctggcgcgcgcgttcggcatggccgtcacgctggcactgtacgcggcgtgtatgctgttctttgtcaaatgcgccaggctcgggcgacccggcctttggatggtgggcacgctgctgtggccgttcggccagcactatctggtctacgccatctacggcgggtactacctcgtctatactttcttttatatgcttgtgctggcgctggtgctgcgcagcctcgacgccgacaaaaagcactgcgcactgcaatggctcgcggcctgtatcgccacggccatcgctggcatgaacggcgtcaagcagctcatggtgttccacgcgccgctctgcattgccgcggcgatcctgctggtgcttgcactgcacgacagcggcacgttcgactggaaaacggccctgcagcactgccgtcgtcaggtgcggctgtttgcggcgtcgcttgtcacggcggtggccggcggggggggatatttcatcagcaacagcgtcatgtcgcggctgtatgatttcaagtcctacagcttcatcgtctgggaccgcgacgagaactggttcacgctggaccgcatcctgatggacttcttccatgagttcggctaccagaacggctccggcatcttccacttcggcggcattgcggcgggcatcggtctgctgctgggcgggtggatgttcttctgcatcgtgcggctgttgctgcggctgaaaaagctggagacgaacgaccagctgcttgtgctgctgctcgtcgccatgctggcggtctgcggcatctcctacacctacttccacgagtattacctctacttctggctcatgaacatgccggtggccattgcggtcatggcggtggagctgaaaaccgaggacttccgcctgcccggcgcgcggcagctgctgggtgtggtgctggcaggctgcttcacggtttgcgccgtcaacaccgtccggcaggagatcgaaaacccgtatctcgcccacaaggggctggacgccgccgccgactggctggtggacaacggctacaccgaaggctacgccacgttctggaacggcaacgccatgacggagctgacgaacggaaaattggacgtctggacgctgcaatcgctggatgaggactacgtccccaactggctgcagcgcaaggaccacctgaccaccgacccgcagcacccgttcctgctcatcgacaccgagaccgacggcccggcggagagcgcgggccttgtgcagaacggcgaatgcaccgaggtctacaacgacggacggttcgtcatctatgacttcgccagcgcggacgccgtgcatgcggcggcgaagtgaccccccttggccccctctgggagggggctcccgccgcagcgggtgggggagagaaccttgcggcgacccgaaatatttcgggtcatggcaaggctctctccctccggccctgcggggccacctccctcgcagagggaggcaagaagactaaacaaatccaaccccattacatatataaatataaggagtgttcttatgcgttactgcaaaaaatgtacgatgcccgacacccgacccgggatcaccttcgacgcggagggcgtgtgcagcgcctgccgccactacgagagccgcaaaaatgtggactgggatgcccgcttcaaggagttcgaggcctactgcgacaagtaccgcggcatgaacggccccggcggctatgactgcgccgtcgccgtctccggcggcaaggacagccacttccaggtctggatgctgaaagaggtcatgcacatgaaccccatcttgttcagcgtcgaggataacttccccatgacgcaggcgggcatccacaacctcaagaacatcagcgaggagttcggctgcacgatcatctcctgcaagcccaacatcaaggtgcaaaagacgctgatgcgcaaattctttgagaagtacggcaagccgacctggtacgtggaccgcctgatctacaccttcccgctgcacatggccgccaagttcaacaccccgatgctctgctacggcgagaacgtcagctttgagtacggcggcaacgccgataaggagacctactccgccatgggccagatcgagaacggtgtcgccgtcggtatgccgatggaggaactgctgggcgacggcgtgaccgagaaagacctctctttgacgctggcccccagcgccgaggagcgcgccaagctcgacccgttctacatgagctactttgtgccctggaacagctacaagaactaccagatcgccaaggcccacggcttccacgacctgacccatgagtgggaccgcacccaccacgccgagaactttgaccagatcgactcccgcgcctatctggtacacagctggctcaagtatcccaagttcggccacgccgccgccaccgactacacggcccgctacatccgctacggcatgatgacccgcgaggaggctatccccatcatcaaggagcgcgacggcaagctcgacccgctctgcgtgcgtgacttctgcgagttctgcggctacaccgagaccgagttctgggccattctggacaagttctacaaccgcgacctgttcgagaagaacgagtacggcgagtggcagctcaagcaccccatctgggaggaaaacaagtaatggtacgtcatgttattttgtggaaattaaaggagatgccagacgccgaaaaggccgccgtcaaggccggcatcaaggaagggctggagggtctggccggtaagatccccggcctgctggatgtccgcgtctacaccgacgccctgcccagctctgccaacgctgacctgatgctggacacgaccttcaccgacgccgccgcgctcaaaggctactccacccaccccgcccacgtcgccgtggcggacggcaaggtaagaccgtacaccgcggtaaggacgtgcttggattttaacgtgtaagtaagcagaaaataaaatgtaggggcggattccatatccgcccgtggacgcttccgcagccgcggactctgcgggcgcatatagaatgcgcccctacggtataacggaggaataatcatgaccaccctcatccgcggcggcctcgtccatgacgctgtccaccgcgacgcctgcgaggccgacattctgctggccgacggcaaaattgccgccatcgggaccgatttgaccgccccggcggacgccgtggttttcgacgcagacggccttgatgtattccccggcttttgggcaaggacgcggacgtcgtcatcacgaacggcagccccttcgaggtcatgaccgaggtgcgggccgtatttatcgacggcgtgcaggtcgcggaataacaccccttgcaaaatgattttccttgtgctataatacccttatacggcaaaggcgccgtctgatagcattgctatcggacggcgtcttttcattttgatacagagccgattggagtgtaaagaatatggaaaagattccccgtcacatcgacattgactacagcaagtacgccccggacatcccggaggaccagctcgaagcctactacggcctgcccaagcacgtgcagttctgcaaggaatgtgtcatgagcaaccagaagcccaactcctgctatgagtttgagcatacgatcaactccatcaagaaaacgatggtcattcaggaagacggcgtctgtgatgcctgccatgcctgccacaacaaggccaacggacatatcgactgggccctgcgcgagaaggagttgcgcgagctctgcgaccagtaccgcaagaacgacggcagctatgactgccttgtgcccggctcgggcggcaaggacagcttctacgccgcgcacctgctgaaatacaagtacggtatgcacccgctgaccgtcacctgggccccgcacatctacacgccctggggctgggagaacatgcaggcgtggatccacgcgggctttgacaactacctgtgtacgcccaacggcatgacccaccgcctgctgacccgccttgcgacggagaacctgttccacccgttccagcccttcattctgggccagaagcagctggcgcccaagatggccgcgaagttcggcatcccgctggtgttctacggcgagaacgaggccgagttcggcaacccgattgccgacaacaactccgccctgcgcgacgaacatttctttgcggtcaacgactacgaccacatttatctgggcggtgtcagcctgcgccagctggaggaggactacaaagtggacaaggccgatttggccatctacctgccgtccgagacttccaaccttgagaaaaaccacattcaggtgcggtatctgggctattacgagaagtggcatccgcagggcgcgtactactacagcgtcgagcacggcggcttccgccccgcgccggagcgcacccagggcacctactccaagtacaactccatcgatgacaagatcgacgacttcttctactacacgacctacatcaagtacggcatcggccgcacgacctacgacgccgcgcaggagatccgcaacgaggagatcacggtggacgagggcaaggcgctctgcaagaagtttgacggcgagtacccggaccgttttgaaaaggaaatcttcaaatatctgtcgctggaccgccagcacttcccctgggccagccagctgtttgagcagcccaggatggaccgcgactactttatggacctggcggaccgcttccgcagcccccacatctggaagtgggaggacaatatgtggaagctccgccacaccccctacgagggcgacagcgaggtactgtggggcgacccgagggggacgcaccacgaaatttgagcgaaaaggcttcccccttgggggaagctgtccgcgaagcggactgatgaggggtggactttccgcggcaacccgtttgcgggcaatcgtggcatacgcgcccctcatccggccttgcttcgcgcggccaccttcccccacaggggaaggctttagaaaggttcagctatgagcaaaaaaatacgacttatcgccagattggacgtcaaggacaccaaccttgtcaagggcatccagctcgagggactgcgcaagctgggcgacccgaatgcgtttgccaaagaatattatgaggccgggatagacgagctgctctatattgacatcgtcgccagcctgtacaaccgcaacaatttaagcgatattgtgcgcaaaaccgtggacgacgtctatatcccggtctgcgttggcggcgggttgcgcagcgttgaggatgtgcgccacatcctgtcgatgggtgcggacaaggcggccatcaacacggcggccatcaagcgccccgagcttatcaccgaggtggccgaggcgttcggcagccagtgcatggtgctgtcgattcaggccaagcgcagccgcacctggcccggtaagtgggaagcctactacgacaatggccgcgcccactccggctatgacgtcgtcgagtgggccaagcgcggcgtggcgctgggcgcgggcgaaattctgctgaccagcgttgacaacgaggggttacagcagggtatggaccttgaattgatcgaggccgtgacgaaagccgtgaacgtgccggtcatctgcggcggcggtgtcggctgcggcgacgacattgtggacgccgccaacgcgggcgcggacgccgtggcctgtgccgctgtgctgcattacaaaaaagaaaccgtgacggagctgaaagaggacatccgtgcgggcggggtggaggtgcgccgggtatgaaggtaacagtgattgactacggcctgtccaacctgttgagcgtccgccatgcgtttgcccactttggggccgaaacgctgctgaccagtgacccggcggacgtgctggccgcggaaaagctggtgctgccgggcgtcggcgcgttcaaggacggcatggacggtctggcacggctggggctgatcgagccgattcgccagaaggctgccgccggtacgccgctgctgggcatctgcttaggaatgcagatgttgtttgacgagtcggaggagttcggcttgcacaagggccttgggcttattccgggccgtgtggtaaagatccccgacacggacgtggacggccatccgcagaaggtgccgcacatcagctgggatccgctctaccccggcggcgggcgcacggatttttccggcacggcgctggccgcgctcaagcccggcgaggagtgctattttatccacagctacgaggccaagcccgtccgcgatgaggaccgcctggccgacaccgtctacggcgggcgcgagatctgcgccgccgccagccacggcagcgtcctcggctgccagttccacccggaaaaatccggggcggtcgggctgaaaattattgaggagtttttgaaatgaccgagcggtaggggccggacatgtccggcccggggctttgccatcaaagccggcttgccgtacagttgcgggccgggcatgcccggcccctacatagcaattatttacaacgccctgtgcgattccgcacagggcgttgctttttcccccgcaataggctataatgtaccttgtataaatgtgcaaaggggaattgctatgtcctgtgacttgctcgtcggctccaccgggtttgtggggggcaacctgctggccaaacataccttcgccgcggcatgtcacagcagtgacataaccgcgcagtacggcacccgcccggatctctgcgtctacgcgggcgtgccggcggccatgttcctggccaacgccgacccggaggccgaccttgccgtcatgcgtgccgcgcgggagaatatccgccaaatcgcgcccaaaagacttgtcctgatttccagcattgccgtgctgtcagacagccgcggcgtctatgaggacagccccgcgcgggacaccgaaggtctgcccgcctacggcaaaaaccgtctgcaactggagcgctgggtgcgcgaggacttccccgacgcgctcattgtgcgcctgcccgcactgtacggcgccggcatcaggaaaaacttcctctttgacctgcacaccatcaccccggccatgctcaggccggaaaaatacagcgagctggcggcaaaatctgtgctggtgcagtccgcctacacgctggcggacaacggcttttacaagctgaacggcaccgccgacccggcagcgctgcgcgccttttttgcagccaacgacttcaacgccctggccttcaccgatgcccgcagccgctaccagttctataatttaggccgtctctggtcggatatggaggctgcccgcgccgctgatgtaaagctgctgcacctctgcacgccgccggtctctgccgccgaggtctacaccgccgtgaccggcaaagcggactggcacaatgaactgcccaagcccccgtttgactacgacctgcgcagccgccacgcggcgcttttgggcggcagcggcgattacctttgcacaaaacagcaagaattagatgatattacgcgctttatgcgcagttggagggactgacccatgccgagctatcagcttgccatctcgaacattgcatggcagaaggacgatgacgaaaccgtatacgcggccatgcagcaggcgggcttcaccggcctggagctggccccgacccgcattttctccgaagcaccgtatgaaaacctgacgagtgcgctgctgttcggcggctacctcaaaaaccgctggggcttctcggtgcccagtctgcaaagcatctggtacggccagaaaggcaatatctttgaccctgccgacaccgagcacctgctggactacacggcgcaggcgttccagtttgcccacagcctgaactgcccgtcgctggtgttcggctgcccgaagaaccgtatgcgcccgctgggggccaacgatgccgccgccgaggcgttcttcatgcaggcgggcaacctggccgcgcggtacggcgtgcatctggcgctggaggccaacccgccgatgtacacgaactacctgaacggcaccgccgacgcctttgcgctcgtcaagcggctggacaaccccgggctgtcggtcaatctggacctgtccaccgtgctggcgcagggagagcacttgcagagcttcatcgatgatatgcagtatgtcagccatgtccacatcagtgagccgggtctggtcccgattgagcgccgccccgagcacaaggagctggcgctgctgctgggggctgtcggttaccgcggcttcgtctccgtcgagatggcccacaccgacgtggatacgatccgccgcacgatggactatatcgcggaggtgttcgcatgatcgagtatgagcgcacaaacttgaacggcgtgcccgactacacggctgtggaatttgaaggccgccgccatgactactgcctgctgatccccgtcatcaacgagggcgcgcgcatcctgaccgagctgggccgcgcccagaaggcgggcatcgaccagctctgcgacatcgtcatctgcgacggcggctccaccgacggcagcatgaagcgggagacgctggcgctctaccacgtcaacacgctgctgacgaaaaccggccccggcaggcagggcgcccagctgcgcatgggcatgtattttgcgctggaacgcaattataaaggcatcctgaccatcgacggcaacaacaaggactccatcgaggacgtgcccgagtttatcgcaaaactgcaggagggctatgacctcgtgcagggcagccggtttatccgcggcggccacgccatcaacacgccgccggtgcgctatgccgccgtgcggctcatccacgcgccgctcgtcagcctgggggcgcaccagtggttcaccgatacgaccaacgcctaccgcgcctacagccgcgagtacctgacccacccggatgtccgcccgctgcgagatgtgtttggcgggtatgagctgctggcgtatttaagcatccgcgcgacccagctgggcctgaaggcctgtgaggtccccgtgacccgcgcctaccctgccaccggtaagacgccgacgaagatcagcggcttcaagggcaacagcgacctgatgaaggtgctgctgaatgcgctggccgggaagtataatccgtaagttatattttgcaaagatgcaggggcgagcagtgctcgcccgcggcacttggcggcagccgcaaagtgcccgggtcgatgatgagcatcgacccctacaatgccggggcagattccatatccacccggcaatcgtccgaaggaatgtaaaaaggggaaacgctctatgacctacgataaaatcatcctcggcgcggggctgtacggcctgtacgcggcgcagaaatgcggcgcggcggggcagcgcgtccttgtgctggagcgcgaccccgcgcccttcatgcgcgcgacctacatcaaccaggcccgtgtccacatgggctaccactacccgcgcagctactccacagccatcaagtccgcccactattttgagcggttctgcaatgattacggcttctgcctgcacaccgagtttgaccaggtctacgccaccagtgcgcacttctcctggacgaacgcggcggaattccgccggttctgcgcggcggcaggcatccgctgtgacgacgttgcgcccgagcgctacttcaacccgggcctctgcgacggcgcgttcctgaccaccgagtacacctacgatgcgcagatactcaagcgctggtttgtggagcagctcgccgcactgcccaacgttgcggtactgtacagccacaagccgacggccatcgagaaggtcggcagcgcgtggcgcgtgcaggcggggggcatcaccgccgaagcgccctacctgctcaacgcgacctatgcgggcgtcaacgacgtacacgccatgctcggcctgccgccgttcggtattaagtacgaaaagtgcgagatcattttgtgcaccgtggacaaaagcctgaaaaacactggcatcacggtcatggacgggccgtttttcagcctgatgccctttggccggaccggcctgcacagcctgacgagcgtgaccttcaccccgcatgagacgagctatgacagcgtcgcgaccttcccgtgccagcaggaatgcggcggcgtgtgcaagccgggcagcctgtacaactgtaatgagtgcccggccaagccgcaaagcgcctggccctacatgagccagctggcccgcaagtatttaaaggaagaatacggctttgcctaccacagcagcctgttcagcatgaagcccatcttaaaggccagcgagatcgacgactcgcgcccgacggtggtccgcgtgatgaacgacgagccgaagctcgtcagcgtgctgtccggcaagatcaacacggtatacgacctggacgaggtattggatgtatgatgcttaaagacaacaattttatttcggcagtcgtttacctgcacaacgacggcgcgcgcgccgtggagttctgccgcacggtggccgcagagctggacgccaactttaaacaatatgagctggtcgtcgtggacgacgcctgcaccgacgacacggtcaaacagctgcgcgcctggggcagggagcaggacgccccgctgacgattttgcacatgagcatctaccacgggctcgaggacgccatgaacgccggcctcgatgccgccatcggcgactatgtctatgagttcgactccaccgagctctgctacgcgccgacgcttattatgcaggcatacagggcggcgctggacggcaacgatattgtgtcggtctgcccgcgcaccgtgcgcggcggcagcaacctgttttataaggtgttcaacgcccattcccagagcgcctaccgcctgcgcaccgatgcgttccgtctggtgacgcgccgcgccatcaaccgcgtccatgcgtccagcacgcacctgccctaccgcaaggcggcctacgcggccagcggcttacggatggtcgatctggaatttgacggccagctgaccgttaagcagaagggccggttcaatctggcgctggacagcctgacgctctacacgaacttcggcttcaaggccagcgtgaccgtcacgctctgcatgatggcgttggcgctggccgagctgatctataccctcgtcatcttcgccaccggccacccggtagagggttggacgacgacgatgttcgtcatcaccgtcgggtttgcggggctgttcgccgtgctgaccatcgtcgtcaagtatctgtcgctgctcttaaatctgacgttcaggcagcagaaatatcttgtggaaagcattgagaagctgcaaaaataacgcatgaggaagttaccgatgaagcattttcgcccgcggctgtcccgccgcgctttctgggtgctctgcgccctgctggtctgcctgcgtctggcgctgacgggctttcagcaggcgtacatctgggtgggcggtgcgccgctggacgacgagctgatgttccgcgcggccaaccatatcacagccgggcagtggctgggcgcgtatgattatctgacgctgtccaaggccatgttcttcccggtgtggctggcactgctgcacgcgctgcatctgccgtatcttatcagcggcgcggcgctctggtgcggggcggcgctgctggcggcgtttgccttttcgacgctgtggcgcaaaaaagaccccgcacagggccgcgtgctgacgctcggtctgtttgcggcgctggcgtttctgccgtcgagctgggcggcctacacgctgcgcgtctaccgggacaacatctttccggcgctgtgtctgtacttctttgcgggcatggcgggcatggcgctgtgcgcggtgctcacgccggaaaagccgctctggccgtggctggccgcggcgggcgcgggtctggcctgcggctatctggaccgcgaggacgctgggctgttcctgctgccgttcgccgcggcggccaccgtcattgtggccgtggtactggcgggcaagcgccgctggaaggctctggccgcgcaggtcatcccgtatgctatgctcggcgtcggcgtgctgaccttctgcaccctcaattacacacactacggcgtgtttgcgctgtccgacttttcggaaggctcctttgccgcggccatgggcgcgatgatgcgcgtggacaccgacagtaccgcgccctacctctccgtgcccgccgacacccgcgagaaaatttacgacgctgtgccggaattggagccgttggcctactggctggaggaggacgcccagctgcagaatgatttccgcgacccaaatctcgacgactaccgcgcgggcagcttctattgggccatccgccgcgccgcgcagtttgagggcatctacgccgacgctaagaccgccgatgtctactggcagaccgtggccgataagatcaacgccgcctgcgacgcgggtacactgcccagccgcaccggcaggcgcgtggcgacgagccagccgatctcggcggcttacgtcccttcgacgctggccgagacctggaacggcttttggcatgtgctgggcctgcgggactgtgcgccctatgagacgctgcggtccatcggcaccgaggacgactttgccgcctggtccggctacctgcactgcggcttcaacagcgccgccaacgcgggggaggacacgccctactacagcccgtaccaaaagacagtctttgccgtcatgcagggctggacgcgggtctgcagtattttgcttacggtgggcgtgctctgcgccgtgctgtgccagctggcagagcttttgccgcagcggcgtcaaaaatgcacggcacagaccgttgtgccgtggctgctgctgttcggcatcttcggcattgcgctgctgcgctgtgccatgatcgcctttgtcgaggtgtccagcttcggcatcggtaccagcacgatgtacctagcaacggtgcatccgctgctggtcctgtacgcatttgccgggctgcttttgtacggcagaccgagaaaaactgacaaacgaagggagaacgcatgacagatctactggtcatcggcggcggcgcggcgggcctgatggcagccggggccgcctgtgcccgcgggctgaccgtgaccgtgctggagcacaaccccaagggaccgggccaaaagctgcttatcaccggaaagggacgctgcaacgtcacaagcgacagcgatgtgcgggagtttctgccctatgtgcggcataacgggcggtttttgtattcgagcctttacgccttcccgccgtcggcggccatggagctgttcgagtcgctcggcgtgccgctcaaaaccgagcgcgggcggcgggtatttccccggagtgaccgcgccgccgacgtgctggccgcgctgcgcgattatgcacgcgatgcggaacttgtgcgcggcagcgcaaaaaagctggtcatcgaggacggcgtctgcaagggtgctgtgacggaccgcggcgagacgctgcgggctgaaaacacgctgatcgccacgggcggcatcagctatccggccaccggcagcgacggcagcggctacaggctggcgcggcaggcagggcacacgatcatgccgccgcagcccagcctgtgcagtctggtcagccccgacccggcctgccgccgcatgatgggcctggccctgcgcaacgttacattgacgctgctctgcgacggcaagccgctgtttaccgagcagggcgagacgctgttcacccacttcggcctgtccgggccgctcgtcctgtcggccagcacctacattgaggatataacgaagcaccgctatatctgtgagtttgacttaaagcccgcgttggatgaaaaaacgctctatgaccgcctgacccgcgactttgcggagcagggcagccacagtgcgcagggggcgctggcaaagctgctgcccaactcgatgcgccccgtcgccgtcgaaaagtggggcatcgaccccgccacgaaggccgcgcagatcacgcgggagcagaagcaggcgctcgttgacctgtgcaagcactggcaggtgccggtcagcgcgctgggcgataaagagcacgccgtcatcaccgccggcggcgtcgatgttcgtgaggtagaccccaagacgatggccagcaagctgtgcgcgggcctgtactttgccggggaggtcctcgacgtggacgcccgcaccggcgggtataacctgcaaatcgcctggtcaaccgccgtggcggcagccaaggcgctctaaccccagcctttccccgagggggaaggcggccccgcagggccggatgagggcagaccttacggcagctgcacgggaaggagaaaccacccggtaggggccgggcgtgcccggcctgcggctctgcggcggtaaccctctaacgggcagcccccgcaagctctcccctcatcagccgcctgcgggcggcagcttctcccccaaagggagaagccaaagacgattctatttaaagggatgataactatgatttccatcgcaatcgacggcccgtccggggccggtaaatccagtctcgccaaggctctcgccaaagacctcggctatgtctacgttgacaccggtgccatgtaccgctccatcggcctgtacgccgtccgtgcgggcgttgacccgcatgacgccgacgctgtcgccgcactgctgccgcaggtcaagctcggcatccgcctgatcgacggtgcgcagcacatttatttaaacggcgaggacgtcagcacggccatccgtgccgaggagatcggcatggccgcgtccgccgtggccgcacaccccgcggtgcgcagcttcctgctggacacccagcgcggcctggccgaaagccagaacatcctgatggatggccgcgacatcggcaccgttgtgctgcccaacgccacggtcaagatcttcctgaccgccagcgccgaggcccgcgcccagcgccgtgccaaggagctggccgagaagggccagcccgcggactttgccaccgtgctggccgacatccggcagcgcgactaccaggacagccaccgcgccgtggccccgctcaaacaggccgacgacgccattctggtggacacaagcagcatcggcctgcaggagagctttgacctgctcaagcgcacgattcttgcgcacatctaagggggctgacgatgcttttatactggattctgctgcccatcgtctgggtgctggcccacattctgttccggttcgaggtcatcgggcgcgagaatttgaaggccgtccgcgatgggcgcgcctacgtcattgcaccgaaccacattgccaaccttgaccctgtcttgatcgctataacgatatttgactggaagcggctgcgcattctggccaaggaggagctgttcaaaaatccgctggccggctggttcctgcgctgcatgggcgctgtttccatcgagcgcggcaagggcgacaccaccaccgtagaaaagctgacgaacgagtgcaaaaatggtacgggcatcatgatcttccccgaggggacccgcacaaagaccggcaagctgggcgtaatcaagagcggtgcatttgtgatcgccgccgccgcgggtgcggacatgctgcctgtgcgcatcatctacggcaccaaggacggcaggctgcaccttttctgcaagctgcgcatcgtctttggcgagccgatccccgccgcggacctgcagatcagggatcagagccacaaaatggcggagctgcgccgtatgaagaaccgcctgcgcgacgagctggagcagctgctggccgacaacgcctttgctgtgcgcctggccgaaacggcagcggaggaacccgctgcaccggacgtcaagccgcagctgccggaatgacattccccttggccccctctgggagggggctccgcccgcaggcgatgggggagagagctttgccgaggcccgaagcttcggataaagacacggctctctccctccggccctgcggggccactgctccccttctggcgcaagcgccatctcccccgtttcgggggagtctgtctcgcagagggaggcaaggagtttacaaaaggagcttatctatggagatcatccgtgccaaaaccgccggcttctgctttggtgtggaccgcgcggtcaagctgacttatgatttattggcgcagggacgcaaggttgcgaccctcggcccattgatccacaacgcccaggtcgtggccgacctggaggcgaagggcgctgtgacctgcccggatattgacgccgtgcccgacgggtatgaggtcatcatccgcagccatggcgtgcccagaagcgtctatgataaaataagcacacgcagcctggcgtatcacgatgccacctgcccgtttgttgcaaaaatccataaaatcgcgatggaagcggacaaaaacggtgcgcttttgcttgttgcaggcgacgccgaccaccccgaagtacagggaattgtcggccatacaagcggccctgtgcaggtttttgccaatctggaggagctgcaaaaattgctccccacgcttttgcaacaagaatccatctacgttgtcgcgcaaacgacatttcgcgtggaaagttgggaaaattgcaaagcttttttaaaaaaagagtgtacaaaagccagaatttttgatacaatatgtaatgcaacgtgggcgaggcaacaggaagcggaagacctcagccaaaaatgcgatcacatggtcgtcattggtggtcatcattcttccaatacccaaaagctgttacaggtcgccgcgcggcataccaaggccatcaacgtcgagactgctgatgaactcgaccctgcatggcttgctggtgcggcgcgtgtgggcgtgacagccggggcttcaacgccttcgtctataattgaggaggtacttaacagtatgagtgaagagatccgtgacgacatgagcttcgaggagatgctcaaagctaccgaagccaatgcaaatgtttacaccggaaagatcgtaaaagccaaggtcatcagcgtttccccgacggagtgcatcgtcggtgtcgacggctccaagcacaccggcattgtgcccctgcgcgagatgagccatgaccccaacgccaagatggaagaccttgttaaagagggcgacgagctggatctggttgttgtcaagaccaacgatcaggagggtgttgacaccctgtcccgcgtccgttttgaggcccagaagggcatgaaggacgtctccgaggctgccgagaacggcaccgttatggaaggcgacgtcatggaggccaacaagggcggcgttgttgtcaacgtcaagggcgtccgcgtctttgttccccgttctcaggccaccatgcgccgtgacgaggactacaccaagctggttggccagcacgttcagctggtcattaccgagtgcgcaggccgcaagatcgtcggctccatcaataaggtcactgccgaggccaacaaggccaagcgcgaggagttctgggccaatgttgaggtcggcaagcagtataagggcgttgtcaagagcctgacctcttacggcgctttcgttgacgtgggcggtgtcgatggcctgtgccacatcagcgagctgagctggaacaacatcaagcatccctccgaggtcgtcaaggtcggcgacgagatcgaggtctacgtcaagagctacgatcccgagaaccagaaggtctccctgggctacaagaaggaagaggacaacccctgggtcaagctggagaatgaggttcccgtcggcaccgagttcaccgctcccgttgtctccatcaccaagttcggcgctttcgtccgcatcatgccgggcattgacggtctcgttcatatcagcgagatcagcaatgagcgcgtgaacaaggtctccgacgtgctgaaggtcggtgacgaggtccgcgttaagctgaccgccgttgactttgaccgcaagcgcatcagcctgtccatgaaggcctgcctcgacgagaacggcgaggacgctgaataattcttagtcattgcgcaaccgtatggggcctgcctgttgtaacaggcaggcccctttttgtacaagtaacctgtagggggcggcgtcctcgacgccctgcgggcgggcagtgcccgcccctacaaacgtaaaacgggtacatcatgcaaaaactcaaagacatcatccaaaaatactatgagggtctggcctacctgtttttcggcggggtcgcaacgctgctgaacctggtcgtctttgcgggcttccaggcggcgttcggtacagactttgccgcgggcatcggcaatattctggacaactgcatctgcatcctctttgcctattggacaaatcgcacgttcgtgttcaaaagcgcgaacaagggcaaggcggcctgggcggagttcgggcagtttgtctcctgccgcatcgccacgatggtcatggatcaggtcatcatctggctgggcgtcagcctgctgggaccgcatgtcgcgtttgccgcggccaacggcaagctgtgggccatgggcgtcaagctgttcagccaggtcatcgttatcgtgtccaactacgttttcagcaaattgtttatctttaaaaagaagtaacgcatcatccggaaggagcataccatgcttatttttaaagtggcaaaatttgtgctcaagcacccgctgctgacccatggagccaggcagctcgtgcacaaaaaactacgtccccaaaaggaggcatcccctatgaaacagaaagttcgcggtcacgcattccgtctggtggggctgatcctgggcatcatcggtgccacggtcagcatcacctccatcgttttcgctgccctgggcctgcatcaggcacgcctgtgcaagcattgtgagaaaggggaaaatttccgatgaaatacacgaaggaagaaatgctgagcaaggtcgaccacaccctgctcaagcctgaggcaacctggccccagatccggaccctctgcgatgaggccatcgccaaccactgcgcgtcggtctgcatcaacacctgctacgtcaagcaggccgtcgagtatatggcgggccgcgtgccggtctgctgtgttgttggtttccccctcggcgctatggacaccaaaagcaaggcatttgaggctaaaactgccatcgagaacggcgcgtccgaggtcgatatggtcatcaacatcggctggctgaagaacaagcagtacgacgacgtccgcaatgacattgccgccgtcaaggccgctgtgggtgacaaggtgctgaaggtcatcatcgagacctgcctgttgaccgacgacgagaagatcaagatgtgcgacatcgtgcccgaggccggtgccgacttcatcaagacatctaccggcttctccaccggcggtgcgaccttccacgacattgagctgttcgcaaagcacgttgcgggtcgctgcaagatcaaggctgcgggcggcatctccaccgtcgaggacatcgagaagttcctcgatctcggcgcagaccgcctcggcacctcccgtgccgtcaagctgttgacctccggcgaggccggcagcgggtattaagggaatgcggtgttccttctttgcaaagaaggaaccgaagaaattctaaaccaataaatgcgggagactgcttttcgtcagcagtctcccgcactttgttttgtgcagcggtaggggaacggcgtccccgacgtcccgtcagttggcagttgccctccgggcagggtgtagggcggccagccctctggccgccgcaaggggcgtatggccttgtggtgtgcatctatttttaaatgggtgtgtgtggggggaaaaaacatgaccgagccaacaaactggaatttatataattattcctctaactttccccattttataggctttcccgcctgtc

SEQ ID NO: 734 - DNA, 24841 bp, unidentified
  source 1..24841: mol_type = unassigned DNA
ggcggtgtgcggcgcactgtggtgcgtctgcggcgtgctgccgctgcccgcggcggcccgcgcggcggggttctgccttgtgccggtctgggtcacgggcggcatccatctggacggctacgccgacacctgtgacgcactttcaagctacggcgataccgcgaagaagctggaaattttaaaggacccccactgcggcgcgttcgcggtcatccggctgtgcagctactttgcggcgtattttgcgctgtgcggctgtgtggcgttcaccccgcgggtcggcgtgctctggacgctggcgctggtgggggagcgggcgctgtccgggctggccgtggcggcgttcccgctggcgaaaaacaccggccttgcccacacctttgccacggcggcggaccgcgtccgcgtgcggcaggtgctggccgcgctctgcgccatgctggccgtggggctgactgcactgggcggctgggcgctggtgctggccgcaggctgcgtttttgcgcggtactacgttgtttcaaaaaaacagtttggcggtgtgaccggtgatctggccgggtggttcctgcaaaaatgcgagatctggatgctggcggcgctggccgcctgccaatggctgggggtgctgtaaatggtgtttgtgacagggccgctctgcagcggcaagcgcacctttgcgcaaaagctcggcgggcggcagatgtacgacgtgcaggatttggccgccgacgccgccgatttgaaccgactggccgacgagctggcagattatgatgttgtgaccgcggcggaggtcggcggcggcgttgtgccgattgaccccgccgcgcgtgccgcgcgggaggcggcgggccgtctggcctgtctgctggccgcgcgagcggactgcgttgtgcagatgttttgcggtctgccgacgattttgaaaggagaacttccgaaatgctgatttatttactgcgccacggcctgaccgagtacaacgcccagaagcgctatcagggtcagcgggacatcccgctttcgcccgaggggctggcccagctgcgccgggctgatattgacccgaaagttgtctatatttccacgctgcagcgtacgaggcagacggcggaggtgctgttcccggacgcggagctcgtgcccgtggacgggctgaaggagatgtgcttcggcagctttgaaggccgcaattatattgagatggagcacgaccccgactatcaggcgtgggtcgccgccaactgcgagagcagctgccccgacggtgagcgcaaggatgatttcagtgaccgcgtatgccgcacgtttgcggcgctggtggacaaggcgctggctgacggcgaggaaatgctggtgatcctggcccacggcggcacccagatggccgcgttggagcgctacggcgtgccgcgccgcagctattaccggtggtgcggccccaacgcgggcggctatgtgctggacgcccgcgactgggcggcgcggcatgagctgcgtttggtcaagaccgtgcagtacacgaaggagagcacatgctgatcttttgggcggtgctgggcggctttttgctggacgctctgtttggcgacccggcgtggctgccgcatccggtggtgcttatgggccggtgcatctcggcgctggaaaagcacctgcgcaccgcactgcccaaaacgccgcggggcgagctggccggcggggccgcggtggccgcggtgctgccgctgggcacgctggccgttaccgggcttgcctgctgggctgcggcaaagctccatccggcgctggggctggcgctgcaaatgctctggtgcggccaggcgctggctgccaagggtcttgcacaggagagccgcaatgtgtacaaggaactggcaaagggcgacctgcccgcggcccgcagggccgtggcccgcatcgtgggccgtgacacgcaaaacctgaccgccgcgggcgtgaccagagccgccgtggagaccgtggccgagaacgccagcgacggcgtcattgcgccgcttttgtatatgcttcttggcggggcaccgctggcgctgacctacaaggccatcaacacgatggacagcatgctcggctacaaaaacgaaaagtatctttatttcgggcgctgtgccgccaaattggacgatgccgccaactggctgcccagccgcctggccgcgctgctctgggtggctgcggcggcgctgacgggcaacagcgcccgcggggcgtggcgcatctggcggcgagaccgccgccgccacgccagccccaacagcgcccagaccgagagcgcctgcgccggggcactgggcgtgcagctggcaggcccggcctattactttggcgaatattacgataagccgacaattggcgacccgctgcgggagatcgagccgcgggacatcctgcgtgccaaccgcatgatgtacgccgagagcctgctggcccttgtgctggggctggccgtgcggctgatgcttgtcttgtgagggaatgtggaatggaactggtacacggcggcgactgggcgggctatcgggccgagtttggccgggacgcgctggatttttcggccaacgtcagcccgctggggctgcccgcgggcgtggcggcggccatcacagcggcactgcccatggcggatcgctacccggacccgctctgccgggcactgcgcactaagctggccgcggcagagggtgtggatactgcgcaaattttgtgcggcaacggtgcggcggatctgatctaccgcctggcactggccctgcgcccgcggcgcgcattgctgcccgcgccgacctttgccgagtacgctgctgcgctggaaacggtggattgtgacgtacagcggtttcttttacgggaggaaaaaaactttgccgtgacggacggctttgtagacgccatcgacgacagcaccgatgcagtgttcctctgccagcccaacaaccccaccgggcaggtcacgccgcgcgttatggtgcaaaagctgctgcgccgctgtgccgactgcggcgcggtgctggtcgtggatgagtgcttcctcgacttccttgccgcgcgggatgccctgacagctaagacagttttgcgcgatgcaccgaaccttataatcttaaaggcattcaccaagctctacgctatggccggggtgcggctgggctatgcgctgtgcagtgacacggcgctgctggacaaaatgcgcgcggcgggccagccgtgggccgtgtccggtctggcacaggccgcggggctggccgcactggatgagcccgcctatgccgacagcgtgcgcacactcattgccgaccagcgcccaaggctggccgcgggactgcgggcactggggctgcgggtcgtggacggacaggccaactacctgctgttccgcgcaccggcggactttggggcaaagctgcgccgtcacggtgcggtggtgcgcggctgcggcaactacccggggctggatgagacgtggtaccgcaccgctgtgcgcacccaaaaagaaaacgaacagctgttgaaaattatgcgggaggtgctggcatgagccgggcagggtgcatcatggtgcagggcacgatgagcggcgcgggcaaaagcctgctgtgcgcggcgctttgccgcatttttgcgcaggacggctacaaaaccgcgccgttcaaaagccagaacatggcgctgaacagctttgtgacccgggacggcctcgaaatgggccgcgcacaggtcgtgcaggcgcaggccgcgggcgtcgagcccgatgtgcggatgaacccgatcctgctcaagccgagcagcgatgtgggcagccaggtcatcgtgaatggtgaggtccgcggcgatatgcccgcaagggaatacttctgccgcaaaaagtcgctgattcctgatattctgcgtgcctacgacagccttgccaatgaatttgacatcatcgtcatcgagggcgcgggcagtcccgccgagatcaatctgaaggcagacgacattgtcaacatggggctggcaaagctcgtggacgcgccggttctgctggcgggcgacattgaccgcggcggcgtctttgcgcagctgtacggcacggtggcgctgctggagccggacgagcgcgcgcgtatatgcgggcttatcatcaataaattccgcggagacgtagaaattttgcgccccgggctggcaatgctggaggaaaaaacgcagctgccggtgttgggcgtcgtgccgtacctgcgggtggacatcgaggacgaggactcgcttgcgccgcggctgcaaagcaaaagcgcggtcaagccgctggacgcagctgttttgaaattgccgcatatttccaattttaccgattttatgccgctggagcagcacccgcttttgggtgtgcggtacgtgcagtccgtgcgggagctgggcgcgccggatctggtcattctgcccggcaccaaaaacacggtgaacgacctgctgtggctgcgccagtccgggctggaggctgctgtgctcaagctggcagcaggcggcacgccggtgctgggcgtctgcggcggctatcagctgctgggcgagacgctcgacgacagtcagggcaccgagagcggccatccgcagacgctgcgcgggctgggtctgctgccgacgcggacggtctttaccgccgaaaagcgccgcgcacaggtcacggccacggctgccgcgccctttaccggggctgcgctgaccggatatgaaattcacacgggccgcaccgcggtgaacggcgctccgttctgccgctatgccgacggcacaccggagggctgcgtgcaaaacgccgtgttcggcacctacctgcacggcctgtttgacagcggcgaattgacggagcagctggccgcttacctctgccgccgcaagggaatcgcgccggagaccgccgcgccgcttgcgatggccgactaccgcacacagcagctggacctgttggccgacggcgtgcgcagtgcgctggacatgggcgccgtctacgcggccatgggtctgcacaaccccagaggaggaaaaaaatgacaccgcagcatcatctgcccgccgatattgagcgcacgagcatgggcattatcacggcggagctggccgcgcgcgggcttgcgattccgcccgaaaacgccgccgtggttaagcgcgttattcacacgacagcggattttgactacgccgagaacctgcgcttcacacctggcgcggcggcggcgggcgtcgcggccatgcgtgccggggcagtggtcgtcaccgacaccaacatggcgctggcgggcatcacaaagcccggtctggccaaattgggcggacaggcactctgctttatggccgaccccgctgttgccgctgctgcgaaggcggcgggctcgacccgggctgccgccgccatgcacagggccgcgcgggagtaccccggcgcggtgctggccgttggcaacgcccccacggcgctgctgacgattgcggacgagatcgaaagtggtctgcgccccgcgctggtcatcgccgtgcccgtcggctttgtgaacgtggtggaaagcaaggaacggctgtttgcggtttgcacgcagtacggcgtgcccgccatcgccgccatgggccgcaagggcggcagcaacgtggctgccgccatctgcaacgcgctggtgtattccgccgccgagatgcttgaccctgcggcaagaggatggcagtaatacactttctacccccggtgtttccctacaaccgaaaattttggcgcggaggaggcgttttgccccctccgcttttttgtttgtaaagagcttgcactttgtaaaatagaattacggaaatatcaggtcatggcccaagagcccatcagaatggccagaaacactacattggaaatagtaaacatcgcaaaatagtgccctttttcagcaggtacttcatttgcaatctgtcgataagaaattaggcttgccatggatgcaattaatgtgccaaggccgccaaggtttgtgccaataatcagcgcacggaaattatcggtaaatccagaaagcaggatggcagcaggcacattactggtcacttgagaggccagaactgatactaaaacctcatggccggccagaatattctgcaaccatccagagaacgcttcaaaccgacctaagttcccgatgaaaatgaacagtgctacaaaggtaagaatcagagaatagtctacgcggccaagagtggggcggtcggcaaagaaggcgcacaccaagagagcggcgaatgcaacaccgtatgggagaacacgcaatacaaccaataaacaggcgacaaacagaataccgtacaacgcaatgagtttcttgttgggttctgagtttaccgcagagtgagttacaacaatgtcggaaccttcacggcatagccatactgcccatattgcaagaagcactaacgatataattgagtaggggagcattagcaaaacaaaagatcccatatccatgccgctcttgccatacaaatacaggttttgcggattgcccagtggtgtaagcatactgccaaggttggcagctatcgtctgcatacagacgatagggaggagtagtttgctgcgaacagatgcgttcaaactattcagaacgacaaacgtaaatggcacgaatgttagcagcgatacatcgtttgttatcagcatactgctgaagaagcataggccaacgagaacaactgttagctgaaaagtggtgcgggtatgagataggagggcatggccgagtctatcaaatacgccttgccctctcagtccggccatgactgtcatcagcgaaaacaggattgcaagagtacggaaatcgatatatccgaggtattctgcgtccggggggacaaagaaagcggaaatgatcgccaaacaagtggcaatgctcaggacaggttctttctgaaaaatgtgcttaatcatcataaataagattctctttccgaccattcgttatctcttccggacggcaaaaccaaaagctgtaccgcaaataccaccgacaatgtgcataaagttagctacattatcttgtataaagaggatactgtatacctgctggcttaagtacagcacgccaaccaagaggaaggtgatagggacacctccattcttactgccggccaaactggagagcatgatgagcatgaatacgataccggatgcaccaagcaatgcagaagtggggaacagcacacactgcaatatgccggataccagcgcggtcataaggataccgcttagaagtgttcggcttccgtatcgttcttccaaaggcggagcgacaacaaggaagaggagcatattgtttataaagtgattccaaccgccgtggccaaggacatgaccgaacaaccggacatagaatagcggatccgtcatcgacgagcgatacacactaaacaggtgcgaggttgtccagttgtttgttaagtagcccaataccagagaggcgagggacaaaaagaaaaaggtcagtgtgacgggggcattgtattggagtcggatgctgcgtttcatagaagttcctccatcattatcggatagtattagtatagcacattagagcgaaatatgttgcagaatagaaaataatctgggagagtaaaagagaaagtaaataaaaccatttaaaggtgatcggatatttcacagggaagatatgcagcagcggtcaaatcgcagtcagtaaggactgccccggcggggggataatttgtgtgctgccccttttataataccggacgatgagaaaaacggcaattcaattagataaatatttttacctaataatattgacattcgaagcaaacgtggtataatgacctcattgacaattacgtcaatttatttagttaaattatgtgaggtacgtaatatgagctttgaagaagtaaaagaagtatttgttgataccctgaactgcgatgctgataaggtcaccatggatgccagcctgaccgacgacctgcaggcggacagcctggatgcggtagagctgaacatggcgtttgaggacaagttcggcgttacgattgccgacgaggacctggggtcgctcaaaaccgtgggcgacatcttcaactatctggctgcgcgggcagcctaaagggtattgcagaatgagtgccattgaaaagctgttcccgaccagcccgcaggagcgcagctttcagatgaaagcccgccgcgatgccggcacggctgcgcccaactgggtgccgccgcaatttgtagagtgcaaaaaatgcggccgccgtgccacgcggcaggtttgggtcaagagccagtatgtctgccccaactgcggggtgcatttggcaatcggcgcctattatcggctcagcacggttctggaccacggaacttttaaagagctgaacccggacattgcgcccaacgatgtgctgcattttcccgattatcaggaaaagctggccgctgcttcggtcaagaccggcctgaaagaagctgccgttacagcaatcggcaggatcggcggcgtgcaggcggtggtcgctgtgctggacagccgcttttttatgggcagcatgagcaccgctgttggtgaaaaaatcacacgtgcgattgagtacgctgccgacaagcacctgccgctcattattttttctgccagtggcggcgcacggatgcaggagggcattttcagcctgatgcagatggccaaaaccagcgccgcgctggaacggttcaaccgcagcggcgggttgtacatcagcgtgctgacccaccccaccacaggcggagtcacggccagttttgccagtctgggtgatattacgctcgccgaaccgggggcactcatcggctttgccgggccgcgcgtcattgaacagaccatcggtgaaaaactgcccggcgggttccagcgcagcgagttccagctggaacacggttttgtggatcaggtcgtaccgcgcaccgagttaaaagaggtcttaacgcggatcttgcagctccacacgcaggggaggaagcgcagatgatcaaagaagttttgcagcaattggaaccgctggacgcgcagatcgacgcgctgtgcagccgtgccgatgacgccgaaatggtgagcacgaccacccatgcggctgaactggctgcgctttctgcagaggaaaacacgcttttacagcgctgcacctcgctgacgccggcggaccgcgtttttctggcccgccgccctgaccgcccgcatataaccgaaatgatcgacaacttgtttaccgacttttttgagcagtgcggtgaccgacaatgcaaagaggatgcagccattttatgcgggatcgcacggttccacgggatgcccgttaccgttttggggcaccgcaaagggactacgctggaagaaaacctgcgctgcaactttggcatgccgggaccggagggctaccgcaaggccctgcgcgtgatgaaacaggcggaaaaatttcaccgtcccatcatcacttttattgacactcccggtgcttaccccggcaaggatgcggaagaacgcggccaaggggaagccattgcccgcaacctgatggagatgagcggcctgaccgtcccggtgctggccattgtcacaggcgaggggtccagcggcggcgcgctgggtctgggcgttgccaaccacattctgatgctggaaaatgccgtgtactcagtgctcagccccgaggggtttgccagtattctgtggaaagatgcttcccgcagcggcgaggcctgcaccatgatgaagctgacggcacaggacctgtacgcagatggcattgtggaagaagtcatccccgaaccgctgggcggcgcacagcgtggacggcagctgcttttcagccggttggacactgccattgcggcgcaccttgccgctttatgcaagatgagcggcaaagcgttggcagaccagcgctacaaaaaataccgccgcatcggagaaatgaggggcgcatgaaaggcttacagctgctggctaccggtggggcattgcccggccgtgtagtgacgaacgaggacttgcgccgacaggtggacaccagcgacgaatggatcacgacccgcaccggcatctgccagcgctattactgcaccgaaaacgaggatgccgccacgctggctgtcaccgccgcccgtcaggccctgacccgcagcggtctggcggcaaacgacattgcctgctgtgttgtggcaacgctctcggccccgacggctaccccaagcattgcctgccgtgtacaggctgccttgggtctgccggaaaaccggcctgcctttgatgtgaatgcggcctgttccggctttatttatgccgccgccgcggcccacgggctcctgagcacgctgggcgggcggtatgcactggtcattggctgcgaggcactctcccgcatggtggacccgactgaccgcacgacctgtgtgttgtttggcgacggcgcgggtgcggctgtttttgagctggccgaaaatgcaccgttcgccgtaacgttaggcgcacggggcaatgaagcgatccgcgcgggcggccctgcggcctgcgataccgcgccgatcacgatggacggcagggcggttttccgctttgccgtggaggctatgccgcgctgtctgcaagctgtgctggaccgcagccaaaagacattgtctgatctggactgggtagtctgccaccaggccaacagccgcataattgaccattgtgtcaaaagtttacacgcagaaccgtcaaagttttacaaaaacataagccgccacggcaacaccagtgctgccagcatcccgattgccctgcatgaaatggcggaaagtgatctgctgcgacccggccagacgctggcctgcatcggctttggcggcgggctgacatggggcgggatgctgctgacgtatgagggtagaaaatgaagctgctcaatgaaattttaggtacaaaatatcccattatacagggcggcatggccaatatcgccacgggcgagtttgccgctgcctgttccaacgccggggcgctggggctgatcggctccggcggcatggacgcggagaccctgcgggaaaacatccgccgctgccgcgcactgaccgacaagccctttggcgtgaacatcatgctgatgcacccgcaggcagatgaatttgccaaaatcgtggtggaggagggcgtaaagattgtcaccaccggggcgggaaatccgggaaagtatatggccgcgtggaaagcagccggcatcacggtcatccccgtggtggcggcagccattttggccaaacatctggaaccgctcggcattgacgccgttattgccgaaggtaccgagagcggcggccatgtgggcgagatgaccacgatggcacttgtcccgcaggtcgtcgatgccgtccatgtgccggtcatcgctgcgggcggcattgccgatggacgagggctggctgctgcgctggcattgggggcgtgcggtgtgcaggtcggtacctgtctgctggcgagcaccgagtgccccatccatgaaaactataaagccgccctgttaaaagcccgcgacagtgataccatcgtgaccgggcgcatcggcggcacccctgtgcgtgtactgaaaaaccgcatgagccgcgagtatgtccgccaggaaaaggccggggctgataaaatggcgctggaacgctttactttaggcagtctgcgcaaggctgtgtttgacggtgacaccgagaatggcagcctgatggccggacaggccgcagggctgctgcacgaagtccgcccggtggaagaaatttttgccgcgatggtaagcgaagccaaagactgcatcgccggggtgtacaaggagatcaccttatgaaactagcatttttatacgccgggcagggaagccagcacgccggtatgggccgggatctttacgagactttcccggctttccgcgctgtttttgacgaagccgacgcggcggtggattttgatttgaaagaagtctgctttaccgacgcagccggtgtattgagcgagacccaatacacccagccctgcatgacggcgtttgccgccggccttactgccgtactgcgggaggcaggcgtcacaccggattatgcggcagggctgtcgctgggggagtattccgccctggcctgtgcgggggtgttcgatgtgcagaccgcagtcgctttaaccgctttccgcggtaaggcaatggctgcggctgcggcggggcgcacctgcgggatgacagccgttttggggctggacgaagcccccttgcaggcatgctgcaatgcagccgccgacgaaggcgttgtgcagatctgcaactacaactgccccggccagctggtcattggcggcgacaaggccgctgtcgataaagctgccgagttggcgcttgctgccggggcacggcgctgcctgccgctgaatgtcagcggcccgttccatacctcattgatgcacccggcaggggatgcactgcgggaaaaatgtaaggctgtccgctttgcgccgatgcagttccctgtgctgttcaactgcctgggacacgagatggaggaaaccgacaccattgccgcactgctggaaaaacaggtgcagtccggcgtgcgttgggaggtgaccgtccgccgtctggcagaattgggcgtggacgccgccattgagatcggtcccggcagggcgttgaccgggtttgtcaaaaagactgtgggcagtgctatctcgtgctatccggtggaaactgccgcgcagctgcaacagctgctgcgcaccatgaaaggagcctgaccatgccgcaaaccgaaaacttgcgccgtgccgctctggttacgggcggggccaaaggcattggccgtgccatttgccgggctttggccgaaaacggcatgaacattgccgtcaactatgccggcagcgctgccgctgccgaggaaacagccgcagcctgccgcgcccttggcgtgcaggctgtcacgctgcaggcggacgtgcgcagccccgaagcatgtcagaaactggtagaagataccgttgccgcttttgggcggatcgatgtgctggtcaacaacgcgggcattaccgccgacaaattgcttccgcggatgaccgaggctgattttgacaatgtgcttgccaccaacctgaagggggcgtttttttgcaccaaagcagcctgccgctttatgatgcaccagcggtatgggcgcatcatcagcgtcagcagcgttgtcggtctgcacggcaacgcgggtcaggccaactacgcagccagcaaggcggggctgatcggcctgacgaaaagcgctgctaaagagtatgctgcccgcaatatcaccgccaacgttgtggctcccggttttattgcaacagatatgaccgccgtgctgtcagaaccggcccgtgccgcagcggaagcggccatcccggcaggcaaaatcggccatgccgaggatgttgcggcggcggtggcttttctggcaggggagcaggccgggtatattaccgggcaggtcctttgcgttgacggcggaatgggaatgtgaggtgtgcaatggacacaaaaaagaaacgccgggtcgttattaccggccttggcacggtaaatcctaccggcaatacggtggcagaaagctgggcgaacattaaggctggccgctgcgcagtaggaccgatcacggcttttgatacggctgattttaaagtaaagctggccgcagaggtcaaggactttgaccccgccgcgcgcatcgacaagcgcgaagcccgcaaaatggcacgctttacccagtttgccgtggccgccgccgacgaagccgtccgcgacagcggccttgcgcttgaagaaatcgaccatacgcggtttggcgtgatcctttccagcggcatcggcggcctgcccaccatcgaggaagaacacacccgcggtcagcagcgcggctttgaaaaggtcagcccctattttgtccccatgtccattggcaatatggcggcggggcagatcgccatccgttttggcttgcagggcatgtgcagctgccccaccaccgcctgtgcaggcggcaccaatgcgatcggtgatgcgttccaccgtatccgcgatggatacgaggaccgcatgctctgcggcggcagcgaaagctgcatcagcccgctgggcgtgggcggctttgccagcatgaaagccctttgcacggcggacgacccggcccgggcctcgatcccttttgatgcccgccgcagcggctttgtgatgggcgagggcagtggcgtactgctgctggaagaactcgaggccgccaaagcgcgcggtgccaaaatttatgccgaggtcgtgggctatggcgctaactgcgacgcctaccactttaccgccccggcaccgggcggcgcaggcggtgcggcctgtatgcggctggcgctggccgacggcggggtaatgcctgaacagatcggctacatcaacgcccacgggacgtccacccacctgaatgacagctgcgagacagcggccatcaaaacggtgttcggcggccatgcgtacaagctggccgtgtcttctaccaagtcgatgaccggccatctgctgggcggtgcaggcggggtagagggcgtatttaccgcgctggctctgcacgatgcctttttgcccgccaccgtcaatctgcaggagccggacccggagctggatctggactatatccccaaccagggccgcgcggcgcaggtggagtatgccatgagcgatagtctgggctttggcggccataacgcctgcgtggtattcaaacgctgggagggatgaggatgaactatacgccaaatgagccgccccgagccatgagcgcggcagagatcgaagagatcctgccgcaccgttacccgtttgctttggtggataagatcctggactacacccccggccaatgggcgcggggcgtcaaatgcgtgacccgcacggagccgttttttgaggggcactttccgggacaccccgttatgcccggtgtgctgattctggaagcgctggcccagaccggggcggtagccgcgttaagcctgccggaaaaccgcgaaaagctcgccctgttcggcggcgtaaaaaacgcccgtttccgtcgacaggtcatacccggcgatgtgctgatattggaatgtgagctgatagaacatcatggcccggtaggcatcggcaaggccaccgcatgggtggacggcgtgcgcgcggccaacgccgagctgacgtttgttctcacggatgcctgagggctggttttacatggcggaatgtgctataataaatccactaacctacagggggattctcgctatgctggaccagacattcggacgggtatataccaaattcaaactgcacttctataagcagatcttcagtcgattcgaggatcgcgaagccacgctgacgacggtagaatctttctgcatggaagtcatcatggcattgggcgaacctacgattgcgcagttcagccacatgatgaatctttctacccccaacgccgcgtataagatcaactcactggtcaaaaaaggctatgtagagcgcatccagtccaccatcgacaagcgggaataccgcctgcgcccgacccaaaagtacattgagtactataacatcagttattcctacttgcaccttgtcatggagcgcgctaaacagcgcttcagtcccgatgacctggccaaattggagaaaatgctgcaagtcgtctccgatgagctgatgccggagattcaactgcctgaataagtataccgattctaaaatcgtctgcgatgacgacctaaggcaataccaccggggagccttcctgttcttgggaaggctccccggcggatttttgtttatatcgcggcgattttggtttacaaggcaacagacaccgcagccgataccgaacagcaggaggaacggcacaccgcaatgtgtggttttctttatggcgttctgcggctctgccttagttgggcgcggtactcggcgggagtgatgccgtacagtgcgcggaaactctttaaaaagctgctgtaatttgcaaaaccgctggcggtgcaggcgtccaatacgccggtgccgtcggcgagctcgttgcggcagtgctgcatacgcaggttggtcagatacccgtgtatactttccagcgtgtactctttgaacacgcgggacaggtgctcccggctggtgtaggtgtactttgccagctgggccacggtcagatgcgggtcggtgtagttggcctgaaggtaagcaaccgccttggcgacgagcagactggtggccgagggcggcggggcattgtgccgccgggtcacaacttggctgatcagcaaaatcagctccgtgacctcgcagcattgcacggtatcgcgtattttttcatcgagatacacggtctgggccatccgctccagcagaccgcggaagtcccactgcgtgacggtgtcagtgtccagaatgacaggatcccccgaccagacatgccgcggcaggccgctttgcgcccaggcacgctcccagatgccgggagctatctgcacgacgagccgctccgaggtcgtgtccgtgatgttgaacttgccggagtggtacatctcgcccggaaacagtatcagctcccccaggtgcaaatcgtagacactgccgtcgacggagtagcgcacgctgctgcccgccaccggcagtatcatctcataatacgggtgggagtggaccaccgactggacattctcccggtttgtatacaggcccacgacaacctgaccgtcctgcagggcggcactggcatcctcctgcgtcagaatggaatccacgtaatgcggcattttttgcaggatcatgagcgacgcctcctgttaaattttgtctttaccacgattatatcacattttgcgacatttgcattacaaatacggcagaaattttgtgaaggatttgttattataaaggcgaagaagggcacaatgtgcagattgaacaaaatatattatgcaattttgtacaatatgcacattgtctgccaaataacaagttccaccattcaattatacgcaaaatagaaaggagaaaatctatgaaagtgtgctacaccggcggcgctgtcaaggactgcggaagctattattccgtagccaccaacgctgtagagctgcgcatctggttcctgaccgacgatatactgcgcatccgcgcgggctttgacggcgactgggatgaagcctcctacagcctgaccatgaccgcatgggagtcccgcaccgacgagctgatgaaggactgccgcaagcgcgtccaatccgccgctgcagccctgaccgacggcgacagacaggccgttatccagggtgcgcgtctcaaggtcgtcatcgagaaggcaccgttccgcatcatggtctatgataaggacggcagcctgctgcacgccgatattcccgacctggcctaccgcgaggacagcaaccaccgccgcatccacgccagccagatcgaggccgacgactgcttctacggcttcggcgagaaatccggcgagatcaacaaggccgagaaatacatgaatatggctcccggcgacgccatgggctacaacgccaaggagaccgactccctctacaagcacattccgttctatatccgcctgaaccgcggcacgaagcaggctgtcggctacttctaccacaataccgccgagtgcgatttcaacatgggccgcgagaagcgcaactactggcaccgctactcgtcctaccgcaccgacgcgggcgacattgacctgtttttgatcgcaggcccgtccatccgcgagatcatcgagcactacaccgacctgaccggcaagagcgtcatgctgccgaaggccgcgctgggctacctcggcagctcgatgtactaccccgagctgcccgagaacagcgacgatgccgtgctggacttcatcgacacgacccgcgaggaaggcatccctgccgacggcttccagctgtccagcggctactgcgccgttgagaccgccgagggcatcaagcgctgcaccttcacatggaaccacaagcgcttcaaggacccggcagactggttcgcccagatggaaaagcgcggcatcgttgtctcgcccaacatcaagcccggtatgctgctcgtccatccgctgctgaacgagatgaaggagaagggcatgttcctgcccgcctccgacgacaatgcaggtcttgacggtctggctgtcggtacctggtggggcggccccggcctgtttgtggactacacgaaggaatccacccgtctgcactggaagcagtacatcaaggatgcgctgctgaaatacggctgccgctccatctggaacgacaactgcgagtatgactccctcgttgacaaggatgcaaaggtttactttgagggcaagggcagcacgattggcacgatgaagccggtcatgagcaacctgatgtgccagctgtccaacgaggccatcgaggagtatgaccccgactgccgcccgttctcggtctgccgttccggtcatgcgggcatccagcgctatgcgcaggtctgggccggtgacaacctgacccactgggataccctgaaatacaacatcgccacgattctgggcatggcgctctgcggcgtgtccaaccacggctgcgacatcggcggcttcttcggccccgcgccggagggcgagctgttcgtgcgctgggtgcagaacggcatcttccagccgcgcttctccatccactccacgaacaccgacaacaccgtcaccgagccgtggatgtacagcgacaaaaagcagtacatcaaggacgctattgacttccgctataagctcagcccgacgctgtattccctgatggagcgcgcgcatgagaacggcctgcccatctggcagccgacgttcagcgttttccagaacgacccggccacctacgatgagggtgtggacttcatgttcggtgattctctgctggttgcgaacgtcgttgaaaagggccagaccgtccgcccggtctacctgcccgtgaccgagaacgaaaacgagcggttctacgacttctacacccgcgaggaatacgcccccggccagacgattgaggtgccggttgatattgccagcatcccgctgtttgtgcgcagcggtgccattctcccgatgagcggcaacaagctgcacaatctgatgaccgaaaagaccaccgcgctggacatcctgatggcccccgatgtggattccgagttcacgctgtacgaggatgacggccacacgaacgattaccgcaagggcgcgtatctcaagacgaagatcgccgtcaaggcaggcgtcaagaccgtcgtgaccttcacgaatgagggcagctacgagaccgccgtcgagagcatgtacctcgatatgatccaccgcgagaagtccccgttctatgtgcaggtggacggcaaagagctgccgcacttcctgcaccgccgcaagtttgaggaggccgagagcggctggtactacagccagcgcctcaagagcgtccagatcaagtaccccaaccccaagaaggatcacgaggtacttgtctcgttcgaacagtttgatttgatcgggatgtaacccggcttcttgcctccccctagcaggggaggtgccccgtaggggcggaggggttgaaccttgccgcagcccgaaatatttcgggtaatggcacggttctctcccccagccgctgcggcggcagccccctctcagagggggccaaggggaaaacggcatacatacaagaaggagaaatactatgttcaaaaaattcgcagcattggctgctgcggctgcgctcagtctgggtgttatgaccggctgcggcgcgtccggcaccaccgccgactccaccggctacagcgctgagaatccgctggtgctgactctggcccacggcctgtccgagacccacactgtccacatcgccatgacccagttcgcggacgaggtcgctgaaaagaccgatggccgcatccaggtcaagatcttccccaacggccagctcggcagcgagaacgagaaccttgagcagctgcaggccggcgttatcgccatgaccaaggtttctgcacccggtctggctacctacaacgatgccttcaacaccttcggcctgccctatatcttcaacgataccgatgacttctaccatgtcatggactcgcaggagatgcaggacttcttcctctccaccggtgacgacggctttgtcacgctgacctattacacctccggcgcacgctccttctacacgaaggatcgcgccatccgcacgcccgccgacctgaagggcctgaagattcgcgtgcaggatatgaagagccagaccgatatgatgacctacctcggcggtatccctgttgccatgtcctacggcgacgtttacacctcgctgcagaccggcatcattgacggcaccgagaacaacgagaccgccctgaccaccggtaagcacggcgaggtctgcaaggtctactcggtggaccagcacgccatgatccccgacgtcctcatcatgagtgagaaggtctgggagaccatcagccccgaggaccagaaaatcattctggaggccgcccacgattccaccgatgcccacaaggtcatgtgggacaccgctgtggaggaggccgtcaaggaagcacaggagacgatgggcgttgagttcgtctatgacgtcgacaaggaagccttccgcgaggcaacccagcccatgatcgaagcctacgaggagcagtatcccggcgtcaagacgctgctggataccatcgaagccgcaagaggggaggagtaagccatgaaaaacacctttgctgccatcaaattctggatggacaaaattttgagcattgcctgcgccgtactgcttaccttcatgacggtgctggttctgattcaggttttctcccgctatatcctcaacagccccgtcgctttcaccgaggagcttgtccgctacagcttgatctggaccggcttcatcggcgcggcctacgctttctccacccgggagcacatgtccctgaccctcatccgcgacaaattcaccggcaaggcgcacaccgccctgctggtggtcatcgatggtctgatcctgctgatggccatcttcgtattcactatcggcggctttaagctggctgtctctgccagccgcgagttctcggccctgctgggtattccccgcagcctggtttactccatcgccccgatttccggcgtgttcatcgtcctggcgcagatcatcaacatctatgaggacgtcaccggcgaaaaagttgaatccaaggagggtgcagacaaatgagtatcaccatgactaccgttatcctgttcgccgtgttcggcgtgctgctgttcctcggcgtgcctatctccatcagcattgtggcgtcgtctatcgtgaccgccatgtccaccctgtcctgggaccagatcacctttatcacgatgcagaagatgaactccggcgtggagagcttctcgctgcttgctgtgcccctgttcatcctggccggcaacatcatgaacaacggcggtattgccaagcgcctggtcaactttgcccagctgttcgtcggcaagatccccggctccatggcgcaggccaacatcctgggcaatatgctgttcggcgcgctgtccggctcctccgttgctgccgcatccgccatgggcggctgcatcagccccattgaggaagaaaacggctacgaccccgcctactccgccgccgccaacattgcctccgcccccaccggcctgctgattcctccgacgtctgccttcattgtctactccaccgtcgcgggcggtgtctccatctccacgctgttcatggccggttacattcccggcatcctgatgggcctgtgctgcatggtcgttgcgtttatcggcgcaaaaaaggctggcatgaaagccaccggcattgaccacagccagagcattgccaagaccgtctgggacgccgtgccgtctctgctgctgatcgtcattgtcatcggcggcatcgtctccggtatcttcaccgccactgagggcgcaggtgtcgcggttctctactgcctgattctttccatcgtctataagagcatcgacttcaaaggcttccttggcatcctgctcaactccgccaaaacgtccggcatcatcctgttcctgatttctgcctcctccgctatgtcctttgttatggcctactccggtatcccggcagccatctccaacggcctgatgagcctgactgaaaacaagtacatcatcttcctgctcatgaacatcatcctgctggtcatcggcatgttcatggacatcaccccggccatcctgattttcaccccgatcttcctgcccatcgctaccagctttggcatgacggagatccagttcggcgttatgctgatcttcaatatgtgcctgggcaacatcaccccgccggtcggctcggttctgttcgtcggctgcggtatcggtcatgtctccatcgagcaggttacgtccaagctgatcccctactttgtggcactggttgccgccctgctggccgtcacctacatcccggctctgtctctgggcctgcccagcctgatgggcctgatttaaatattggctgattaaaatagtacagcccccgccaagctctatgagtttctggcgggggctgtgctgttattttgccgatgtatcgtaatcgctccataatcacccgtctgtaaaatgactccattaagtgcgataatagattctaagaagtctaagaagtccgagaagtccgagaagatccgcaagccttggaagtctcaaataattagggagaggtgatacacttttaaccttatggaacatagaagaaacctccttactccagtggcggaattttcttaaactcttgcgtttcccagatttcctgcaaagtatccttatgcaacgcaatccattctcggaccataactagtgctttcggtggaagatagacttccaaaacttcaccggtcatatagtctatagctgcaacgtcatcattgtaaattgcatgaatatgtggtggattgtgttcactttacagaaaatacatacgaatgataattccatagaatcttgataacacgggcatatcgatcatcgccttactgtcatcgtatcacgataccgtgaaaaaatcaacgatgtaaatcctgtttgccaaactatcgacctatttcctccaacaactcgagcgctacatccctgctgcaaatacgcatcaggccgtcatcttctttatcgcgtgatagtaggttggtactgccgtaccacacaatctcctgatcaataactgcaaaatgggtgtgcaggtcgggttgtggcacaacgtaaatccccgccgccgtcagcgcagtttgcagcgctttggttggctctacgcgagtctgggggtaactctcggcaggttgcgttatgacagtcgcaatcaccccggcagtctgctgctcctctaccagcgcaatcaatcgccggactttgtttttgttcaatccgggacttgcaatatagatgctcttgcgtgcctgcatcaagtctttttcataaacaggcagatagctttcgctgtcaaaaattgtgttgacagtctgcttttcctcgttaggagcagcaagaatttcatatcctatacgcctataggtgcgcaatcgcttataatacatggactccagcacacgaatgtgcgcatctacatagtcatagatgataacgtctcgcttaccctcgtaatcgcggtgtaaacgacccgcatattgctccacgttgccttgccacgaaatgggcatcgtcaacatcatcgtgtccagccgtggaaagttgaatccctcgccaatgtactgcccgatggccaccagcacaacactttcgtttggaggaactgcccgcatttcggcgcgcagatcttctttttgtctggcgctgctgccgccctgcaaaagaaaaatatggtcggctttaggcttcagttgcgcgtacaaaaacgccgcgtgctctttctctttggtcagcaccaagggggtacgcccggcttgcaagcaggaaaccacatcggtcagaatcagctcattgcgtaccgtgctatccaccacgacacggcgggcttgattgtagctgagtttgtttgcgtttggcgcgaacaagcgcgtaaaacgcgggtagacaaaatgctgcacattctgcgccgccgcgcggtctttggcggtgtagcggtagcggatgggaccgagctgcataaagattttttgctcctgcccgtcgtcacgcttgggggtagcggtcaaaccgtagacgtattttgcgctgacggcgttcagcacatcttcagcaatagcagccccggcgtggtggcactcgtccatgatgaccatgccgtaattcttgataagcgagttcacgtcgtcgccctgcccaagagacgtgatcatggcaacatccaatatcccgcccagcgtattgcgtccgccggacagcgtgccgatgacgcttttacgctttttgcgccgcccttttggggtgatgtactctggcagatcttcgtcgatttgcaggaacttttcaaaatcttccacccagtttttcataatctcggagttgtgaaccaaaaccaacgtgttgaccttgcgctgtgctatcagatacgcaccgacagcggtcttaccaaaggcagttgcggcgcagagcacgccggtatcatgttccaatattttcgcggcggcgtctgcctgctgcgggtac

SEQ ID NO: 735 - DNA, 13381 bp, unidentified
  source 1..13381: mol_type = unassigned DNA
atcagttgctacaccatgatcccttgggctttatctttcgattattacgacgaggcgacaaatcgtgtacaattcctcaacacgaaaccgggtgacgccgcttacgcagactattggggtactttcctaaaagatttctcccgccaccttcgcgagaaaggttggttcgagaaaaccgccatctctatggacgagcgtccgatggaggcgatgcgtgaagcgatcaaggttatcaagcaagccgatccggagttcaagatcacgctggccggaaattatcatccggaaattcaatcggacttatactatttaagtattccctatgggcataaattcccagaagacgtaaaggctgcccgtgataaagcgggacagatcagtaccgtttatacctgttgcgcggaagcgttcccgaataccttcaccttctccgacccggcggaagcggcatggacggtcttgcacgccgtagctggtggttacgacggttatctacgttgggcagttaatagctggaccgccgatcctctgcgtgattcgcgtttccgcacttgggcggcaggcgatacatacagtatttatcccggtccacgcagtagcattcgcttcgaacgtttggtcgagggtatacaagattgcgagaagatccgcatcctccgggaagagctgacaacgaaaggagctaaaggcaaactcgagaagttgaacaagacggttgccaagatcactccggaaggtttatccgagacacaagaatccgctacgcagatggttaatgagattcataaacttctgaatacattataaatagtaccggacgccgactgcgcagtcggcgtcccctaaatatatcatcaaacccctacaatgtttgatattcatcaaaaaacgaaatccttacctccgatacctttctttttctttgtccgcctcgattccttcgcctatttttggggcactgaaaaacacaaaaaccattctatatgaacaaactattaatgggcgcatgccttacgatggccatgcaagtagggcactcccaaaccttgccgcaattgggtaaagatcctatcgagaaaatcgtagccgccatgactgccgaagagaaagtatccctgttagtcggaaccggaatgcccgggttcggcggccaatcagccgtagtcggcagcacgcaaaatatagtgccgggagccgccggaacgaccttcccgatcgaacgtctgggaatccccgctatcgtagtggccgacggtcccgccggattacgtatctccccgactcgcgaggggaacgaggcgacctattattgcacggcattcccggtcgctaccttgctagcctccacatggaacaccgcattggtcaaaaacgtaggcaacgccatgggcgacgaggtgaaagaatacggttgcgacgtactcttggcccccgcgctgaatatccaccgaagccctctctgcggacgtaacttcgagtattattccgaagatccctacttgacgggccggatagcgacagcgatggtaaacggtatccaaagcaatggcgtgggaacctccatcaagcatttcgccgtcaataatcaagagaccaaccggacgggaacggatgcccgcctcacccctcgtgccttgcgggagatttacctaagaggtttcgagatggtcgtaaaagaggcaagcccgtggacggtcatgtcttcctacaataagataaatggtgaatatgcctccgaaagccgtgatttattaacgaccatcctccgtgacgaatggggttttagcggccttgtcatgaccgactggtttggcggcaagaacgcccccgcccagatccacgccggaaacgatctgctgatgcccggacggccggaccagaaagaggccctcctaaaagcgcttgaggacggttctctctctatcgaaaacgtggatacggacgtaacccgtgtattacgactgatccttcaatccccccgctttgcccaatacgcctattccgacaaaccggacctaaaagctcacgccgaggtaacccgtgcgtccgcttccgaaggtatggttttattaaagaatacgaataatgccttgccgctggccccgggtatcaagaagatagcggcttacggtaccacctcgtacgattttatcgccggaggcaccggcagtggcgacgtgaacgaggcttataccgtatccctcgtggaaggtctggagaacgccggttataccatggacgccgaagtgaaagccttatacgagaaatacagtaccgaggaaaaggcgaaacagccgaaagacacgagtcccgccgccgctttcttcaaccaccctcgtatcccggagttcgtaccggatgccgcagggctggccgctaaggcgaaagaggcggatatcgccttcgttacgataggccgtagctcgggagagttccaagaccggaagatcgagggagatttcaacctgacggagaatgagcgagcgttgatccaatcggtttccgacgctttccataaggaagggaagaaggtggtcgtaatcttgaatatcggaggcgtgatcgagaccgccagctggaaatcggaaccggacgccatcctattggcttggcaagccgggcaggaagggggtaacacggtagccgatatcctgtccggaaaggtgaatccttccggtaagctcccgatgactttccccgtgaggatcgccgacgtagcctccacgaagaatttcccggacgcttcgggtatcgacctgaaagaaatgttagccggtttcatgggaggaggcccggagcatacggatcgtaagaatattgactataccaactacgaggagggtatctacgtgggctaccgttacttcgatacgttcggcgtgcccgtctcctatccgtttggctacggacagtcgtatacgactttcaattattcgagcttgaaagtgttcatgggtgatacggactacagcatcagttgcacgatcacgaacaatggcccggtagccgggaaggaagtggtccagctatatatctccgcccccggcaagagcatggataagccggcgaaagagttgagaggtttcgtcaagacccaactcctccagccgggggagagccgtgagatcatcttcaaggtgaaagatacggatctggcctccttcgacgagagcgccagtcattgggtcgtagagtccggtaaatatgaggcgcagatcggttcctccgccgccgacatccgcctaagggattccttcaacgtgaaggggcgggtaacggagaaggttcatgcggtactgttgcccggcgagaggatcgatcttctgaaaagataggcccggaggtatctacctagttatcgggagggcggggtatcaacctcgccctctacttattaatcacccggctgttccggctctaagaaagtaaggtaggtctccacacgcccctccagcttcgcctccatggtcccttgctccgacacgaagagatatttgtcctttttctcttcctcggtccatgtatcgggagtgtagggagcgatcttccggtcgccggcagtcctcatgaaatagatagcgggcagaaggccgttcagttggatctggttcgggtcgatatagcgttcctcgtattgtcgcgagaaacgcgagctcaccctctccagccggaagcggtcgagattattcataaacaggtaatccgtgccttcatctcccggcagggaggtgtagatcatagatgagactttcacggcaccggccggtgtcgtgtacaaataatagaaatatacagtccatgtattcttggagcgggtttgaagggtatgtgtctcctgcaaggaatgcaaggcccaaaatcccgggggcgtgcatctcaccctttgtacgaatttatccttcgcgatttccactcttccccggatctccagaaagtccttataggccactgcctctatttcctcgtttgtcattgatggcgtaaacatgattatttttaatttttaaggtaaagagacataaaggtacgattataaatggggattccaagggtttcaaggaaatgtggatgaaagaaagacaaaaaagagaggcgaactcgtacccttatcttttttattccatatattcgtgatgaaaattccctaagacccatttaaaagagagatagcgtgactcccgattttctttggacgcttatcatgaaccatatcccggtgctgaagggtgcatgatagggatattggaaaaataaaatatatggaactataaaaccttctccatttcatacgataagattcaatggagaaggttttcggactatatagggcattcaaggaaagacttcgcctgtttctatatcaacggaaaacctcacctgtttcttattgccttcataataaagtatatcacatttatattcccaaagatttccgcttttattttctatagaaaccgtcaattgtgcattcctttgcatattttccttcaaaatccgaataggagaaatccacttagactccgatctgcttaaatcaaaacgagataaatcccaatcgcggctaagaaaaattgcttcctcataggagatcgattcataatttaccgaagccaatttttcatataagcgtgaactataaaattcctttatatcctttcctgtcgaagaaactaccaaacaagagtccgtatacgtattataaaatagaattgactcatcataccacttataaaaacgaatatctgagtatggatcagagtccgtctcctcatatctatttatgccattttgatcgttcaatatcaacacatctttttttatctcttgatttcttgatagaaaagctaaattggctacatagccccaacgcatagtcaatatatcctccaaacgaacaaggtcaacctcatacgtcttatattctccatagccttcatggatcgtaaggttcaagtcgatcgaagtatcaccactccaagaatcagttatcccactctcctcatcacatacatatattttcagttttttatctttcaatccagcaaagaaataagagtttttatcttttacgaccgtagcctgcgatgcctttactcccccattgaagtacaaatagccatattgctttcctcccggattatcatagaatgtaaataaaagtttatctccataagtttcccatctaaaatcaaaaacactagctttatcaaagtcatctttaaaatgatggatcaattcaatagaaccatctattaaatagagcaaaaaacttgttatgcctgatgtttgagatacttccctcgtattataaacatgaacaaagaaaatatatcctgtattcaccttgacaatatgacaaatcttaagtcctttggtttcctttggcaattcaaaagaagaattccattccccgattaaccccgtgaaatcattgccaaacagccccatccacagcttctcgtttttaacataagctagccatgtcccctctttacagaaagactccttatcaaatcccgccgtatcctttaagaaagggagaatcttctcaaactggtaatcccacggagttcctgcggaaggtaataatggctcctcattttctactatatcctcttgctctccacaagaaacacaaaacacaaaaaagaaaaacacccacaaatatttcaccattataataaaaaattatcccctcccgtgcctcctccggtcgtcggttaacaaataaaagaagcgtggagaccattgtctatcactgtactgaggctctggactgcccttacccaataataagacaatgatcccacgccttatgcaggtatataatctatccatgaatgggtaggtatataacagataaagcgcaggagccattttcctattatcttgggtaatgaaattgtccagattccagtacaagataatatcgaaacgcttctacgttatttttccaatacatcgcaaagatcgtgtttttttaaaacattcgcaaaacaatcagattcttaatgtctcttagccctaagaaatgccctcgaagggtgaaaaatgacttcttagggctaaaagatagtttttcaaccgtgaaaagtgatttccttggcctaggaagggactttcaaggccgcgaaaccatttcttaggcctaaaaagcctattttcacccttgaaaagccatttcttaggcctaagatgattattcgcgccattcaatccccattttttagacctaagaagcccttattcagcaaatatccctaacttagagaagtttttaaactctaaatcaaatttaccatgagtacttacacaaaaatcaagacacttccgctctctcttttcaacaacgccgagtacctctccttcctgaaccacgtcctcgacctagccaacggaaacagcggtggcggcgattccgagtcccccgacgagatctccctgctgaccggcagcgacggcatccccgagctgggcctcaccaaagaattcctcgataccgacgaggcagacctcctcgccatggccgacgtggtggacgagagccgcacctcgcaggagaccgagcaaatggccttgcacgataccaaccgcgacaacctcgccatctatatcatcacccgcatctcacgggccggtaccctcccgctggaggccgagcgtgacgcgggcaagtacctatacaaggtcatcaagccctataacggcatcgcccgccttcccatggcgcaggagaccgccaagataaagggcctcttgctggatttgcgcaaggacgagaacaagccgtacgtcaccacgctcggcctcgacgcttacctcgccgaactggagaaagagaataacgcctacgaccgcctgtcgcagcaacgcgtccaaaaccggaccacctccaaaaaggaaagcggcgccaacctgcgcaagcggatcgacgtctattacgacgacctcaccctgctggcccagtcccatagcgtagcgaagccgtccgagaaagcgaccgccttcatcgccgccctcaaccagctgatcgccgagaccaccgccgcctacaaccagcgcatggcctccgccaagaaaccggcgcccgctcccgagcctatgcccggcggagactccgagagcccggacgagatctaaccgtcacgtccctccctcccgacgcggaagcgggaaataaaaagagaaggaaaacaattccccttctctttttattccgtatattcgcgaaggaaattcctaaaacagaacgatatggagacaacgacatccttaaagacattcgaggtaaccatccccgagaaatacgccgacatcttgaagaaattcatcacctcgctggaaggcaaggtaaaggcacagaagaaatccggattggacgaggccttggaggacgtgaaggcaggaaggatttatcatgcggaaagcacaaaggatttgatgaaacaaatcctaggctgatgaaatattccatcaactataccaaaaagttcaagaagaacttgaggctatgccaaaaaagaggatatgatatgaacttattcgagcaagtatccaacttgcttgaaacaaccggttcccttccctcccaataccacccgcataagctatccgggaaatacgcaagattgtgggaatgtcatatccaaggagactggctgctgatatggagccaagacgacacggagctaatcttgcttttcaccgataccggaacgcattccgacctattctaaatagaaaaagccgcctccccattacaggaagcggcttttttgtatctagtatttacttttcccggataaatatattaatcggcgtaccggtaaaatcccagttctcgcggatcttgttctcaaggaaacgtttgtacgggtccttgatccattgcggcaagttacagaagaacacgaaagaaggcacgctgcccgccggaagctgggtgatatatttgatcttgatatatttacccttccaggctgggggaggataattctcgatgatcgggagcatcacctcgttcagcttggccgtagggacacgcttggagcgattctcgtaaacctccttggcggtctccagcaccttcaggatacgttgtttcgtcatggccgagataaacaagatcgggaagtcggtaaacggagccagacgctcgcggatagcggtcgtgtacgagtcgatcaccttctggctcttatcctcgaccaagtcccacttattcacgcaaaccaccaatcccttcttattcttctgcaccagcgagaagatattcatatcctggctctcgatgcccctcgtagcgtccaacatcagcacgcagacatccgagttctcgatcgcgcggatcgaacggatcaccgagtaatactccaagtcctcgttcaccttccccttcttacggatacccgccgtatccaccaaatagaagttcaagccgaatttattatatttcgtgtagatggaatcacgggtcgtgcccgcgatatcggtaacgatatgccgatcctcgccaataaaagcattgataagagaagactttcctgcgttcgggcgtcctataatcgcgatacggggcaactcctcctccagtatctccaccttctcctcgggcaacgtcgccacgatcttatccagcaaatccccggtataagaaccattgatggccgagatgcagaaaggatctcccaagccaaacgagtaaaactccgccgaggccggatgcaattcgtaattatccgccttgttcgccaccacgatcaccggccgcttgcaacggcgcaagatctgcgccacctccatgtccagatccgtgatgccattcaatacatcgacgacgaacaagatcacgtccgcctcctcgatagccacttttacctgcttgttgatctcctcctcgaaaacatcctccgagttaaccacccatccgcctgtgtcaatcagcgaaaactccttgccggtccactccaccttgccgtactgacggtcacgggtagtaccagcctcctcgttcacgatcgcctgacgggtacccgtcaaccggttgaaaagggtggacttacctacattgggtctccccactatcgctactatatttcccataaattctcctttcgtatgctattattagtccagctgataaccgaagttcttcaatatgttgtcacggttacgccagtctttttccactttgacaaacatttccaaaaacaccttctttccgaagaaacgttcgatatccttccgggccatagcacctactttcttcaatgcttgcccttgatgcccgatgataatccccttctgggtatcacgctccacgatgatcagtgccttgatatggatcagctcatcatcctccttgaacaactcgacgaccacttctaccgcgtaaggtatttccttctgataatataacaagattttctcacgaatgatctctgtcacgaagaaacgggccggtttatcggtcaaggcgtctttctcgaaataaggcggggaatcaggcatcaactcctccacccgacgcttcacgtaatctatattgaaattcgaaagcgcggagatcgggatgatctcggccttcggtagcaattccttccactgggccacgagcttctccagctccggctgattggtctggtcgatcttattgatcaacaagagaaccggacactctatgctctgtacccgtgctaggaactcgttatttttatcaatcgtctcgacgacatccgtcacgtacaacagcacgtcggcatcgcctaaggcggattgagagaaattaagcatggattcctgcaacttataattcggccgcaagactcccggcgtgtcagaatacacgatttgcatatcgtcggtattcacgatacccataatacgatgccttgtcgtttgcgccttcgaggtgataatagagatccgctccccgaccaaacgattcatcaacgtagacttacctacgtttgggtttccaacgatattgacaaaacccgatttatgctttttttccatcatacccccatttcagataaaccgctccccacgtaaagcccgctccaaaagcggcaaggatcaggttatctccttttttcaattgattctcccattcccatagacaaataggaatcgtaccggcgcttgtgttgccatatttctggatattgatcatcaccttatccatatctacgcccaagcgtttcgccgtagcgtcgataatccgcaggttcgcttgatgaggaacgatccacgcgatatcatcatgcgtcaagccattcttctccgcgatctcagcggccacgtccgccatataagaaaccgcgtacttgaacaccacacgtccatcttgataaacgaaatgctcacggttgtccaccgtctcgtgagaaggaggataagccgagccgcccgatttcatgatcagatgcggatagcctacgccgtctgtccgtaaaattgtatccaagataccaaactcctcggtagttggctccaacaagaccgctccgcaagcatccccgaacaaaggacaagtagaacgatcttgataatctgtaatagatgtcatcttatcacccgatacgacaaccaccttcttataacgccccgagcgaatataattagcgcccgtctccaaagcatacaagaagcctgcgcacgcaccttgcatatcaaaagtcatcgcgttcttacaacctgtatgataagcgatgatagaagaagttgtcgggaaatgatgatccggggtagtcgtagcggtcaagacaacctctacttcttccggattcaggttcgttttctcgagcaattgcttcacggcccgtatacccatgtaagagagtcctacgccctcccctttcaatatcctgcgctccttaatacccacacgagtcatgatccactcatccgtcgtatcgaccatcttggaaatatcctcattcgtcaatacatcttcaggaacgtatccacccactcctgtgataaccgcatttatcttatccataactttaaaaataaaaggactacttatcccaattaaaaaaaagccctaaaaaaaacttttagggctatttcttttgttcatcaaaccatataagttgacaaacttacacagcagcttctttttcaatcgctaatttacctctgtaataaccgcactcaccacatacagtgtgatagatgtgccatgcgccacagttcgggcaaattgccattgttggagctacagccttgtcatgagttcttctcttggctgttcttgtcttaccttgtcttcttttaggatgtgccattgttttatttatttaattgttatcattctctagcaaacctttcagagcatcccaacgaggatcggcaggactagcgtttccgtcatcttccaacgccaaatcatcacctcccatgtcatcctcaaaatcgtcttcggtctcatccgaacttctggcggtatgtttcttcaatttagacgacattgccttattacatttacccggcgcatgtacatgcttcatgggaaccgccaaagcgataaactcatacaggaaccacgccaaattaatagcgccctcctcttccggtatcacgacaacctcatcactctcctcggcatattccttgccgaattttaccaccagacgattgtgggtatcaataggaatttccatatcgtccaagcatctatcgcatggaacaacaacaaccccttctatctgaaagttcatctcaaacatcattgacgaccgttttacggtaagatgaacctccactttgcccttctggacctcggttccgtcaatgtccacaaaaaacttgttctccaaaagatactcgaattcgtgtactcccggagagagatttttcaaatctacattatataatttaaatttccccaaagccttttagtgtaaaaaccttgcaaaggtacgaaaaaactaaatacaaaaacaatacctttatgcttattttttcctataatacgatttaacccttatatttcttcaattttatacgaaaagtcgtccctttccctagctccgaactcttcacgaaaatctttcctccttggaaggactcgataatgcgctttaccaaggacaagcctagtccccagccacgtttcttggtcgtataccccggattgaaaaccgtcttgaattttgatttcgggataccttttccggtatcagccaaatcgatcagcacgaccttctctctttcctctacttttagcgaaatctcaccctgcccctccatggcgtccaccgcatttttcgtcaggttctcgattacccaagcgaacagggaatcattcattaagaccaatatcggccgctccggcaaatacgtattaattttcaccttcgaggaaatacgggtctccatatatcccaaagccgcacggatggattccacgatatttgtcggaaccggatccggatctgaaccgattttagagaaacgctccgctatcgtttgtaagcgtttcacatccttatccatctctgtcaatagagaaggatctatatctttcgttcgcaaatattcaatccaagcgattagcgaggatataggcgttcctaattggtgagccgtctctttcgataaccccacccacactttattctgttctgccttctttgtactagccaaggctaaaaaagcgattaatataaaaacaaacacaactgataattgcgcatagggataaacaagcagtcgctttaagataatcgaatcatcgtaatataaatattggtaagtaccatcctccatgtcaattacgatcggaggatttttggttctcagttccttaaccttattcgtcatgaactgcgctacattcttttccggaatctctatattattgtaagaaaccacgctatccgtctcgctgcataatataacaggaatagaagtattcccttggatgatttttaggataagattcatattaaggcttggattctcactggtcatgacccgggttgcctcactccaaacctcgatcttctgacgctcttctcgggccagatctttaatcaagagatccgagactaccacagaagccatagcgatcaatacagcggcaaaaataaagcctaatttccatctttgacgagaatcatatatgctgctcataaatcagaatcattcggtgaattcttaatataacggcaagatacgaactttattgttcccgattcagtaaacaatgaaatctcacccaattgtagagacgtagcgtgcagcgtctcatcccttcaaatggtaacttagaataccgtcagacgatacgagacgctgcacgctaggtctctacggcggctggtgtatataccaaaaaaaggagtcaaccctttcggactgactcctctct

SEQ ID NO: 736 - DNA, 21014 bp, unidentified
  source 1..21014: mol_type = unassigned DNA
ttattccacaggaacgatccagcccttggtgtcgggcagcttgccccactggatgccggtcagcgtgtcatacagcttctgggtcagctcgccgatgtggccgccgctgatgtgggcaaccttgccctcccaatccagctccttgacaggggagacaacggcagccgtgccggtgccaaagacttcctccagcttgccctcgtcggcagccttcatgatgtcggcaatggcaacacgctcctcatgcaccttgtagccccagtccttcagcagctcgatgatggagcggcgggtgacgccgggcagaacggtgcccacgcagggggcggtgtagatctcgccgtcgatcttgaacatgatgttcatggagccaacttcctcgacgtacttcttctcaacaccgtccagccacagcacctgggagaagccgcgctcctcggccagctcgccggccttgatggacgcggcgtagttgccgccgcacttcgtaaagccggtcaggcccggggcggcgcggatgtactcatcctcaacatagatgcggacggggtcgagtccctcggcgtagtaggcaccggagggcgcgcagatgatggcaaagcggtaatgcttggcggcatgaacgcccaggcccacatcggtagcgatgcagaacgggcggatgtacagggacgcgccgtcggagtggggcacccagtcgcggtccacatcgaccagcgccttgaccgcctgcacgaagtcctccggcgggatggggggcatgccgagacggtccgcggaatcgttgaaacggttcgcgttgcagtcggggcggaacagctggatcttgccgtccgcggtgcggtaggccttcatgccctcaaaaatttcctgtgcgtagtggaacacggtggtagccgggtccatctcccacgggccataggggacgatgcgggcgtcatgccagccctcgcccgcggtatagtccatcaggaacatgtggtcgctgaactgcttgccgaagccgagcttcgactcgtcctgcggcttttccttcggatgggtcgttttggtgattttaatgtccaacataatttcacactctcccttttatactcaagcgcaccgccgcacagcggtgcgggtgatggttaggtttattatagcgctgtcgcgcggcgagtgcaagcccttatttacaaaatgtgtattttgtgttgcaaaaagcgcaatttgcgttttccccggctttccacagttttcaacagcgccgctgtggaaaatgtggaaaataaacgttttttctacgtagattttcccggttttccgcttttgaacgggtccgggcggcagagttttccacgctttccacggagttttcaacatttccacggtggataaccgttatacgccgtggataactcggggtgaatatacggaatgtgaacggggtgtgaacagaaaaagcgtgccgctctctttcccacaagagagcggcacgcagtccaaactcaattttcttttcggtgcaccacaaacatcaccatgctgaacaccagcatgaacgctgccagccctgccgcaatcagcaaaatcagctggaagaccttcacgttaaagtttgtctgcaaattctcacgcgcggcggagaccacatccgaaccggaggaaaccgtcgattgggcgttattggccatctcctcggcggcggtcagtgcggcctgggcggcgtcggtgtcgcccaacgcctccagcgcgtcggccagtgcctgcccgcccatggcaaccagacggtcattcgtctcgctcttgatcttctcgtgattgaccgcgttggccaggtactcggcaaacaggtctgttgcgccgcgcacggcgggggcgtagtcgtccttgatctgccagcccttgacggtccacataccgttcatgtagaaaagcaactgcataccggaatcctccagcagagcactgtacacggcatccgcaaaggccgtgctcgaggtatccaccgtgccgaagctcagcgagatgaactccttgacgcggtcatactcggtcagattcgcgtagtagctgcgcagcgcctcggccaggtcggtgtcctttgtcaccttggagccgacgacgacggagtcgaggtccgcccgcaggtccccgttgctgaagcggctcagcgtgccgtcatcgtctttattaaaggaagcacgcatcgcctcggcgtagcccgcggcatcgccggcctggccgtaatactgcctggccagttcctcacagtcgccgccccagctgcccgtgatgggtataccgttgtagacaaggttcatcgacgccagcaggtgcccaaagtcgatgctctctccgttgggcaggacgacggtgttcatattctgcagcgacgccagctcggggtcactgctgttgacgcggctctcaaacccggcatcgcgcacaccggcggtcagctgccagatcgtggagttgtactcccccgtgcgggtgtaggccagcgtcagctcgatcgggtcgggcgtgtcggcctgactggccgagtactcctgcgccagcgcctgcaggcgggacaggcgatccagcaccgtgtcgtagtcctccgcatgggcaggcagtgccgccgcgcagaacagccccagcagcacaaacagcatagccagcaggcggggcatacggttcgctatagaattcgtagtcaagcacctccggtaaaacaggacaaagccggggcaaggctgcgcctgcgccccgggtctgactttttaaccaatttgtaatctttagtataccacatccgccccgggtttgtcacctgtttttttgtgtgtattctgtgcgtcttgactttttgccctgcataggttttaatagaggcattacggaggtaattctatgcacaaacaaccgcataaacgcgctttttatacccttgcaggctgcattgccgcgctggcgctctgcgtggcggcatcgctttttctgctgacgcccgcaccgaaagcgcaggacgtcaccatacccggcacgcgcggggacatttacgccacggtacagctgcccggcaagctggcccgcggggaggagctgccgctcgtcgtgctctgccacggctttaccggcagccgcagcggcgacggccactttgcgccgctggccgccgatctggccgcccagggcattgcgacggtgcggctggattttcccggctgcggcaacagcaccgagccgttcacggcctacacgctgtccaacatgaccgacgacgtcgagagcgccatcacctacatgcagcatacctacggcacggaccgcacagcgctggtgggccacagcatgggcggacggctggccagcctctacccgcagcgcaggggcggcatcacggcgctggcgctgtggagtcccgccaacggcgcgggcctgcgcggcatggagtttttgaacatcgacgacttttccgccgtggaagcgctggccgctgaggccgaggcgagcggcagcatcagcacctggggcgtcgatgtcagcggaacgctgttcaccgagatgcgcgattccgacccgaacgccgccctgcgggagagcgccctgccgacacttttgacctacaccggccatgagggcattttgagcgacacgacccaggccgagacgatagccgccgtcgagagcctgcccgacggcagggtcgtgctggagccgtttgccgaggggaaccacaactatctatccgaggacaccgccaccgccgccgcgctggacaaagcgctgcgggagacgacagtggcgtttttggtggagtatttgaagtaggcccgccgcacctgcgaggccgacaggaacgggcacctgacgaagccctttgagaccgtgaccggctgaaaacatcggcaaaatacagaaagaaagtaaaaaccgcggagaagcgcaaacttttccgcggtattcttattgcagatttaccagcacatagtccccgcaatcgacaatcgcccccgcccgggggtatcccggcaggtcgtgggcgtcggcgtaggtctgcgcctgctcatgcagggcagcgctgtgggtcatgtccaaagcaaagccatagtagcggaacaggtgctccgctgcctggccgtagacgtcgtccacctcggagaaggccgtgaccgaccagttcagcaccgagttgcagttggtctcgacgtacttgacggtgtcgccgctctcccagctcgtgtgctcacggaagaagcggtacagcgggtgctgcatcgggtcagccgtcgtgtaccgggtgatattctcccccagcgtgtaacggcccaccagcaccacgggcttgtcggtgccgtagtcgcgcacaagctcggtgcccagagtgcgcaccacagcagcctcctgctcggagcgctggtaatcgacggccagcagatggttcaggtacatggcctggtgcagacagagcagcaccgccagcagctgcacgctgcccagcagcacagcccgccgggccgcagcgcggcgcagcagctcatacacggccagccccgccagcgccacaaacagcgcaaacacctggcaggtgcggtagggcgagtaccgcccctgcacaaacgacagcagcaccagtgagaacagcgtccccgcgccggtgagcagcagcaggggccgctttttgcgcaccgccagcacgatgaccagagcgacaaacaccggcaccgccaccgccaattcagcaatgggcaggtagaaacagccgcgcagtgcgtagttaatcagaatgcccttgacaagcagctttgcaagatagacaaatgggtagaacgcccacaaaatttcggtggcgccgttggccgcagcctgcggcagcacaagatggatgcccgacgtcaccagcacgcgcaggcagagcccgccgaccagcgccgccgcgtaccacagtccctcggtcaggaccgccgcaagccgcgggcgctcggcggccagcagttgctccagcgttaaaagcgcaaagacagccagcacaaacaccgccgccagtgactcataggacgagcagaccaccatcaggcagagcaccgccgcgcccatgcgcagagccctgccacgccacggcacgccgggctggcgcgcgtcccacagcaggttcagcgcagcggcgtccagcaaatagccgccgcagacgcagacattcgcgccgctgtactcccaaatttcgttcatcagcgggtaggagacaaacaggcaggcaaacagcccatagccgaacatgtcgatacggtcctgcgcggccttgcgcagcagcgcacagaagctcaccgccgccagcgccagcagcagcgccgccagcaggtcaatgccaaaggcatagctcggctcggccctgccgtagcccagcaccgcggcccagaggttcatgccgaaccggccggtggacagcatgacgccgcccgtgccgatgtagcggtccccttccagcgagtcaatgctgacccgtgtcgtggcgatggcatagccgtagctgagcagcagggtcagccccagcgccgcgcggaatttcgcgtttttcaggaaataaccaaacgcctgcttcatgccggtcactggtcgtccggcccaaagttgaggcgttcctcctccacaacgagcggacggttcatgatgcgggtgttcatagccatgacgtactcacccaaaaagcccaggaacgccagctgaataccgcccataaagaagatggcgatcatcgtcggcgcgtacccggcgcggaagctctgccagaacagcagcttggcaatcagatagaacaggccgaccagaaagctcagccccgccaccaggaagcccgcgaacgttgcaatgcgcataccggccttggtgtagctggtaaagctcagcatggcggcgtcgtacaggctgtaccagttgttgtgggtcttgcccgcgcggcgctggggttgggtgtactcgatttccttgcgctcggggcccagctcggccacaatgccgcggatgaagggcgtcgggtccttcaggttgcgcagcgtctggataaagctcttgtcgtacaggccaaagccggtgaactgctcgatctgctcgcagctgctcatcttcttgatgagcttgtagtagcagccgcgcagccagtacatgaccgggttttccttactctgggtcttgcggccaatgacgattttgtagcccttttcccactcggccacaaacctggggatcatctccacagggtcctggaagtcggcgcacatcgtgatcgtgcaatcgccggaggtgtggatcatgccgtagtacgggctgttgaactggccgaagttcttgacgttgaagatggccttgacgtgcttgtcctcggcgcagatctgccggatgatggcacgggtgccgtcctcgctcttattgtcgatgaacaaaatctcatagtcgtagttcgggcagctcttgaccagctcatcgcgcacagcctcatagatggggcgggcgttctgctcctcgttgtagcaggggatcattaccgaaatcgtctttttctcactcattttgtctctttccttacccactcaatggtttcgcggattccttcttcaaacggggtcgcgggccgccagccggtgtcctcctgtaaggccgacgtgtccgcctgcaggtgcatgacctgcagcgggccgtaggggacctcccccaagcccagcggcagcgccgggtcgatggcgtcgcgcagcgcctcgatgtagtccttcagcgggcgggccgtgccgctgcccagcgggtagaccctgccgtcctgcccgctgacggccagcgcgtagaacgcagctgccgcgtcggcggcgtacaggtagtcccactgctggatgcccgcggtcagagcgggcttctcgccgtgcagcagcttacggatggtgccgctgatcatcgtggccggaccgtcgtgcgggccgtagacgctcaaaatgcgcgtccagatgtgggccacgcccagcgtccggcactcgacgcggctcatctggccggcgcacagcttggccatgccgtagccgttctccgggaagcagggggtctgcgcggtcagcacgccctccacgcggccatattcggcctggctgccggctccgataaagacctggcaacccagctgcgccgcggcgcggcaggccgcaatggtgtagcggatgttctcgatctgcgccggcatgtcgttgcggcccgggccgatcgtgtgcgtccacgcaaagtggaagaacgcatcggccttttccgggatcagctccggcagcgcggccaactccgccgcatcgcagggcaccacatgcagccgcgcgtcctgcggcagcagcgccgcccgcgcgctgcccgggtgggtgaccgcgtaaaccgtcacaccctccgccagcagctttgcacacagcgccatcccgattgcccccgtagggccggtgatgatggcggtgtggatttgtctttgaatgcttgccatttttgaatcacgcactcccttacacttccggcatcagcgggatgaacatctgcttttccagctcctcacgcggcaggaagggggccaggtcctccaacggggggctgaccagcgtgccgtcgggcaggcgcttggtgctgctcttgggctcccagacctgtttcgtgtcggtgaaaatctcgcagaaagccgggccgtccagtgccagcaccgtgtccacggcctgcttcatctcggcgttgctgtgggcgctgtagtaggggtagccaaacgcctttgcaatcttttcaaactccgggaaggacaggtcgccgctctcggggccgatgccgaccttgcagtgctccttgaaaaggttattctgcgtcaggcggatagagtggtaaccgttgttgttgatgaggaagattttgatcggcagcttgttcgtcagaatggtctgcagttcctgcaggttcatcatgatggagccgtcgccctcgaggcagatcgtcgggcggcgtccgccgccgatgcaggtgccaatggctgcgggcagaccgtagcccatgctggcaatggcgctgttgtttgccatccggctgcccttctggatgacatacgcctggttaccgacgacacagcacgcaccgttggagaccgcggtcaggctgttctccggcaggcgactgcttaaatagcgcacaaaggcgtagacgttggcggtctcgccgttttcctcccactggcggggcaacacggcggggtagtcgcgtttccagcgctggcaggtggccagccactcgccgcccgcgttcacgggggccgcggcagccttatccagcttggtcaaaaagtccttcgcgtcggcccagaccggcatttcgacgtgcagggtcggctttttcagctcggcctggtcaatgtccaccatgatgacctctgccgcgcgggcccaggtcttccagttgtagccgacctggcgaatagaaatgcgcgtgcctacggccagaatcaagtctgcgttttggatagcccagttgcccgggcggtcacccatgttgccggcgcgcccgcagtacagcggattgtcatcctcgatgaggtccacggcgttccagtaggtgacgatggggatgttgagcttttccgccacggagcggaacgccgcatacccgccggacaggcggatgccatagcccgcgtggaacactggccgtttggcgttcttgattttttccagaatcgtccggatcgtggtgtcgtccaccgacgggggcagctgggcgtcatcctcggcggggtcatagccgcgcagctcgtcagtctcgatgtagccgccctggaagttgaccgggatgtccagccagaccgggccggggcggcccgttgtagccagatgccacgccttttccagcaggtagcgaatgtccttggggtcctccagcatggcggcgaacttcgtcatgtactggacggacttggtgatgtcgtactcctggtcgcccatggcgcgcagcggcgtgccggtgtactgcaaggcgtaccgggccgtggtgtcatagcgcacctggccggagacgatgaacattgggatggagtccagccagccgcccacgacgccggtcagcgcgttggtgccgccggggccggtggtcacgcagaccgccgcgatcttattttccagccgggcgtaggcttccgccgcaatggcgcaggcctgctcatggtggttgtaggtcacatgcagccgggggttatggcccagcgcatcgttcaggtgcatagcgccgccgcccacgacggagaaaacatccgtcacgccgcgtgccgccagaaaatccgccacataatccgctaaacgctgtttcattgggttgctccttttccattcagtcaattttcaggaaccaataccgggtggccgtccgttccctttgtccattcgacaagcgtaatcgcttcttctgcgccgctctcgctgtttgctttattcttttctcttactgcggcattcagacgcttcaccaggaaatcactgttgaaaacatcttcgtcggcatagctgacacgcttttcttgaatagcgggtctatcaagcaggcttgtcttttgacccgtcagctgataaacattctctaccataattgagctattataggcgattgcatccgcgttttcgccaccagtcagcgcaccggcactaacacagtttacaacactaccagcgaagttatcggtaatgccaccagcgcgcgagcccgtgacattcacatccgtaaagcagttcataatctctgcctccgggttgactgcatagctggcaattgctccaacacagtcgccagtcaggctgcccgcttcaagccccagattgtaaacagccccttcgagacgtccaaacagaccgacatcctctgtagccttgccctgaatgctcagattgcggataatatgtcccttgccattgtaggtgccgtaaaaatagctttccccgctgaatgcaccaatgggcgtaaattttttaccgtccatatcaatgtcagcggtctgttcaacatactgatctgcaaagctcatgccgcggttgacataattgctgaacgcctgcaaatcctccgccgactgaatcagatacggctcttcctcggttccctttccttccaaggtgaagctaccccagtctgtctcgtctgccagcttgtacaccttgatcttaccggttctttcctcaccatacacgcccaacagggtgtagcgtgtgcccagcagtcgtccaaaattcttttccagctcgcgctgcttcaatttctcaccattgcggtaactttcttcgtgaaccttcttgcagtttggaacatcatccttccagattacaatgtcaggcagattttcctgtagcagctcatcctcctgcaaaacgtactggtcgtctaccacgtcatagaacagaaccggaacaaacgtatccattgtatagcggtttgtcagaatattaaagagctttacatagggatagccaaaaatcgttgcatcttctgttgtgttttcaagaatcagctgtgtgatgtcttccaacatcttgtcgtcctccgcagaaaaacggaagcctcgcagcgcggggatgccggtggcgtagatttttttgtcatactctgcctgttcacagccccaccaagaataggaacatacgaccttctgtgcaatacaagccatcgaaagtactgtgcacagcgcaatcgtaccgattttgaccgatttttccgtaactttatctgtaaatacgctgttcagcccaacacacagaacaaacggcatagccaacataatcccatggtaggaaatttctgatgccgatgccatactggctgcatatatcgtagaaaatgccgcacaggccatccaaaagtgctcacgtgcatagccgtcattgccatccgcttttattttcataagggagcgggcaatcagatatagatccaaaaagctgatgatcgtatacagcgtaccagtcacactcttaaacagcgtgcctgattcatagattgcttccaataagctcccgttatcttcgcctaatgacgcataacgggccgtaaccagaatagtcaccacataggcggcacacagaccgtaaaatacatcgtgcattatcttgctgccgcttctgcgcttttggctgtacgccagcaacagtagcaaccctccaccgatgacaacggcttggacgcttttcgtaccaacgagcacttcgataaagtcgttcgcagcctgcctttccaaaacatagccgccgcctatgaccagcagcaagagcatccgtcctgctgtctgactctcgtttttctgcgccagtgttatggcagctacacaccccaccatcagtaaaaataccggcgcattgattgtccagcccgtaaagattttcagcaaaatggcaagcggactgcctttgcctcccgtgtgcataaagacctgctgaaagaacggaagcaacgcgccattgacggcaaggattcccatggccacgacgaacaccagcaaaaagccaagtatgactgccgcacaatattgcagaaagcctttgtcttttttcttccagcagtagacactcaaagccagcagataaataacccccgcagctgcaaaaatcgtctgcttgttcagaaagagcagccccagcatagcgccggcagcaaacaggtatttcccggcggctttcttatctgccgcctctgcaaatcccagaacacaatagagcagcaacacagacaaaaacggaatcgtctggttataatcaccgaataaatcgtagacagaggccgtgcacagaatcgcagagaaggcacacgctgcaaaggcggcatatctattgaaataccggcagagcagccgaaacatcaactcataaatagcaatccgctgtaccagccaccacgcacggtaaatgaacaggctgccaaacgacagcttccagagcatcacatcaatcaggatgttcagtggcggcaggtaatagtaaaaatcgcggtatggaaatttcccgtgcaataccagctctgcatagtttacattccagccttccgtaatgggcatcgtgttggcgaaataaattgaggaataggccagaatcaccacacaaagcagtgcagccaatacccagcctcgcgcgttctggcgcttattcgtatgtggtttttccattactaattgcatcgtgcttgttctcacttttccttaaatgtccacagcttgttgataacaaagttcagcgggatcgtcactaacagattaacgatgggcgcaatggacttgctgacactgaagaatgcaacttcgatccagagcagcacgttggacaaaatcgatgtgccgccgtaactgacataggtcttacccagccgcttgagcttgctgcgccagtcattggcgttgccggtaaagacaaatttatcattccagaaaaaggcgttggcaatgctcagaatcgtgcccagaatgctgccgaccatatacaggtccgggctgatccacaggaagatatagtagaccgccatggacacagccgtattgcttacgcccactaggccgaacttgacgaactgcttgaacagctccacaaattcctctttattttttgcgcccagcagggccagcaatttctgcatagtatatgtttccttccgttattcggtttcctccacagcgccctcactggcaaccaccaggtttgtcaccgtgaaggtaccgtttttgcgcgaagaagcatcatagaccgccatcgggccgtcatagctcacatcgatttgggtctggccgggggccacatctaccgtgtagcacacggtctgcccctcatggtcaatcttaatattcgtctgcttctgcttcccggttgtaccatcagcatcttccagattcggtgcttcaaacgtcatcgtataggcgcgcttcaaatccatgccgtagcctgtctggaacgtgaccaccatcctttgcgtaaatggcgcgtggttgtaaatcataatatacgcaccgcggccgctccatgttgcctctatcgggttgccgtcgctatcctgcacgtccttctgctggatgtcctcggcatccagtcggccgttgtagccatagtcaaagccccagttgtgggtgcgctgccacagctgctggccgcccacaccggtcaccgccacacaaacggccagcagcaccgtggccgccgggtgtccgtgtgccggcttgaccggcttttccgcacagcgtacacgcaccccctgcactgcctggacaaagcaccagacaatgagcagcagcagcatgacatgacaaatcgtgttgcgcggtacaaaggacggctccatctggtcccgccggaacagcggcagcggcagcaccggcaccatcaaggccagatagggcagcacgttgtccctgcgcagctcacgctcctgctccataaacaggaatagcggaatcaaaaacaggcaccatacataatcatactggggctggaacatcagcatcgccagaatgattgctgtaatgcgcttccactccttatccataaaaaagctgcacaccagcagcaccgctgccagcacaatgcccagcagtgcgtagctgccatagcccagctgcgtgcccagcaacttgtccaccgcatgtccggcctctgccaaaatgttggagaaaccattgccgatccacggttcacctctgctgccgctaaaatcaaacagtacacggaaccacagtgtgaggccaaacaatccttcattgaagaagaacagcgggaagcacaggcagacaacaccgtacagcaccgtgcgcaccgcggccagatagtttttatcgcgcagcagcagcacgcccagaaacgccgggtacagcttgaaaccggcggcaatcgccagtgccagacaggccagctcccgcaaaagtggtttttctgaattgcggtacaggataaaaaatgccattaacggccagcacagcagcagaatattgccgcgttccaagccgtacagtaccccatagctgaacactgcacagaatgccagcagctttttccgccccccgcagctgcgcgtcaggcgttctgtcatcgatacaattcctaagaccaccacgataacaaagacgacaaacagcatcatcgtcgcttgctgtaaacgcaaatcccgttctgttcccctcatgttgagagacgagatatacgattccgtccacgtagctgattgtgtctttggcacaagcaaatacaacacatagaaaaacagatttgcaagcggcgggtacagcgtatcgaactgtccgtagggcatacgccctctcacatactcaatactatggaaaaagtccataccggtatcggtgacatcataaaagaagaatcgatgcagcagcgtaccgcggctggccagcagggcaagcagcagcaccgccagacaggccaccgttgcccagcagtagatctgcataggcgtcagccgcctgtttttgtccaaccgcagtctgggtgcgcgggtcgttttcaccttttgctgcatcataggggtctgtacctcgttgtcaaaattttactgattcacagcctcgataatcgtcttggccatgtagtcgatcatctcgtcggtcatgccgggataaacgccgacccagaaggtgttgttcatgataaagtcggtgttggtcagctcgcccgccacgcggtaggcgtcggtgccgcggatctggtcaaagcaggggtgcttgatgaggttgccgctgaacagcagacgggtctgcacgttgtggctctccacatagcgggtcacgtcgttgcggtccagaccgctctccggcttgacggagatcaggaagccgaaccaggacgggcggctgttggcagccggttccggcaggatcagcttgtcggcggcgggctccagcgcggcgcgcagacggtcccagttgtggcggcggcgctcgatgaaggtggggaacttcttcagctgctcgcagccgatggcggcctgcatgtcggtgaccttgaggttatagccaaagtggctgtagacgtacttgtggtcgtagcccttgggcagctcgccgaactgaccgtcaaagcggtggccgcaaaagttatcctgaccggaggggcagatgcagtcgcggccccagtcgcggaaggagaggatcaggcggttcagcagcgggttgttggtgtagacgcagccgccctcacccatcgtcatgtggtgcggcgggtagaagctggacgtgccgatgtcgccccaggtaccggtaaaacgggtctcgccgttgatggtgtactgggtgcccagcgcgtcgcagttgtcctcgaccaaccacaggttgtgggcgtcacagaacgccttgacggcggacaggtcaaacggattgcccagcgtgtgggcgatcatgacagccttcgtcttgggggagagggcggcctcgagcttggtgacgtcgatgttgtactggggcacggtcacatccacaaacacgggcaccgcgccgtactggatggccggggtcacggtggtggggaagccgcaggccacggtgatgatctcgtcgcccttcctgatctggcggacacccagctcgggggcggtcagcgccatgaaggcgatcaggttggcggaggaaccgctgttgaccagatgggcgaacttaacgccgatccacttagcgaactccttttcgaactggtctgcaaagcggcctgttgtcagccagaagtccagcgtggcatcggtcagagcgcacatctccttctcgtcaaagacgcgggctgcgtaggtgatgcgatccccctcctgatagggggtctttttctccttgaagtcgtgataatactcggcgaccatcgtcttgatctgctcgcgggcttctgcctcgttcttccatgccataggttttgctctccttttttattgcttttcgtagtagtaataggtaattgggttcgtgccgccagccgatgtgaaggtcgtctgcagctggtatccgagcatgtcgggcgtgtagccattctgccccagatagacccccagtatgtcatccacgacaaagctcggctgggccttcaactctgccagaatatgagggagtaatttttcggtatctgccacgccgtaatccgcagcatccacataatgtccgtagttgtcccagcctgctgcatggtagatgattcccacatcgcggccaaccgcaaaggtgttgtccggtatattggcagagaaattctccacctccgcatagatgccgcgtgtgctgaacgcaccgcgctcctgcaggatcactgtattcatcacgccgccgggcagctgtgccgtaagcacgcagagcaccagcagcacggccagtcccacagactgtgccgccgtgcagtacaggccgcccagcttcttgcgtagcccctccccgtccgtcagcgcctgcagcgggaagcacaggcaaagcagtgcctccggcaggcagatctccagattcatccaggcggagcggtttgcatagtaactgaacgataccagccccagtaccgacaggcaggccgcaaatggggcaatgttctcctttttggctattcttccgatagcggttgtctggaacagcgaccatgccagcacggccagcataagcagcagcacaaacacccatgggcgcacgcctagctcaagcgggtagccgatggaaccatccatataattgctgctgtacagcgggtaaaaaaacaccttgaagatcggtgctccgccgcaggccaggttatacaaatttgtcaggccaatggcccccagcaccgccaacacagcgcccagcagcagcgcaccatagcgtttccactggccgcgggcgtaccatggctcctgctgccaccagcggacgatgcagcccgcgcaccagccgatgatacagaacagaccactctcggtgctccacagcactgccagcatgcacagaagccagccgccccagaaccgagccgtttttttcgactgctttttccgcaaacagaacagcatataggccgccagcaacatcgggaataccaaacggtgaggctgcagctgccagtaattcgtccgtctgtatgcaaacggaatgaccggcacaaccagtgccatcaacaggcgtacccagttcttttttatcaggtgatggatgcagtacagcatggccagatccgtcacaacgccgaccagcgcgatcaggaattgaataacaacagcctttgcaccgaaggtcttcatcggcagcaggaagaacagcccgtagtggccgtagatgcctgtcgtcaactcctcataggggatgccgtcagccacgttgtagatgctttccaaatacgcctcaccgtggtacgggtctccctcaaacgtattgacgatccatacgcccaagaagtacatcactgccgaaaggccgtagccgccccaggtcatccactgcgggcagtccttacccgtcagcagcagatagattgcctccacaaaaaacagcaccgtaagcaggtaatacagcggcaccatctgcggcgccatcagggaggacggcgaataggaaggccccgcaaattccttggacaccccaatgttcgcgtaataaataaggtaggcggctgtcaccagcgcagataccacaagggccgctgccgcgccgcgaccctgcagacgcgcgtcgcaggcccgcacaaagccacgttcttgcggcagaatgcgggcaaaaaggttgccgaacagcaaaagcgaaacgccgaacagtactagaactacggcatagttgaccatgttgctgccgatgggccacggctgaccaccccatacatgcgccagccaggaaaccagataggctccacctaccaaaaccgaaatgacaaaagcgcttgttatactcctctgttcctttgtcatttctgcccctccaagaagctgttaatttccttttccatctccgccgggacgtcgccgttggcaagccagatcttgctgaaggcgacggtcttttccatgcactcggccatgtgccagcgcggcgtccagccgaaggtcgttttcagcttgctgcagtccagcttcaggaagttggcctcgtgcggggcattggcctcggcctgattctcccaggcggcgtcgccgccccaggcccggcagaacagatccaccagcgtgccggtggtgacgcagtcgcagtcgtcggggcctacgttatagtagcctgcaaagcggctgtcctcgtactggcgctgggcgatcagcaggtaggccgccagcggctccagcacatgctggtacgggcgggtcgagtaggggttgcgcacgccgatcttacggcccgcggccatggcgcggacgcagtcggggatgatgcggtcattggcaaagtcgccgccgccgatgacattgcccgcgcgggccgtcgagacggccacggtcttatcggcaaaaaagctgttgatgtaggagtgcgtcgccaactccgagcagctcttgctgttggagtaggggtcgaaaccgtccagcggctcgttctcgcggtagccccaggcccactcgttgttgtggtagaccttgtctgtggtgacgttcagcaccgagcggggcgctctgccctgctgctgggccagccgcacacattccagcaggttgaccgtacccataacgttcgtctcataggtgtagcgcgggtccttgtagctgtcgcgcacgatgggctgcgcggccaggtgcagtacaatgtcgggctgcgccgcgtcaaaagcggccttcagcgcgtcaaagtcgcggatgtcgccgatgacgctgtgcatcttgccctcgacgccggcgatggagaaaaggttcggctgcgtcggcggctgcaggctgtagcccgtgacctcggccccggccatcagcagcatcttgcagagccagctgcccttgaagccggtgtgaccggtgacgaacacccgcttgccgcggtaaaattcaggatcgtaatgtaccatcatcaatcctcccacttcttccagggcgcgttgccggtggcaagcattttctccaggacctgcttctcgcgggcggtgtccatgcactgccagaagcccttgtggatatagctcatcagctgaccctcctcggccagcttctgcagcggcttctgctcaaagacgcaggcgtcgccgtccagatagtcgaaaatctgcggctccagcaccatatagcccgcgttgatgagcgcgccgtcgctggccttcttttcacggaaagaacggacagaattatcctcggcaatatccagaacacccttctgctgctcctgctgaacggcggtcagcgtggcgatcttgccgttctcgcggtggaatgccaccagcttggcaatgtccacatcgcagacgccgtcgccgtaggtcatcatgaaggtctcattgccgatgtagggacgaatgcgtttgatgcgcccgccggtcatcgtgttgaggccggtgtccacaacggtgaccttccacggctcggtgtgatggttgtggacgatcatctcgttctggccgcgggtaaaatcaaacgtaatatcgctggtatgcaggaagtaatccgcgaaccactccttgatcatgtgctgcttgtagcccgcgcagatgacaaagtcgtgaaagccgtagtaggaatattccttcatgatatgccacaggatgggcatgttgccgatttcgatcatcggcttgggcttgtagacgctttcttcgctgatgcgcgtgccaaggccgccggccagaattaccactttcatagtgcgctcctttattgttttgtgagccggtcagtccgtcgacgaccggtttttgtcccgtgcgctctgcctcgtttgggcaattttacacacttattcataatgaagagtataacacacacgctctgtaattgcaacaatttacgcccgtctgcgccgttccaaaaccatcggttcaaagtcaatatttttgtccagagcccacaaaaggccgtcgttcgcacatttttttgcgcttttgcgttccaaattttacatactgtatttccgcaaaaaaatccccgccgccggggtgcggcggggggattttcatggtggagctgtagggaggcggcgccctcggcgacccgggccgtccgtcttactgctgcttaaaataatacactgcgccgacaaggccggcgtcgttctggagggcggcggccctgacctcaaggccctcggcgaaggcgggcatgatgcttttgcgcacctgcgcggccaacgggtcgatcagaagcgcctgctgtgcgctgacgccgccgccgatcaggatcagctgcgggttgaagatgtgtacaaggcccgcaaggccctgggcgatctcgttgatccagccgttgagcacagccagcgtgcgggcgtcgcccgcggcgcctgcctcaaaaatcgcacgcccgtcgggcgcgtccagcccggccttctgggcgctgcggaccagcgccgttgtagcggcgtagcgctcatagcagccgattgccccgcaggtgcaggccacgccgtccagcgcgtgcagacggaaatgccccagctcgccgccaaggccgcgcgccccctccagcagatgtccgccggtcaggatgccgccgccgacgccggtgcccagcgtcacaccgatgacatcggtatagcccttagccgcaccgacccagacctcgcccagcagcatacagttcgcgtcgttggcgacggtgacgggcaggccgaaggcacgctccagcgtacctttaatgtccacgccgatccaccccgggaaattgccgcaggtccccgcgaccacgccgcggcggctgtcgatctggcccgtggcggacacagcgatgccctcaagcctcggcgtgtccgcggtcagaaattcgtggatggccgcctgcacggtatccaggatcggcgttttgtagccgtcaaagctgacgctgcgctcggcgcggcgcagcaccctgccgttctcatcgacgagtcccagcttgaccgccgtgccgccgatgtcaacgcccagataggttttactcat

SEQ ID NO: 737 - DNA, 11882 bp, unidentified
  source 1..11882: mol_type = unassigned DNA
ttactggttcaccgcttcaataatgatctttgccatatagtcgatcatctcatcggtcatgccggggtacacgccgacccagaaggtgttgttcatgataaagtcagtgttggtcagctcccctgccacgcggtaggcgtcggtgccgcggatctggtcaaagcaggggtgcttgatcaggttgccgctgaacagcaggcgggtctggacattgtggtcctcaatatagcgggtcacggcgttgcggtccaggccggattccggcttgaccgaaatcaggaagccgaaccaggacgggcggctgttggcggccggttccggcaggatcagcttatcggcagccggttccagggctgcgcgcaggcggtcccagttatggcggcggcgctcgataaagctggggaactttttcagctgttcgcagccgatggcggcctgcatatcggtcactttcaggttatagccaaagtggctgtaaacgtacttgtggtcatagcctgcgggcagttcgccatactgaccgtcaaagcggtggccgcagaagttatcatggccggacgggcagatgcagtcgcggccccagtcgcggtagctcttgatcaggcggttcagcagcgggctgtttgtatacacgcagccgccctcgcccatcgtcatgtggtgcggcgggtagaagctggaggtgccgatatcgccccaggttccggtaaagcgggtttcgccgttgatggtgtactgggtgcccagggcatcgcagttatcctccaccagccagaggttatgagcatcgcagaaggctttgacggcggacaggtcaaacgggttgcccagggtatgggcgatcatgactgccttggtcttgggggaaagagcggcttccagcttggtcacatcaatgttgtactgcggcacggtcacatccacaaacaccggcacagcgccatactgcagcgccggggtgacagtggtggggaacccgcatgccacagtgatgatctcatcgccctttttgatctggcggtcacccagttccggggcggtgagcgccataaaggcaatcaggttggcggaggagccggagttgaccaggttggcgaactttacgccgatccacttggcaaactctttttcaaattcatccgcaaagcggccggtggtcagccagaaatccagcgttgcatcggtcagggcgcacatttctttttcatcaaacacgcgggatgcataagtaacgcggtcgccgggcttgaaatccgcctttttctccttaaagtcatggtaatattctgccaccagcgccttgatctgctcgcgggcttcggcctcattgctccaatttgccatcgtctgctcccttactcactcaaaaattccttgatctctttgtccatctccgccgggatatccccgccggaaagccataccttgctgaacgcaacggtcttttgcatacattccgccatatgccagcgcggtttccagccgaaggtggatttcaatttgctgcaatccagcttcaaaaagtttgcttcatgcggagcgtttgcctcagcgcggttttcccatgcggcaccatcgccccacgcctggcagaacaggtctaccagggtgccggtcgtcacacagtcgcagtcatccgggccgacgttataatagccggcgtaccggttatcctcatactggcgctgggcgatcagcaggtacgccgccagcggttccagcacatgctggtatgggcgggtggaatacgggttgcgcacaccgatgctctccccttttgccatcgcacgcacacagtccgggatgatgcggtcattggcaaaatcgccgccgccaatcacattacctgcgcgggcagtggagacggccacgctgccatccgcaaaaaagctgtttttatagctgtgggtcaccagctccgagcagcttttgctgttggagtaggggtcgaagccgtccaacggttcgttttcgcggtagccccagcaccattcattattctggtacaccttatccgttgttacgttcagcacagagcgcggtggggtttgggcggtacgcacacattccaacaggttcacggtgcccatcacattggtttcataggtatagcgcgggtccttgtagctgtcccgcacaatgggctgggccgccaggtgcagcacaatttccggccgagcggcatcaaaggccgctttcagggcggcaaaattgcggatatcaccgatcacgctggtcattttgccttccagccctgccagagagaagaggttgggggttgtgggcggttccaggctgtaacccgttaccactgcaccggaacccaccagcatgcggcagagccagctgcccttaaaaccggtatgcccggttacaaacacgcgtttgccgcggtaaaattccaagttcattgttggttccacacttcccagggcgcacagccagacgcccacattttttccagcatacttttttcgcgctcggtatccatgcactgccagaatccgcggtgcacatagctcatcagctggcctttggctgccagctcgcgcagcggggcctgctcaaaaatggtatcatcgccactgatggtatcaaacacttccggttccagcaccatatagcccgcattgatgatagccccatcgttgacgcttttttcacggaacgcctgaaccgaattgtcctggccgatatccagcacgcctttctgctgttcctgcaccacggcggtcagggttgccagcttgccgtgctgcttatggaacttgaccagttcggcaatgttcacatcgcagacgccatcaccataggtcatcataaaggtttcgttgccgatatatttctgcacccgcttgatgcggccgcccgtcatcgtgttcaggccggtatccaccaccgtcacgcgccacggctcggcgtgctggtcatgcacgatcatctcgttgccctgggtgaagtcaaaggtcacatcgctggtatgcaggaaataatccgcaaaccactccttgatcatatgctgcttgtacccggcgcagatcacaaaatcattgaagccatagtaagaatactctttcatgatatgccacaaaatgggcataccgccgatttcgatcatcggtttcggcttgaacttgctttcttccgaaatgcgcgtgccatagccgctggcaagaattacaactttcatatttttcactcccgtaagcctgcagcggaaccctgcttgcagtcccgcaaaaactgtccgtcccaccagcatttcaaccgccggacagtttggtacacacccagcctattttttattactatgatagtatatcattttcacgtattcagtgcaaccgttccaggaaacttatcacacctagtaggcttgctttttattccgcattttgctctttgttatcacattttaacgccgcttttgttgccgctgtgcaaacaatattctttacgttttttcgtgcgtattttgtccctgccaggcggcccactttacattagtaggcaaaacaggtataatagtttagttaatctgtgatattgcgccattttgccatattgcggatgcaggcggtcttattttatccttgctgcctgtggattttttgcggcatgccgcgcgttgcgcggtaccgctcctattaggtctggaggttgcgctcatggggctgcaaagcctgcaatactgtgcatttttggtggttgtggctgccgtttacctgcatctgccggtgcgcatgcagccggtgtttctgctgggagcttcgtgggtgttttatgcgctggccatgccggccatgctgccggtcaccattgcactggcggtgttcacctacctgtgcggccgcggccttgcctggcggggcggcgcacacaaaaccgcctttttgcgccttggcgtgatcggtatgctgggcattctggccttttttaagtataacggcctgttgggcggggtgctgcacggctggcgcgtggtggccatgccgctgggcatcagctttaccagttttgccgcaatcgcctacctgatcgacgccgcccgcggcgactgcgaggtggaaaccagctttatccggctggcgctgttcctcaacttttttgccaccgtcacccaggggcccatctgccgcgccggtgcgctgctgccgcagttgagcgccgagcaccgctttgatgccgcccgcacggtgcgcgctttgcggctatatgcgctggggctgttcaaatacattgccgtggcggatgtgctgaacatggtggtggatacggttttcccccactatgcggattacagcgcccccatgctgattttgaccgcggtgatgtacactttttatctgtatttcagcttttccggctattccgagatttcccgtgccaccggccttgtgctggggctggacctgccggaaaactttaagaccccgttttacgccaccaacttttccggcttctggagccgctggcacatctcgttttcttcctggctgcaggattatctctttatgccgctggcctgggcagatcttggccgctttggccgcctgcccaccgagctgtgcgtgttctgcgtgttctttgcttccggcttctggcacggcagcaccgcgccattcatcatctggggtctgctgcaggcggtttaccgcgtgggcgaagagctgctgcaccgccgctttggcaaacccaaaaagcgcggcaccccggcccgtgtgctgtggggcaagcgggttgtggtgtttgttttgtggaccatcagcatggtgttcttccgcgtggggtccggcaacctttccggcatggccgaaaacctgggcgttggcgatgctttcgcctacctgggccgctgcctgatgaacagctggtcccccgcccgctttgccggggagctgtacagcacagcgtataccggcttttacgccaataccattatggtagcggcttattgggcgttcgctgcgctggcgctggcgcttggcatctggctggatcaccggcgcaattttgcctgcaaaaacaaaccggctgaggttgccctggcaagcgccaagcaccgcaatgcgctgtatgttgttttgatcgtttttatcctggtggggtacatcatgcagagcggcggctttaatgccaacgcgttcggcccctatgcagggttttaatcttatggaaaaaaggagatttccggcgtgaagcatatcatcaaaaaattggcgctgctgttcgtgccggtctatctgtggtttgccttttttgtggcgtttgagccaaacaattattttggcatcaaaaaaacagcctcttccagccagccggtggcccgtgtgcgcgcctatgagcagagccccggcaccaacctgatcatcggggacagccgcctggcccactttgatatggaccttgtggattccctgaccgggcaaagctggcagaacctggcctttggcggtgcttccctgaaggaatgtgtggaccttgccaactatgtgctggattccggcaaccaggtggaccgcattctgttcgagctttcgttctacaccttaaacagcagctataacaccgaccgtttttcggcgctggaagctaccctgcgcaacccgctggcctactgtctgaacctggaatacaacgtgaacgccctgaccgtgtttatggacaccgtaaagggcacgccggacaccattgaatccggcgactggaccgcggcggattacctggatgatgccgggaacacgattccgctgcacaaaaagctatatgagtacccggcgctgatcaccacccgctgccagaactggacactgaacgaaaccgagctggcggagtttttggctatggcccagcgctgcgcagaccgcggcgtggagctgaccattgtgctgccccccatggccgccaatgtgcgcaccgaggtatgcgatgcctttggcattaccgccgtgatgcaggacgaagttctgccgctgttggaaaagcagaattttgccgtgctgaattacgaatggtgcaccagctgcattaccgatgatgacacccagttttttgacgggttccacctggacgaaaaatacggcctgccggactggacagccgaactgtttgatgatatgcagcgctgatgctgccccaccccaaaaaggaggtcccctgtggcactggactttttgattttgtacgaacacaccgttcgggaatatgagagtgatcttttgctcaaattggagctggagcgccgcggctacaccgtgcgcatccgccagctgctggatgccaaagatctgcgcctgtttggcaaagacaagccggaagttctggttgccagctgcatgtatgacaacgaagccatcaacagccatgtgtacaacaacattggcagatgcaacaagatcgtcaacctgcactgggagcagatgctctccgacacgcaggaggagggcgattggttcaacatgaacggcaacgccaagcgctgcgtgcagacttgctggggccagcgcactgcccagcggttacaggcccatggcatggatgccaagaacacccccgtgaccggcgctgtgatgatggactttctgcggccggagttcaagggctactttaaggataaggaaaccctgtgcaaggaattcggccttgaccccgccaaacagctgcacctgtacatttccagctttggctatgccagcatgaccgaccaggaagtagccgagctttccaaaatggcgggaacggatttttccggctttgcccgcaccaaccgcgtttcgatggaaaaaacgctggcctggtttgaccgctacctgggtgaccacccggaggtggaactggtataccgccgccaccccagcgaatggaaatgcaaagccctggacgagctggccgccaaacgccccaacttccatgtgatttttgcggattccgtcaagcagtggattgtggcggcggattccatctccatctggatgagcaccgctgtggccgaagtatacatggcgggcaaaagctgccatatcctgcgcccggtgcccatcgagcacgagtatgaccccgtcatctacaaggatgctcactatgtgactagctacccggagtttgccgctgccatggcgcagccgaacccgccgttccccattgcacgggatgtgattgagggctattttgacccctcccttgccccggcctacaagcggatggccgacctgctggaggaagtgtacaaaaatcccccgcgggatgaaccgatggggcccggctttacgccgcacttcaacctgctcaagttctgcgcactggcgggggtacacatgctgtaccgccacaagtgggaacccaaacgggtgtttgccttctgcccgccgctggccaactttgcccaacgcatttacggttatgtggacaaagcctatatcccgccggaggagatccagcgcatggaagcgcgcatccggccatatgtaaaataaagttgtttttccggcgcgctgcggtgcgcccgctgcaaatgggagcctgccatgtctgaaccgaaaaaaactgaaagctttgccggaaatgtgatgaaatactccattgccacctaccttggctttggcatttccggcgcagcgcttatcatcaagggcgtcctgcccgccgaaagctacgccgttcctgcttccttcatggcatacaccatgtcgctgatgaacgtgggcatgcttgggctggaccaaagcctgctgcgcttttaccacgaaccgcctgccggttccaccgggcgcagcatgtttgccgcgtgtacccggctttcggtgctggtcatactgctggtgggcggcatcggcagcatctttttcgccaagccgctggcggcggcctttggccttggggccaacggtgccgggctggtgccgtttttgttcctgaacgctgctctgtacatgctggtgcgttacctcaacgtgctgctccggctggaaaacaatgtgcgcgcctacaccaccgaaacactgtggatgcaggcctgcctgaacctgatctacctgctgcccggctttgttacccaggacgcccgcgcttttgtgctgggtgcggtgtgcagctttgcgggggtcgcagtgttctattggcggcgggcttctaaaggtcaaacgaaagaggcccctgtgcgcggcctgcgcccctatgcccacatttaccgggcggcactgccttacggcattgtgttggcacctgcggccatcctgatcccgctgtaccgcgccatctgcctttcttttttaggcaattacgcccccgcggcggagcagggttcgtttgatttcgcctacaccctggcccagcttgtcaccaccattcaggctggtttttccacctactggggcccctatgtctatgcgcattaccgcaccgagcaggagcgcattggccgcatccatgatctgctgaacctgctgatcttcggctttttctgcctgctggtcatgtttgaggatatcatcttcatcatcttcccggccaaatcggcctgcctgccctactttccgctgatgatgctggccgtggtgttctccatcctgtgcgaaggcacggtgtacggcaacaccattgcccgcaagccgttccatgatacgattggaaccgccgtgggcgttgcggccaacattgccgtgtgcgccgtgctggtgccgcgttttggcgtaatgggtgccgcggtcggcctggtagcggccaatgcaacgatgtttttgtaccgcactgtgaccgggcagtattactaccgcaccatccccagcttcagccggacgatctgcggctttttgctggcggtgggtgtggccgtgatcggcgtggtgttcgcccacaattttatcatcaagtttgttttgactgcggcaatcctgtttatttactgtaacatttaccgtgcccagctgtacaagctgtggcagatctctatgggctttgtgcggcggtatctgctgcacagccaagcataactactgcaaaggaaaggttgtatatcaagatgaagcattgcggcacacaagagttgaccaccgagcggctggtcctgcgtcgtatgacaaccgacgactgcgaaatgatgtttggcaactgggccaatgacccggaagtgacccgctacctgcgctgggagccccaccgtgactgggtggtaacgatggcatatctgaacgagatcgtcaaacaatatgaccgcccggatttttatgattggggcatctgcgataaagtgaccggtgtgctgatgggcagcatcagcattgcccccgccgaatcctgtgagcgtgaaaagccctatgcctggaaaaacgtgaaaaccgagctgctgggcggcatgtatgagatcggttacaccttgggcaaaaagtggtggaaccagggttatgccaccgaagccaccgctgccgtgcgcgattactggtttggcatggtaggtgcgccctggctggccgggttccacgccagccagaatgtggcaagcagccgcgtgttggccaagaccggcttccattatgaccacgataccgttctgcaccgctttgacggcaccgaggtgccctgcctggcctggtacctgctgaaccccggcagccagaaatccgatgaaccggcagccgctgcccccgctgtacaggcagaaccaacggaaccagcggagaatgccgatacaaccgtctgacattcactcccctgccccatacttttgctgacctggccgaatacggccagaaaggacccctatggacgaaatgaaggaccccatcaccctggactttaccgctacccaggccccggcagaggacgcccctgttgggcagaaggctctggacagcgagcgcccgccggtgcgcgttgtgctgctggcgctggaccagggcaagtttgacgcccagcgcagcctggatgagcttgccgccctggcggaagccaacggcatgcaggccgttgctaccgtgtgccagaagcgcagcacccccgaagccgccacccttctgggggaaggcaaagtggaggaagcgcgcctggtatgcctgaataccgatgccgaggccgccatctttgacggcgagctgaccggcagccagatccgcaacctgagcgcggctttgcaggtggaagtgctggaccgcacgatgctgattttggaaatcttccgtgcgcgcgccaccaccaacgagggcaagctgcaaactgagctggccaccctgaaataccgcatgccgcgcctgcagggccttggcgaggcgctgagccgccagggcggcggtggcggcggcggtggcggtgcccgccgcggtgccggtgaaaccaagctggagctggaccgccgctacctgcgcagccgcattgaaaagctggaaggccgcctgaaagagctggaaaagcgccgtggtgaaacccgccgcgcccgccagaaaaacggtgttccggtcatctcattggtgggctacaccaacgtgggcaaaagcagcctgaccaacgctttgtgcggcgcagaaatttttgaagccgacatgctgtttgccacgctggatcccaccgcccgcaaatgcacgctgcccagcgggttacaagtgatcctggtggatacagtcggctttgtcagccgcctgccgcatgatttggtggatgcttttaagagcacactggaagaagctgcctgctctgacatcatcttgaaaattgccgacgccagcgacagcgaagccgccgagcagctgagcgtgaccgatgaagtgttgaacgacctgggctgcggggatatcccgcaggtgacggtctacaacaagtgcgaccgcaccggtgttgccccctatgacccggatgtgctgctggtaagcgccaaaaccggctacgggctggacagcctgctggccaagattgacgagattctggcacaccgtgtgcgcaccattgaggtactgttgccctatgacaagctggccctggccgatgtgttccgcacccgcggcagcgttctggctgaagaataccgcgaaaacggcgtgtattacaaggcaaccgtaaaggtggatgacctgcaccggtttgaagcgtacctgctgtaagcgcaaccgttcgctttgtgcaagataacaaatactgattttattgctgattgtagacaaaaagacctccatccctgcacggttctgtgcttgggatggaggtctttggtttatttgtgtgtaccctgcgttacggcaaaattattccgccgtcagcagtttaacagcgcgggaggtacccaggcggtctgcgcccagatccaggaacttttccatgtcctcaacggtggaaatgccgccggctgccttgatcttgcagcggccgcgcacgcagcgggcaaacagctcaatatcatggaaggttgcacctgcggtagaaaagcccgtgctggtcttgatgaagtcggcaccggcttccaccacgatatcgcacatcttttctttttcttcatcggtcagcaggcaggtttcaataataaccttgagcaccttatgccccacggcccgcttgacggcggcgatatcctcgcgcacagcgtcatattccttgttcttcaggcggccgatattgatgaccatatccacttcctcggcgccgttttccacagcggtctttgcttcaaagcacttggaagcagtatccattgcacccagagggaagccgaccacgcagcacaccgcaacacggcccgccatatactgcacagcctgcttgacatagcaggtgttgatgcagacggatgcagtatgatacttgatggcatcatcgcacagggcctgaatctggggccaggtagcctccggtttcaacagggtgtggtcaactttggaaaggatttcctccttggtgtatttcat

SEQ ID NO: 738 - DNA, 8090 bp, unidentified
  source 1..8090: mol_type = unassigned DNA
gatggtctctaagtggtcgatctcttccttgacctggcaggtcagctcggacagcgcctcataagtgcgctttaatttgccgtatttgtcaaaatattttttcgcattttccgtggcggagagggtgggatccagggggatcgtcaccggctcatttgtataataattcacggcggtgagggatctgtcaccgggctttgcactgtaaccgtaggtgttgagcagttcaccgtagatgcggtatttttcccgcttctctgtgtccttcatctgtgccagctggaggtcatatttcttaatatcacgttccagggctgtctgcacgatacggcgcaggtcggaggatttctgacggatcctggttaatgtatttttctccgcataaaaatgctccagcagggcggacatggaagtgtaggattccaaatgatccgctcccgagccatacatcgtcaggggaaccgctgcatattccacggggcgggtgccggtgtaggcaatgcatggagagaaggcttcttccctgatagaagtgaccattttggaaaagattccgtataaagtatggtaatccgtgggtgtcagtgccgctgtaggacgttccccatcaagaccggcctcataacataattcctgtgccagtacgggcgagatgccggtgaagcttccgtagaccgccttgaagaccggctggggtttggcggcaagcatttcacggaacgtattctcgtcgcaggtcagggcatccagcttgtcctgggtgtgtgcaatgaagtagggacgtcccggcaagacttcccggacactgctgacagcggaggagacatgcttgatactgtcgatgatggtattgtcgtcattacagaagatcaggttactgtgtttgcccatcagctccatgaccagtgtcttgtgacgcagatcgcccatctcatccagatgttcaatgtcaatatgcacaatacgttccaaccccggctgggagatgttcacaatacggccgttctgcaagtgtttgcgcagaagcatacagaagttgggggccgccatggggctgggtttattggtttccgtcagatagatcagcgggagagaagcacttgcggataacagcaggcgcttctgcccggtgggctgtttgatcgtcagtaacagttcatcattctccggctgggcgatcttgtacagccttccgccgattagttcttttttcagttcagatattacacaggcaatggtaacgccgtcaaaagccataatttcctcatttccgctctcgtagaagctaaaaaaatagatgcgcggattgcattgcgcaacacacttattgtagcagattttaatcggaaaaggaagtacggtaaaagcagagtgaatattattccattatattgcataaaagcataaaagaagtatgaataagtgcataaatatacatatcaatccaaaaaacatgcataaaaatgaaaaaagtagtagacatttaggaagaaagtggtatcatggaactattcagagtcagatgaatatcggaaaagcgcagcagcgattttgcgaatggggttctgaacagttccaaagcagaattgcgggagcggcttgctgcgaagcaattcgatgacacagaaatgcaatgaaatgagtgtgaggtaaaaaaatgatcagagtaggaatcatcggagcaaccggttatgccggaggagaactggtacgtatcctgttgaatcacaaggatgccaaaatcgtatggtacggttcccgaagctatatagataaaaagtattatcaggtataccagaacatgtttcagctggtggatgatatttgtaaggacgacaatctggaggaactggcgaagcaggtggatgtgatcttcaccgcaaccccccagggattcctggcaggactgttatccgaggaaatcctttcccaggtgaaaattgtggatctgtccgctgattaccgtatcaaggatgtagctacctatgaaaaatggtacggcatcgagcataagtcgccgcagttcatcgaggaagcagtatacggactctgcgagatcaaccgtgacaagatcacggagaagaccagactggtggctaatcccggctgttataccacctgctcgatcctgaccgcttaccctatggtaaaagaaggtatgatcgatgtgaataccctgatcgtggatgccaagtccggaacttccggtgcaggcagaggagccaaagtgccaaacctgttctgcgaagtgaatgagaatatgaaagcctacggtgtggcaagtcacagacatactcccgagatcgaggagcagttaggctatgcgggcaactgtcaggtgaccatcaattttaccccgcacctcgtacccatgaaccgggggatcctggcaaccgaatatgcaacactgaagagaaaaccggacggcacacttcctacatatgaagaggtaaaggctgtctatgataaatattatgcaaacgagaagtttgtccgcgtactggataagggcagctgccccgagaccaagtgggtggaaggcagcaactacgtggacatcaactttgtcattgacgagcgtaccggacgcatcattatgatgggtgcactggacaatctcgtaaaaggcgctgccggtcaggcagtacagaacatgaacctgctgttcggacttcccgagagcgaaggcctggagctggttccctgcttcccttaaagcagacacaggacaaggacgaaaggattacatacatcaatgagcaaacagtttacgatcaaaccaatgaccatagaagattatgacggtctgcacgccctctggatgaccattcacggcttcggcatccggagtatcgatgattccagggaaggtgtggagcgttttatccaccggaatcccggcaccagtgtggtagccgtcggggaggacggaaccgtagtgggcggtatcctatgcggtcatgacggacgacggggctgcctgtatcatgtatgtgtgagagaagattatagaagacttggcataggaaaagccatggtggtccactgcatgaatgccctgaaagaggagcacatcaataaagtcagcctgatcgcttttacccagaacgatatcggtaatgctttctggaaatgcattggctggacaaagcgggaagacctgaactattatgattttactttgaatgaagagaacattacagcgtttaataaatagaaacggaatcgaaaggagagcattccaatatgaaacagatccagggcggtgtgaccgcagcaaaaggctttgaggcagcaggtgtggaggctgccattaaatatcagaatcgtaaggatatggcactgatcgtaagtaaggcaccctgcaccgtggcaggtacgtttacctccaacgtggtaaaggcggctcccgtgctgtgggataagcagatcgtggagcattcctcatttgcacaggcagtggtagtcaattccggaatcgccaatgcctgcaccggcagacaggggctggactgctgtgaggcagaagcaaaatgtgccggagaactgttaggcgtgcccacggatgcggtactggtagcatccaccggtgtcatcggtatgcagattcctgtagataagattactgccggaatcaaaaagctggtgacagctaaggcggacaccttagaggccggttccgatgcggcgcatgccatcatgaccaccgataccatttccaaggagattgccattgagaccgagattggcggcaagaccgtgacattaggcggtatgtgcaagggctccggtatgatccatccgaatatgtgcaccatgttaggctttgtaaccaccgatgtgaacatttccaaagagatgttgcagaagtgcgtcagtgcagacgtagtagattcctttaacatgatctccgtggacggtgatacttccaccaacgatacactgttagtactggcaaatggtatggcaggcaatgaggagatcaccacagagggtgaagattacgacaacttctgcaaggcattgcacgagatcactaccttcctggcaaaaaaaatggcaggagacggcgaaggggcaacggcgctgttcgagaccaaagtgatccatgcagccagcaaggaagatgccagaaccctggcaaaatccgtgatctgttcttccctgaccaaggcagctatcttcggacatgatgccaactggggacgcatcctctgtgcactgggatattccggagctaaattcgatccggaaaatgtagatctgtattttgagagtaagagcggtaagatccatattttcggtaatggcgtggcatgtgattacagcgaggaagaggctacgaagatcctctccgatccagaagtcaccgccctggtggatatgcatatgggggatgcggaagcgactgcatggggctgtgatctaagctatgactatgtgaagatcaatgcagactatcgttcctaagacagtgcgcgacatacggaagaaataagtgatgggcggatcagatatctgcggaaaggcatggacagaacaatggaaaaagatatggaacaggtaatgaaaaaagcagaagtgctgatcgaggcgcttccttacatacagaaattcaaccgaaagatcattgtggtaaaatacggcggcagtgccatgagcaacgaagaactgcagaaaaacgtcattaaggatgtgacgctgttgaagctggtaggcttcaaacccattattgtgcatggcggtggtaaggagatcagccgctgggtcggcaaggtcggcaaagaagcaaagttcatcaatggtctgcgtgtcactgacgaggagaccatggaaatcgcggaaatggtactgaacaaggtgaataagagcctggtgaccatggtggaagagctcggtgtcaaggcggttggtgtcagcggcaaggacggcggactcctccaggtagagaaaaaatattccgacggtcaggacatcggttatgtgggtgagatcaccggtgtaaatcccgatatcctctttgatatgctggagaaggattacctgcccatcatcgctcccatcggactggacaaggattatcatacttacaatatcaatgcggatgatgccgcgtgcgcgatcgcaaaggcagtacatgcggagaagctggcattcctgacagatatcgaaggcctgtacaaggatatcaacgacaagtccacctttatctccagactgacagcctccgaggcagagggactgatccacgacggttacatcggcggtggcatgctgccgaagttaaataactgtacttccgctatccgtaatggtgtaaaccgcgtacatatcctggacggacgtctggcacactgcctgctgctggagatcttcactaatcagggtatcggtaccgcaatcgtatccgatgaggaggaaaaataaaatgagtgacaccatgaaagaatatattgcagaagcggaaaaagatctgctgcatacctataaccggtaccagatcgttctggataagggcgatggtgtgtatctgtatgatatagacggtaaaaaatatctggattttgtagcgggtatagccgtatttgcactgggatatcagaacaaagcatacaacgatgcactgaaagcacagatcgacaaggtgatccacacttccaactattattataatgtgcccgccatcgaagcagcacgaaagatcaaaaaagtatccggcatggatcgggtctttttcaccaattccggtgcggaagcggtggagggcgccatcaaggcagccagaaaatacgcctatctgaaagacggctgtacagatcacgagatcattgccatgaaccattctttccacggcagaaccatgggtgctctgtccgtgacgggcaatcctaagtaccgtgaggcattccagcctatgatcggtcatattaaattcgccgatctgaataattttcagagtgtgctggatcaggtgacggacaagacctgcgctatcattatggagaccgtgcagggcgagggtggactgtatcccgcaacggaagaatttttgaagcaggtacgggatctgtgcgacgagagggatatcctgctgatcttagatgagatccagtgtggtatgggccgtaccggttacatgtatgcatggcagcgttttggcgtgaaaccggatatcatgacctctgccaaggcactgggctgcggtgtgccggtaggtgcttttatgatgacggaaaaggttgcacagcattctctgactgcaggagatcacggaaccacctacggtggcaacccattggcctgcaccgctgtggaaaaagtgcttgatttattcgaagaggaccatataatagaacatgtgagagaggtagctccttatctggaacagcgtctgaatgagctggctgaaaagtacgactgtattcaggaacgtcgtggtgtgggcctgatgcagggtctggtatttgatcatccggtgggagatatcattaacagagcattggagaagggattgatcctgatcaatgccggtgcggatattattcgttttgtacctcctctcgtcattaccagagaaaacgtggacgaaatgatcgctattttggacacctgtatcgaataagaggtttaaggtaattatgtttttgaaaaaaagaatgattgctacagcagctgtgatcgccatggctgctgcagctgtttacggaagtacgcaggaaatgagccagacgcaggataccggagaacgtctgcagctgtttcgggcgaaagagaccatttactgctggtattcggatgaagctctgtccggctatatcaacgcggcagcagtgtctttcggagaacagaacaaggtccgtgtgatcccggtgctgacttccgacagtgaatatctggaagcggtcaatcaggagacactgcattccgctcagataccggatatctatctgttaagcagtgactccctggagaaggcatatctggcgggtctggcgacaaaggtgccggatacggagggaatctgcgatacggatcatttttcacaggcagcactggcagcggtgacctatgacgataaaatcattggttatccagtgtattttgataccagtgcactggtatacaatgaagattatctccgcacctgggcgacacaacaggcggaaaaagagctgtccggtagcagtgacaatgacgaaccggtaggagaaggtgaggagatcatcgaggaagattctcttccggaggatcagaccacagatcaggttaccgcggacgaagcagcggtaaacgcgctggcggaacagtatttcgccaaggcacttccctctacggtggacgatctgttgaacattgcggatacattcgatgcaccggagggcgtcgaaggcgtcatgaaatgggatgtgaacaatatcttttacaactactggatcgtgggtaattacatgatcgtaggcggcgatcccggtgatgacagaaatgatatcaacatcaacaatccggagaccatacagtgtctggaagtatacaaggcgctgaaccagttcttcttcattgagtcagataccgtgacctatgattccgtgatccaggacttcattgatggcaagaccatgttcaccatcggaacgacggatgtggtaaagcggctggaggatgcaaaagcggacggcagtcttacatttaactacggaattgcccgtatgccggatgtcagtgccgagcttcagagcagatctttgtctgttaccggagcggcggtgatcaatggttattcggagcataaggagcttgcggatcgttttgcagcttatctgtcggaagaatatgcggatggactgtatgagcgttccggtaaaatgcctgcaagcattcatgcggcggagaatgcggataatggagcacttacgatttttgccgatgagtatgcggacagcgtatcgcttccgaaaatgctggagacagggaatttctggatgcagctggaagtactgttttccaaggtgtggaacggcgaggatgtgacgacactggtgcagcagctggcggacaatatgtcgcagcaattaggaaatacagagaattga

SEQ ID NO: 739 - DNA, 27962 bp, unidentified
  source 1..27962: mol_type = unassigned DNA
tacgccgatcagcttgacgtcgatctcgtcgccctctttcagacccgtctcctccatggtctcgaagcgcttgtagtcgatctccgagatgtggagcagggcgtccttgcccggcatgatctcgacgaacgcgccgaaggcgacgatcgagcggactttgccgtggtacgtctcgcccacttcggggatggctacgatggccttgatgcgggccagcgctccgtcgagggcctccttgtcgatgccgaagatgtccacgatgcccttgttgtccacctccgtgatggtgatggtggtgttggtggtcttctggatgtcctggatcacctttccgcccgggccgataaccggaccgatcatatcctgcggaatgacgatctgcacgatgcgcggcacgcagggcttgtagtcctcgcgcggctcggcgatgcactcggtgagtttgccgaggatgtgcatgcggcctttgcgtgcctgctccagcgcggcggccagcacctcgtaggagagtccgtcgaccttgatgtccatctgcgtggcggtgatgccgtctttggttcccgtcaccttgaagtccatgtcgcccaggtggtcctcatcgcccaggatgtccgacagcacggcccatttgccggtttcggaatcggagatcagccccatggcgatacccgacacgggtttgcggagcttcacgccggcgtccatcagcgcgagggttccggcgcagaccgtggccatcgacgacgagccgttcgactcgaggatgtccgacacgacgcgcacggcgtaggggttgtcctcgcccagcggaatcatcggcttcagggcgcgccatgccaggtggccgtggccgatttcgcggcgcgagaggccgcgggcggccttggcctcgcccgtcgagaagggcgggaagttatagtggagcacgaactgctcggtaccctgcacgagcacctcgtccttgaccttttcgtcgagtttcgtgccgagcgtaacggtcgtcagcgactgcgtttcgccgcgggtgaagatcgccgagccgtgggctgcgggcaggtagcccacctcgcaccagatcggacggatctcgtcggtcttgcggccgtcgagacggacgccttcgtcgaggatcatgttgcgcatggccttcttctgcacgtcgtcgtggaaatatttgtggatcagcggcgccttctcgatcagctcctcttccgaatagcgggctgcgaactcggcttcgagcgcgttgaacttgtcttcgcgctcgtgcttcatcgtgccgctcgtggcgatggcgtaggccttgtcgtaaagctctctgatgatcgtctggcgcagttcttcgtcgttgacctcgtggcagtaggtgcgtttcacgtccttgcccaactccttcgacagctcgatctgtacggcgcagtgcttcttgatctcctcgtgcgcgaacttgatggcgccgagcatcacctcttccgaaacctccttcatctcgccctcgaccatcaggatgttgtcgatcgtaccgccgaccatgatgtccaggtcgcattcgggcatctccgaataggtggggttgatggcgtattcgccgttgcggcgtacgacgcggacctccgagatggggccgccgaagggaatgtccgatacggccagcgccgccgaggcggccagaccggccagcgcgtcgggctgaatatccttgtccgccgagatgaggttgaccgtcacgtagacttcggcgtggtaatccgcggggaacaggggccggagggcgcggtcgatcaggcgggcgacgagcacctcgctgtcgttggcgcgcgcttcgcgcttcatgaaaccgccggggaagcggcctacggcggcgtacttctccttgtattcgacctggaggggcatgaaatcggtgtcgggttttgcatcctttgcggccacgacggttccgagcagcatcgtgtcgcccatcttgacgacgaccgagccgtcggcctgcttggccagtttgcccgtctcgatctcgatctggcgaccgtcggccagcgtgatgatcttgcggactgcgttgtacagcttcttttcttccataaaaattttaaacctataatgttttcgaattgtttttcgcaacgaaaatgaaggcaacccctctcgggaattgcctccatttcttcctcgggactacttgcggagattcagcgtcttcacgattgcgcggtagcgctcgatgtcgacctccttcaggtattccagcaacgcgcggcgcttgccgaccaggcgcagcagtgcgcgctgggttccgaagtcgtgcttgttgcttttgaggtgttccgtaaggtggctgatacggtaggaaaacaacgcgatctgactttcgggcgaacccgtgtcggtgttagacttgccgtactggccgaaaagctcctgctttttctcagctgttaaataagccattgtgtaaatttattttacgttccactctacgacgcatcccccttaccgtggataacgccagagcgttccgcaaaggtacgaaataattcataattcataattcataattcacaattattttcaatttggcgtctaaaaataacaaattaatcgagaaaatcgtatttttgcggctaaacaagtgaaaattatggggaaaacgggtgtgcgcggaactttcgccgcgcttgtcgccgcggtgttgtgcggctgcgggagcgagccggatttcgtcaccgtcgacgggacgatgctcggcacgacgctgcatgtggtggccgacgtgaagggcgtctcgcggcagcgtctctatgcggccgtcatggagctggaccgcgaggccaaggcgtcgatgtcgatttacgattcgacgtcgcttgtgagccgtctgaaccgcaacgagaccgacagcgtcgaccgtcatatcgccttcaacctgcatctggccgacagcatcggcgcgttgagcgacgggcgttacgacgtgaccgtcaagccgctggtcgaggcgtggggcttcgccggccgggagcgcgtcgaaaacccgaacgtcgattcgatcctcgaattcgtgggccgcgaaaaggtccgtgtcgagggagggcggctggtgaaggacgatccgcgcgtgcagctggacttcaactccgtggcgaaaggctatacggtcgatctgctggccggactggtcgagaaatacggggctgaaaactacatcgtcgacatcggcggcgaggtccgctgccggggactcaaccggcagggccgggcgtggcgcatcggcgtcgaaacgcctttcgacggcaacatgtcggacggtgaatacctccagaaacggattcagatgaccggcggcgggctggccacctcgggcaactaccgccgtttctacctcgacggggagggcaacaaggtcgcccacaccatcgacccccgcacggggcgcagcgccctgtcgcgcctgctgtcggtgaccgtcgcggctccgacctgcgccgaggccgacgcgctggggaccatgtttctggcgatgggcgccgacgatgcgctggcggccgtggaacggatgcccggcgtgaaggcgtacttcatcctggcgggtgacggcggagagtacgaggagtacgtctcgccggccatggaagcgttgattctgaaatagcgagataaatgaaaacagcggtattcctctacaatcccgaatcgggcaagggcaaaatcgcccgcaacgtcgggtgcatcagtacgatttttcaggcctacggctacgacgtcacgccgcagcggatcgactttacggccaatccgttcgacggcaacgagaccatcgacctgatggtcgtcgccggcggcgacggcacggtgaactatgcggtcaacgccatgaaacgcaaggggctggacattcccatcggcgtgattccggccggtacggccaatgatttcgccggggcggtcggcatgtcgcgcgagccgctcgaagcggcgcggcagatcgcttcgggggctgtggaccgggtcgacgtaggccgggtgaacgacctgtatttcgtcaatatcttttcgttcggaatcttcacgaccacctcgcagcgcacgcccgacgaacgcaagcacaagatcggcaagctggcctatatcatcgagggggtcaaggagttccgcacgatgcacgccgtgccgctggagatcgaggccgacggcgagcggttcgacctgcggtcgctgatggtgctgatcttcaacggcgagacggcgggcggtttccacctggcgcggcggtcgtcgatcaaggacgggctgttcgactgcatcctgctggagaagaagaatttctttcgttcgacgctggccatgtgccgctatctggcgggcggcagcccgaagatcgtccgccacctccgggcgcggcggatcgacatccgttcgtcggtcaacgaacccacggacgtcgacgggcagaagggcgccgaattcccgctgcacatcgagtgtctggcgggcggcctgcgcgtgatgtgcgccaaacaggcctcgggcaatttctgatttttacggtccggcttgtttgattctgcgaaaattcatacttttgtcggaaaaattacgacgatatggcggataacggcaaaacggcgcgcagcggaggacgcgaaagtttgcgcaaggtctccatctcccggatcaagaaggagatgagtgacgtcttttacctttcggacgatctggtgatttccgcactcacggccgacaagaatactacggccgattatccgacctcgatcgacggctttacggccatcattatgatgacgggcgaggccaccgtgtcgatcgacatgcagaattacagcatcaagcccaacacgatcgtctttttcaaccccgattcgatcatccgcacaatcaagtgttcgtcgaacgccgcggcctacctgctggccttctcgaaatcgttcgtcaacgagatccagatcgacctctcgacctcgctgccggtctacatgcgcttcggcaaggcccccgtgctggaggtcacgccgcaggacgtggacgaaatccgccagttgttccagctcatcaagaccatgctgcgcagcgacaaggagcgttaccgccacgagatcatccgcacgctcttcaccacggcgttctacatcatcaccgagatcaaccagcgcgagcagcccggcgagatgaagcaggggcgctgcgaggtgctgttcgacgagttcatgtcgctgctgcaacagtacaacaagagggagcgcaacgtgagcttctacgccaagcagctcaatatcacgcccaaatacctctcgtccgtggtgaaggaggtgagcggcaagaccgccgcgcggtggatcgacgagtcggtgatcctcgaagccaaggccctgctcaagtattccggaatgagcattcaggagatcgcctaccacctcaatttctcgacgcagtccttcttcggcaagtatttcaaacagcacaccggaacctcgccctcgcgttacaagcggaaaggatagttttcgattttacagggcctcttccgtcctgccttgtccggcccgaacggaaaatacgtttgtatgtcccgtccgggtcgaactgtgtcaggataaaatccgctcctctaaaatcaaaaaaccgaaccttgtttttcaggtggcggctcgcgggtgtccgctatgacacgccgctatttcagcgcttcgaccacgcggccgatcatcgccgggatggcgtgctcctcctgcgcggtgaagaaattgccgtcgatttcgaacggggcgtccgtcgccacggggcccgtcacggcggccttggccatcgggtgcacggcgacgcgccgtccggcggcgacgcctgcgaatccgaacatcatccctgcggcgcagtggccgatcatcggtttgcccgtctccccgaaggttttcagcacctccatcaggtccctgttccaaggctcgccggcatgctgcgcgaagaccggcacggcgtcgccgcaggcgaacaccagagcgtcgtactcctcttcgtgacccttgaggttggcgatcacgtcgtcggccgtcaggccgatgcccgagttggtgcggatctcgcggctttcggccacggcgaacacggtgcagggaatcttgttttcgaaaaacgtttccagatactggaacaggcccatcccgttcacgggattcacggccacgacagctgctttttttgccatgattgcaattcgtttagtgatacaatggttattttcggtaagtttgttatctttgcgtacaaagatagggcaaacagcccgtaaaaacaataacgcacttaaaaatgagatggttacatacgtgtaaccattgctggataccaaacggatggagccggagaaaaaattgaaaaatttcacgcccacgggttcctgcccggtccgggacgtgctgtgccgcctgggggacaagtggtcgatgttggtgttgctgacgttgaatgccaacggcgtgatgcgtttcagcgagatccaccgcacgctgggcgacatttcgcaccgcatgctgaccgtcacgctgcggatgctcgaaaccgacggaatgatccgccgcgaagtctacgccgaggttccgccgcgggtggaataccgtcttacggagcggggcgggagtcttctgccgcatattttcggactggtggaatgggccgaggcgaacaaggaggctattctggacggccgcaggaggtcttgaacgacatccgccgggcgtccgtgccgtcggggtagtagccgcgtagcagttttccggggcggaagccgttgcgggcgtaaagccttatggcagagtcgttgtcggtgcgcacttcgagcgtcacttcacgcagcccgagccgccgggccagcgcgatagcggcgtccagcaacgcctgtccggctccgcagccgcgcgccgcggggtccaccgccacggagtagatgcggaggttttgcgccgtgcgccgcatcagcaacgaaatgtagccgacgaccgcaccgtcgcgggtggcggcgtaggacgctccctgcgcatgcgtcagcaggtagcgcagctgccgccgcgtgaaggcctccccttccgggaatgaacgccgctcgacgcactccacggcgtcgaggtccccggccgtcgcgggacgtattccgactgcggggttcattgcgcgtggaggcggttgaggcagtggacgaagtggttgaggatgcggtagtaaagttcgtcgcccagcacggcgtcctcgacttcgtggtcgatcgacgggttgtcgttgatctcgatcaccacggccctgccgttgatgagtttcaggtccacgccgtacaatcccttgccgatcagcgccgcggcctttacggcggtgtcgagcactttctgcggcgccttgtagatgggtacggtctcccatgcgccgcacaggttgcggcctgtgtcgtcgtgggcgtggttgtagatctgccagtggcccttggccatgtagtatttgcaggcgaacaacggttcgccgtccaggaggccgatccgccagtcgaactccgtggggatgaactcctgggccagcagcacggacgagtggcggaacatctcgtcgagcgccgcgcgcagctcttcgtcgctggccaccttgtgcatgcccaccgagaacgatccgtcgggaatcttgaggatgaagggcgcgccgaggcgttcgctgatctcgccgaaggagtattcgttgctgcggaacagcagctgcgaggccggggccgggatgcgggccttttcgaaaagctcgcagaggtagaccttgttcgtgcagcggatgatcgactcgggatcgtcgatcacggcgatgtcgttcatcgcggcacgctgcgcgaggcggaaagtgtagtggttgagcgctgtggtggcgcggatgaacagcgcgtcgaactccatcagccgcgtggcttcctcctcggtgatcagctccgcgtggatgttcattttccgggccacttcgaggaacttgttgagggcgtccttgtcgctgggcgggaatttttcgtccgggtcgtagaggatggcgaggttgtagcgtgcgggcttggccgagcgcggcgagcgccataccttcttgttgaagcagtcgagcgcattggcgaaatcgtcctgcccgctctccgagagctggcgcagcgaaagggcctgcaccgactcgatctggttgcgggcgtggttattcatcgtcacgcgcaggatcgggcaggggtagtggtcgaagatgaaccgcgcgatcttctccagacccttctcgcggcaggttccgaagtagatgttcagctgccaggtttcgtcggtgatgcggttgcgttcgatccactgttggcagagctgttgcaggttgcggttcatgcggattccggcgcccgattcgagcttgttgagcgtctcgacgcccggcagcacccggtgtccccgggcctgggccagcagcgagcaatagtagccttcggagttgtagccgtattcgtcgctcaagttgatgaccagcttgggcgtccgctccccgtaacggtgttcgaggtagtcggtgacggtcatcagcgaatcggtttcgcagtagggtttccagtcgttgaggctgttcagcaggatgaagacgctattcatgcatgtgtgttttcgatgcgccaaatgtaagcaaataaagcatccgttgtacatgccgcgcgccgttttgcgaaataaaaaaacgggcctccgcagagacccgttttccggttgtccgtcggggcgtcaggcccgttttttcgccgccttggcagccaccgccttgtccagctcgatgatgaagtccgagaggacgttcatgtagttgatgaaggcgtcgtaggccgaatcgtaggggttgaagtaggagtgcacgtcgccgtccgacagccacttggtggccatgtagtagaaatggtcggaggtctgcatgaaactccagacataatcgaaatcgggatttttcagcgccgcgaccttctccttctgggcatagagcttcgagaaagcctcgttctgcaattcgttgcccagccaggccgtcacgtcgcgctcctcgtcggcccacgacatcacgtgcggacagtggagcacggcgacgggctggtgcttcttcgcggcctcggtcaccgtggcgaactccaggccgttcttcctggcgaggatcgccttgggcagcgcgcgcatgaattcgaagatgcccgtgtcggcgttctgatgctcgccgaaggtctcgtaatccatgaacaggttgatgacctcgcccggcgtctcgtccgaggcgagccactgcacatacttgtcggctgtcaggggccactggtcccagctcttgttcgagaagcggaaagcgatgtcgtccgagagtttgtagttgcgcagcagcaggcgcagtttctggtcgatggcgttggcgtagacgtagttgggcgatttccaccccagcacgtgcttggctccttcggccagcatcgtgcggaagcccatgccggcgaccatcgcgccgatctcgtccgaatagatcagctccgtgttgcggaaagcggtgggtttcaccccgaactcctttttgataaggttcgtgtgcagtttgacctgctccgtgaaatcctccttcgatgccagcgatgccagcgagtgggagtaggtctcggcgaggaactccacgcagcccgtcgcggcaagctccttgaacgagtcgagcacttcgggggcgaaggcgcggaactgttcgatggcgatgcccgtgatcgagaacgaacagcggaacttgcccttgttctccctgatgagcttgagcagcagggcgttcatcggcaggtagcactggcgggcgaccttctgcatgatcgaacggttcatgaggtcgtccaggtagttgtggtccttgcccatgttgaagaagcggtatttcttcagacgccagggctgatgcacctgaaaataaagacagacggttttcatgcgggttgctattttaattgtttcttattctcttcgatcacggcttcgtacaccgatttgatcttcgccgcggcgtcgttccacttgaggttggtcacctcttcgagacccttcgaggcgaacatgcccgacagggcggggtatttgatcagtccgtagatggcgtcggccagggcgtccacgtcccagtagtccaccttcacggcgtagtccagcacttcggccacgccgctctgcttggagatgatcaccgggacgttcgagcgcatcgcctccagcggcgagatgccgaaaggctccgagacggagggcatcacgtagacgtccgacagctggaacatcttgtgcacgtcctccccgcggaggaaccccgtgaagtggaaacggtcggcgatgccgagccgcgccacgcggcggatgacgtggttcatcatgtcgcccgagccggccatcacgaaccgcacgtcgggaacccgcttgaggaccttggcggccgcctcgacgaagtagtcggggcctttctggtaggtgatgcgtcccaggaaggtcacgaccttgtcggtgacgccccgctcgggaaccttgccgctgttctgggcgaagcgcacggcgttgtgcaccgtgacgatcttttcggcgggaacgccgtagcggttgatgacgatgttgcgcgtgaggttcgaaacggcgatcacgcggtcggcggcgtgcatgccggcccgctcgatggcgtagacctgcgtgttgacgttctcgcccgagcggtcgtactccgtggcgtgcatgtgcaccaccagcggcttcccggagacgcgtttggcggcgatgcccgcgtagtaggtgagccagtcgtgggcgtggatcacgtcgaactgtccttcgaggtccctggccacctgcgcggcgaccacggcgtagcgcgccacctcctccatgaggttggcgccgtacttgcccgagaaggtgtagcgctgtttccaggcatcggtcgtcgaccaggtcttccgccccgacttgacgtactgctcgtggtaggactcgtactcctcgggggagatataggggaccatgttcgagtcgatgtggatgaacgacatcttctccagaatgtcgtccgcgccgctgcccgtcgaaccgtacaaggcctccacgtcgctggcgttcacgacgtgcgtgaaacgctggtcctcgtcgccgtaggcgtgcgggacgatgaaagtgacgtctacgccgttgcgcgccagtccgcgggtcattccgtagcaggccgttcccagcccgcctgcaatgtggggcggaaactcccatccgaacattaaaactctcataccttatctttttgttgtttcattttgccgcctgtgcgcttcctctccgcatcccttcacggcgcccggccgtgtccgtaagtcagattccgcttcgaacccctcccctcggaaggagcctcgccatccggcacaactctctttcacattgtgcgcccgggccgtattcgttatttcgttttttccgtcgttttcttcttcgttgtctttttggcggccgtcctcttcgcggcggcctttgccgcgggtttcacggccttcgcggccttcgcggcaaccttctccttaccaacgttttttgcggccttcgcagtcttcggattcgctttttttgtgggtttttccgactttccgggcgtctctttcggtttgcgtgcgaggatcatgccgtagatgtccagcacggccgcgacgctccacgcctgcgaaatggctccgcgcggcgcgaacggaggatcggcgtcgaacagttcgccgatcgaaccgatgccgtaggtctggatgtcctcctcgaatccggcgagaatctcctcggcctgcggcagaaaggcgtcgccgtcgatgtcgaagcaggcgctgacgtagaacgacagcagccacggccataccgacccgttcttgcccgcgaagtcgcgttcggcgggcgtaccctcctgcgaacccttgtaaagcgggttgcggggcgagagcgagcgcaggcccttcggcgtgaggaggtgctgccgcactgtgcggatcacctccagctgggtctgctcgtcgagcatcttgtagggcagcccgcaggcgacgatcatgttcgggcggatgtccgtgttggcgccgtcgcagcccacgcagtcggccaggtagcctttgggcaggcggaagagttcgttgaacgacgccgcggtgcgttcgggcagtttctcccacgccttcacgaacttcgtgtcgcccgcctcgccggccagccggagagcgtagcggacggcgttgtaccacaaggcgttgacctccacctgatagccgttgcgcggggtgacggaacggccgtcgatcacggagttcatccacgtgaggggaacctcgtcggacgaggcccacaccagcccgttgtcgttgagcgcgacacggcccgcgacgccccgtttgtacgactcgagcacctgcttcatggcctcgccgtagtgtttccagatctttttcgcgccgatctgcgcttcgagccgctgaagggtccagaagaaccacagcggggcgtccgcggccgctgccgccgaagcgttcccggcgaacatgccgtcctgcatgccgcgcacctgcgtgtcgagggcgtcgatgcagtcctccttgtggttctgccacagggtgatgcccggcagcgagacgaaggtctggcggcccgaaaccccgtgccacggatagcccgagaccacctccgtccggttgcccgggcggcggatcacgaactgccgcgccgagtgttcgaggcagctgatgaagtcgatcttgtgcgtgcggcgcgcgatggagccgccgaagacctcctcgatggttttcgtcgagcccatttcgtcgagcgacgccgagaagatgatgctctcgcccttcttcagctcggtttcgaaatagcccgtggtcatcaggtcctcgtagccgtcgtagccgcgggcgatgtcctgccggtattcgaaattgtagtaccagtcgggcgcgggcacgaactccgcgccgggtttgctggtctggagatacagccacggaaacgaaccgtagaggcggcatttcacgccgttgacggccggataggagtgcccgtcggcctccatgttggcatgcgtcagcgcatgcttgtcgcggaaggcgaggaacgggcgcagccggaggcgcgtttccgaatgggcgtcgacgagcgtgtagcggatcatcagttgcgtgcgcttgtgaatccagagcatctccttcttgaggatcacgccgcctacgcgataggtgatcgttggggtcggagtgtactcgaaatcggtgatgtacttgtggccgcgcggctcgtaggtcccctggaaacggtgcagcgccaggttgaacgtctggtcgtgctggatgatcgtttcgtcgagcgccgacaacaggacgtaggtccggtcgctgtcgtcgatcggggccaccatcaggccgtggtaacggcgggtgttgcagcagacgatggtcgtgctcatatagccgccgatacggtccgttgcgagcatttcgcgctggagcgagtactccagattgcccaattcgcttttgtcgaaagtaagtgctgacatatcgctaaaaaatacggttcgtccttcaaagatattgaaattttcgaacagttacaacttgttattgttaattattcaaatttaataccttctattggcattaggcccacttcaccagcgcgaagtccatgcggtggggcaggagcgggttcgaggggtagatgcgcagcgccacgtcgaacgtgccggcttcgtcgggcgtgtagtcgagcgagtaggtgacccggcttccgtcggccttcgtgcgttccagctggatcgtgcgggtgacgttgacggactgtccgccgacgatctgccgcgcgacgaccatctccacgccgatgtcctcgggccggaggttggcgatgtcgagcgtcacggcgaactggtacttctcgccgacgcagacggcctccttgtcgatcttcacgcgctgcacgtcgacgatgcgcacctggtcccatgcggcggagaccttgcgcttccaggccgcgatctcgcgggccatgcggtaggcctcggcgctcatctcgcgtttgcgcgcggcgagcttgtcgtagaaccggttctcgtagtcggtcagcatgcggttggtcgtgaagttcgaggcgatgtccgccacgcacctcttcaccgacgaaacccactcgtgcgggatgccgtccgtgtcgcgggcgtagtatttcggggcgatctgctcctcgatggtgttgtagatcatctcggcgtcgagttcgtcctggtagtgctggtcggcgaaggtgcgctccatcggaagcatccatccggcgccctccttgtagccctcgacccaccagccgtcgagcacggagaattgcagcacgccgttcatcacgcacttctcgcccgaggtgcccgaggcttcgagcggccgcgtgggcgtgttcagccatacgtcgacaccctgcaccatgcggcgggcgagttccatgtcgtagttttgcaggaagaggatcttgcccacgaactgcggcatggcggccacctcgacgatgcgccggatcaggtcctgtcccggcttgtcgttggggtgcgccttgcccgcgaagatgaactgcacgggacgctccttgttgttgacgatcgccgccagacggtcgaggttcgtgaacagcaggtaggcgcgcttgtaggtggcgaagcggcgtgcgaaaccgatggtcagcacgtcgggcttgatgccctcgatgacctgaagcatctggcgcggcgagtcgaggcgcacctgccgggggtcgctgtaacgccggcggatatgcttgatgagcttgttcttgagcttcatgcgctcctcccacagctccgcgtcggggatgtcgtgaaccttctgccaggccgggatgtcgtagacatggccttcgaatccgtcgccgaagtaacgggcgtagaggcggcgcagcgacgaggcgatccacgtcgggaagtgcacgccgttggtgacgtagccgatgtgcagctcgttcttgaagtagcccggccacatgttgcccaggatctccttcgagacctcgccgtggagccacgaaacgccgttgacctcctgcgagaggttgcaggccagcaccgacatcgagaacttctcgttggggtcgttgggattggtcttgcccaggttgatatactgctcccaggtgatgcccagcacgtcgggatagtgcgacatgtattggcggatcatcgactcggggaatgcgtcgtggcctgcgggcacgggggtgtgcgtcgtgaagagcgacgacgagcgcaccacctccagcgcctcggagaacgagagcttgcggtggttcaccaggtcgcggatgcgctcgacgccgatgaatgcggcgtggccctcgttgcagtggaacacgtcgtgcttgatgcccagctgacgcagcgcgcggatgccgccgatgcccagtaggatctcctgcttgagacggttctcccaatcgcctccgtagaggtagtgggtgatctggcggtcctcttcgaggttgtcctcgatgtcggcatcgagcaggtagaggtccgtgcggcccacctggcacttccagacgcgcgccgagagcgtgcggcccgggaaggcgatggtgaccgtcacccagcctccggcctcgtcgcgcacgggcgagatcggcagtttgtagaaattctgcgcctcataggtggcctcctgcgcaccctgcgccgaaaggcgttgggtgaagtagccgtagcggtagagaaggcccacggcggccatcggaacgttcttgtccgaagcctccttcaggtagtcgccggccaggatgcccaggccgcccgagtagatcttcagcgacgagtgcaggccgtattccatcgagaagtacgaaaccgtcgtcgccttcgggtcgggcttctcgttcatgtagtcgcggaactgcgtgtgcacggcgtcgagctgcgccaggaagttcgtgtctttctccagttccttcatccgctcgacgctcatcttgtcgaggaaggcgatcgggttgcggtccgattcggcccacagcgcggggtcgatgccttcgaacaggtcgcgggcgccggggttccagcaccaccagaggttgcgcgaaagctcttcgagggcgtgcagccgcttgggcagcgtcttgtcgaccatcatgcggttccagacgggtttctcgacgaaaagctgctggcgcacgaagttgatctgctcggttttcgtaccgccgtcgagcacggcgcggttggtgcggacgatcgaactctcgaccgcctcggagtaggcctgttcgtaggccgcgaagaggtgctcccagagcgccgtcagcgagatttcataggccgaggtgtgctgttcgttgacgtgtttttcgtccagcaggctgaaacgcagcagcgtatcggcgatcttcgcctcgacctccttgtcgttgtagtcgtcgcggcggatgacctccacgccggcgtgctcgcgctgcttgtcgacccagatgccgaacccggccagcgtcgtggtgaccgtcgggatggagaaggccaccgactccagcggggtgtagccccacggctcgtagtaggaggggaaaaccgtgatgtccatgcccacgagcagttcgtagtaatccttgtggaagatgccgtcggccttgttgaggtacgtggggacgaagatcaccttcaccttcgatccgggatcggtgaggttgctgttcttcagcgcgttcacgatggggtcccacgtcgcgttttcaaggtagtgggtcgaatgtctgtactggcctgcgtcgatgggcttcgacgggtcggccagatgagcctgcaaatcgaggcgcgggccgcggttgccggccggcacggtgatgtaggccagcacctcgcgccggagacggtccgaggcggcgagctgcttgagcgactcgatgaagacgtcgatgcccttgttgcggaattcgtagcggccgctggttccgacgatcagcgggtcgcccgtgaatttttcgcccaggcaggcctcggccaccgagatcatcgcccggcgggcttcgtcgcgtttggcgtagtactcctcgccggcccatacgaagtcgttctcgaagccgttgggcgtcacgccgtccggttcgcgccccagcaggtatttgcattcgttggccgtgatgtcgctcaccgtcaggaatgcgtcgtggtaggcggcggccatcttctcgatcgagtgtttggccgtgacgttgaactggcgcgccagctcgtcggcgttgaatttcgggaggtcgttgtagagcggcaggcggttgccggcgatgcagcggcccatgaccgtggcgtgggtggtgaacaccgtggcgatgtagggggcgtgtttgcgcaggtacagcccgcccgcggcggtcatccactcgtggaaatgcgcgacagccttctcggtcggcgtgccgaaggtctcgacgtaggaggcgatcacgacgcctgcggcccatccgaacagcaccggctcgatgtagtcccactggcccgagatcgagtccacgtggtacaattcccagaggcttttgagtatttcgtccttgcgggggatcagcgacgagaaatcgaccagcaccaccgtcggctcgcccttgattttccagcggccgacgcggacgcggatgccttcgttgtagaggctctggcgccaggccttcagcagattggggtcctcctcgaactccgggttgacgccctcgtgcgagaggtcgggacccagcaggacgtagcggtctgcgaatttgggggtgacggtctgcgctttggtcgaaatgacggtgtggatgccgccgaccttgttgcatacttcccaacttacttcgaacagcaaatcgggggagtgtttggcattgctcatatacttatgctaatttgtaattttcgtgacgaaccgaagaagaattcggccgcaaaggtaacacttatatttatattaaacaatcgggagtggatgtttataaaaatatttaataataacttaacatttcagtttcacttggttgcggtgtccggttccgtttcgaaaaacgtttcgatcaccgcgtcggagaccagcatccgagccggcgggacggccatccgtcccgctgcgagaacgagcgtgcggctcttcagccacggttccgcatcgcgcaggacccgtgccgcgcgctccttgccgaacagtctttccgcctcccgcaggtcgatgccttcggccgtgcgcagccgggtcatcacgtattcgttgaagcggtcgcggtcggtgagggtttccgcttcggcgggcgcgccgccgatgtactccgtcaccgaggcgacgttccaatggcgttcccggccgtcgaacgaatgggctgcgggaccgatgccgaggtacttcacgccgtgccagtaggccgcgttgtggcgggcgcggaagcccggcagggcgaaattcgaaacctcgtagtgctcgaaccccgctccggtcagcgtttcgtgcacgagggcgtattccgtttcgctggtggcttcgtccaccggggcgaactgtccgcgggcggcccgccgtccgaaggccgtaccgggttcgacggtcaaatggtatgccgaaatgtgctgcacgcccagcgcgagggcgctgtcgagcgagcggcgcagcgtgtcgttcccgaaacccgggacgccgaaaatcaggtcgacggtgatgttttcataaccttcgtgctgtgcgctccgcacggcctcgacggcttgcgcagcgttgtggcggcggttcatcagcttgagacacgcgtcgtcgaacgactggatgccgaccgacaggcggttgacgcccgcgcggcgcagcacggcgaggtaggcgggggtgaggtcgtcgggattggcttcgagcgtggtctcctccgccgcagtgcaatcgaacagcgtcgcggcatggtccagcagccccgcgacggcctccggggcgcacagcgagggggtgccgccgccgaagtagcgggtgcgcaccggctcgccgcccagatattcccgccgggcgtccagttcgcggtgcatggactccagaagagggtccatgcggcgcaggtcgacgcttttgtagaagtcgcagtaggcgcagacgcgcttgcagaagggtatgtggaaataaagtccggccatgttatccaaagatacgaaaaagacggatgactgcaaaacggaatcgcatccggttcggaaaatttttccggctgcggctccgcctccgcccgcgggaggccgggaagtcggggcggcgcttcttcattttcagcgcgatgctccccgtctgtcgcccggaacgcacggggcggcagcgggcagagcgtcggagtcgtttccggctgtgttttcatggagggccggcggttgcggggcggcgggaaacgtgttccgggggagggctgtttccgggcggaaaatccgcgctcccccaaaggtgataaaaaccggcggaagaaaaccggagcgtcccgtccggcgcggataaattgcggcaaaatttttgccgggcgatcctcgcaagggtttgcgaagggcttttcggcggcgttgtacgacgctatcaatgaggcgtatagcactatcggaaaaaataataaatattttttgtaatttcggctgttatttttttcacaattatgaaagtttttctacctttgtgccgttgaagtccggacctgcggactgaaacgtcaggttgaaaagaggattttaatcaaataaattgcaattatggacaaaatggatctgaaaaagtacgggatcacgggcgtgaccgagatcgtgtacaatccctcctacgacgaactgttccgtgaggagacgaaaaaaggcctgcgcggctatgagaagggtcagctgaccgagaccggcgccgtgaacgtgatgaccggcgtttacaccggccgttcgcccaaggacaagtttttcgtgatggacgagaccaccaaggacacgatctggtggacttccgacgaatataagaacgacaacaagccggttacgaagaaggcctggaaggagctgaagaaaatcgccgtcgaggagctttcgggcaagaaactcttcgttgtggacacgttctgcggcgccaacgagaactcgcgcctgaagatccgcttcatcatggaggtggcctggcaggctcacttcgtgaagaacatgttcattcgtccgacggacgaggagctggagaattacggcgagcccgacttcgtggtgctcaacgcttcgaaggccaaggtgaagaactacaaggagctgggtctgaactcggagacggccgttgtcttcaacctcaccgagaagatgcaggtgatcatcaacacctggtacggcggcgagatgaagaagggcatgttctcctacatgaactacctgcttccgctgaagggcatggcttcgatgcactgctcggccaacaccaacgagaagggcgagaccgctatcttcttcggcctgtcgggaaccggcaagaccacgctttcgaccgacccgaagcgtcagctcatcggcgacgacgagcacggctgggacgacgacggcgtattcaacttcgagggcggctgctacgccaaggtgatcaacctctcgcaggagaacgagcctgacatctggaacgccatccgccgcaacgcgctgctggagaacgtgacggtggacaagaagggcaagatcgactacgccgacaagtcggttacggagaacacccgcgtatcgtacccgatcttccacatcgagaacatcgtgaagcccgtatcgaaggctccggccgccaagaaggtcatcttcctctcggccgacgcattcggcgtgctgcccccggtttcgatcctgacccccgagcagacgaagtactacttcctctcgggcttcaccgccaagctcgcaggcacggagcgcggcatcaccgagcctacgccgaccttctcggcctgcttcggcgcagccttcctgtcgctgcaccccaccaagtacggcgaggagctggtgaagaagatgcagaagtcgggcgccaaggcctacctcgtgaacacgggctggaacggaaccggcaagcgtatctcgatcaaggacacgcgcggcatcatcgacgcgatcctcgacggttcgatcgacaaggctccgaccaagaccatgcctatcttcgatttcgtggttccgaccgtcctgccgggcgtagaccccgctatcctcgatccgcgtgacacctacaagagcgccaaggattgggaggttaaggcagaggatctggccaaccgtttcgtgaagaacttcgtgaagttcacgggcaacgaggagggcaagaaactcgtaaccgcaggcccgaaggtaaagtaattctctgcggcttgagccgctgcaaatagatgaatcccggtttccgcagttggagaccgggattttttatgttgtggaacaggcacggtccggcggatgggcggcggatgtgtgcggacgggtttgcgatcggaggcgatccgtctgcgccggtcgctgtcggttttgccggggcgatgcggggttgccgcgcccgtgtgtgcggggtttgccggacaaacggatggaaaaagcccggcaggaataaatttccagccgggcttttcgtcttgcggaagccggcaggtcagaccgtcataatctccttctccttcttcgaaagcgcttcgtccagcgtcttggagaacttttcgagcagtttctgcgactgcgtttcgccgtccttcgattcgtcctcgggcatgccctccttctgggccttcttgaaggcttccaccgcgtcgcggcgggcgttgcgcaggctgatgcgggcggtctccgcttcggcgcgcacctgcttcaccagctctttgcggcgctcctccgtaaggggcggaatcgtcaggcggatctgctcgccgttgttcgagggcgtcaggccgatgttcgagtcgatgatggctttctcgatcgggcgcagcatgttcttgtcccacggctggatcaggatggtcctggcgtcgggtacggtgacgctggcagcgcccgaaacgggaacctgcgagccgaaatagtcgaccatcacgccgttcagggcgttgggcgacgccttgccggcgcgaacgttcaaaagttcctcttcgaggtggtcgatggccttctgcatgcggcccgtagcttcgttgagaatcgtcttggtatccataagtgttggggtttaatttccgagtgttttttcgatggtgcggatcagctcctcgaattcatgttcgtcgtagcctaccgtggccagcacgaccttgcccttgcggtcgatcacgaagttccgcgggatgtagttcgaggcgtagcggtcgtagacggtgcgtgcggggtcgagtcccatcgggaaggcgtagccggtcttttcgcggaacgcctccacggcctcgcgtttctcgcctcgcgatacgggcaggaagacgaactccttgccggcgaagcggtcgatgatgtccgtctgcacgcgggtcagctcctgccggcagggcggacaccacgtggcccagaagttgagcagcacgactttgcccttcaggtcgccgagcgtcacggagctgccgtcgaccatctcgaccgtgaagtccggagccgtgtctccggactttacgagcgttgtcgattcggcgtccgtctcggcgcccttcttggcgttgcggttgccgcacgagggcagcatcacccacagcgatttgttgcttttcttggttgccatagtcttacagttttaccagcgttccgatcttctccccggcaaggactttgccgaggttgcccgcggtgtccatgtcgaagacgatgatccggagaccgttctcgcggcagagcgtgaaggccgtgaggtccatgaccttcagacggcggtcgaggacctcctcgaacgtgatttcgtcgaatttcgtcgctgcggggtccttctccgggtcggccgtgtagacgccgtccacgcgggtgcccttcagcatcacgtcggcctcaatctcgatgccgcgcagcgccgacgccgagtcggtcgtgaagtaggggttcgacgtgccgcctccgacgatcaccacgtagcccgcttcgaggtattcgatggcacgggctttggagtagtattcgccgatgggttccatgcggatcgaggtgagcaccttgcatcggacgccgttgtcttcgagcgccgactggagcgccagcgagttgatgatcgtggcgagcatgcccatctggtcgcccttcacgcggtcgaagccctttttggcgcccgtgaggccgcggaagatgttgccgccgccgatgacgatgccgatctggacgcccgttgctgcggcggctttgatctgctcggcgtaggattgcagcgtctcgggggaaagcccgtatttctgtccgccttgcagcgattcgccgctcaatttcaggagtattcgcttgtatttcatcgtgggtcgcgttttatcgtagtgcgaagataggtattttttcgaaaaaattcatatatattccttatctttggtgtcgtaacgacacttttaccggtcggagcgttttgccgggccgcgcgcgattcggttttggaggcgtccgttcttttttctatctttgcaatccttatgtcgtcggaagaatataaactgctcgatacgatttcctcaccgcgggagttgaaaaaactcccgccggaggagctgtccgcctactgcgacgagctgaggcgttacatcatcgacgagtgtgcggtcaatccgggccacctggcatcgagcctcggggccgtggaactggctgcggccctgcattacgtcttcgacaccccggaggaccggatcgtctgggacgtcggccatcagacctacgcccacaagatcatcacgggacgccgcgaggcgtttaaaaccaaacggcagctgaacggcatcagcggttttccgcgcatgtccgagagcgaatacgattctttcgggggcgggcacgcttcggtgtcgatctccgcggcgttcggcatggccaaggccgccgaactgcggggcgagaagcggcaggtcgtggccgtgatcggcgacggctcgatgaccggagggcttgcgttcgaggggctgaacaacgccggggcctcgaagcgcaccaacctgctggtgattctcaacgacaacaacatggccatcgaccaggccacgggagcgctgaaaaactacctgctgaaaatctcgacttcggtgcactacaaccgtttcaaacaacggctgtgggggctgatgtcgcatacgccgcggctgctgcggctctgccagaaggcgggcaacgccgtgaagcaggggctgctgaacaagagcaattttttcgaaagtctcaatttctgttatttcggtccggtggacggtcacaacctcaaggagttggtgcggacgcttcgggcgttgcgcgacatcgaggggcctaaactgctgcacgtgatgacggtcaagggcaagggctacctgccggccgagcacgaccagcccgcctggcacgccccggggcgtttcaatcccgacacgggcgagcggatttcggctccgggcggcgcagcgcgttatcaggacgtgttcggcgaaaccctgctggaactggcgcgccgcgacgggcgcgtcgtgggcgtcacgcccgccatgccgtcgggctgttcgatgaacattctgctgcgcgagatgcccggccgctgtttcgacgtgggcatcgccgaagggcatgccgtgactttctcggccggactggccgcggcgggcatgattcccttctgcaacatttattcgagtttcatgcagcgggcctacgacaatgtgatccacgacgttgcgattcaggatcttccggtggtgatgtgtctcgaccggggcggcctggtgggcgaggacggggtgacgcaccacggggtcttcgacatggccgctttcggcgccgtgccgggactgacgatcgccgcgccgatgaacgaacccgaactgcgcaacatgatgtatacggccctcggatcgggacatccctttatgatccgctatccgcgggggcacggcgagggcttgccgtggcgcggcgagaagttcgagacgctgcccgtcggacgtggccgccgcctgcgcgagggcgcagacgtggcgctgttgaccgtggggaccgtcggcaacgccgccgcacgggccgccggacgcgctgccgcggaaggcgtgagcgtcgcgcattacgacctgcggttcgtgaaaccgctggatgaagcgttgctggacgaagtggggcgtaagttccgccgtgtggtcacggtcgaggacggttcgctgcgcggaggcgtcggcgaagccgtcgcggcgttcttcaacggccgcggctacgacgtgcgggtgcagcggctcggcatcggcgacgagtgggtcgaacacggcacgcccgggcagttgtacgccctgtgcggctacgacgaggagggcattctgcgcgccctgctcgatacccgcgcataaattttccgcaacgcattttttcggcacaaattctgcgagattgcttcccaaaacgaccgggaagtgaaaatcgccattttattgcttgctgccgcccttttgattccgggtgcggtggctgtcgcggcggcttcggaccgcaccgaccgcatgcctgtcgccgtgttcgacctgcggccggccgaagcgcggggctgccgcaccgggtaactgttgttcgtggatcaggggcggggaactccgccgtcttcgccgtaaaggcatttgtcagagcgtgaacacccagtcgtcgcctttcgagagggccgggtccaggcggaagccttcccattcgaacgaccggagcgtcgcgggatcggcgatgcggtttttcaggatatgccgcgtcatctctccgcggcacattttcgtatagaccacgacggttttcagccggtcgccctcgcggacgcggaattcgggcgtgatgacccgggcttcgcggcagacgcgtttccagtcgaacagccgcttcatctctccgctcgccaggttgaccaggatgccgtcgtcggcgtgaatccggcccagcaggtcgtcggtcagccggctttgccagtaggaaaacatcgtttcgtcgccgcggccgggcagtacggcgtcgccttcgagccggtaggtgcggatggcgtccagcggacggagcagtccgtagaggaacgaggtgatgttgaggtgccgttgggcgtattcgaaatcggcgtcggtgaaactcgccgggtcgatgcgtttgaagacgattcccgtgtaggccgtaagggctgggatcgccgcgtcgtcgtcgccgtggaagcggccgtagcgcaggcggttttcggcggcgatacggcggttgacgcgcaggagccgggccagttcgtcggtcgggagcgtcgccagcccggcggccagttcggaggcctcgctgcggtaggcgggccgggtcgtgcggggcgtcgggacggaactgcgctccgtcatcgtcttggcgcaggagaggagcagctgcatggcgttcgggcgttaagctacggagcaggggatgccgagcgcttcgacgcgtgcggcgatggcctgcaactcctctttggtgactttttcgagcgtcgggcagggggtgtcgcggtcgagcgagtagaccatcacctgctgcgggcggatttcggcgacgagccggagccaggccgagacttcctcttcggtggtgttgtcgacgggctgtccgccgcactccccgcgcaggaacatcgtttgcagaatcatgcgcccgtcgaagcgtttcatcgcttcgacgatgccccgcaccgtgtaggacgcgctttgcgggttgttcatccgccgcaccgtcgcgtcgaacgccgaatcgagtttgaggatgttgttgtccacgcgcagcagggcgcggcggacgctgtcgcggtggatctgcgtggcgttggagagcaccgagaccttcgccgcggggcacagcgcgtcgcgcagggcgatcgtgtcgccgatgacggcttcgaaatcggggtgcatggtcggttcgccgttgccggcgaaggtgatcacgtcgggcggcgtggagtcggccgccatgcgccgcagggtggcttcgagctgcgtgcgcacgtcctcgcggctgttgaagcgtcgtccgcccgggtgctcggcattccagccgcactcgcagtagatgcagtcgaacgagcagagtttcgaggagagcgggagcaggttgactcccagcgaaaggcccagccgccgcgaatgcaccgggccgaagataatgtcgtgaaatagcgctgtcatggtgcgaaattaagaattaagaattaggaattcaaaattaattcctaattttaccaaaataccgttttatgaaattcaaattcggacttttgccgcgcgtcgtgctggccattgcgctgggcgtcgcctgcggattcttcctccccggctgggcgacgcgcatcgcgctgaccttcaatgcgattttcgggcagtttctgggattcgccattccgctgctgattctcgggctggtggctccgggcatcgccgatctgggccggaacgccgggcgtctgctggccctgaccgccgcgctggcctatgccttcacgctcttttcggggttcgggacctatctgacggggcggtttctctttccggcgctgctcgaaggctccgccgccgtattgcccgaggaaggggcggcccttgcgccctatttcacggtcgaaatgcctcccgtgatgggtgtgatgtcggcgctggtcctcgccttcgtgctggggctgggcatggcctatatccgttcggtgacgctcaaggcggcgatggacgatttcaagcggatcatcgagc

SEQ ID NO: 740 - DNA, 7903 bp, unidentified
  source 1..7903: mol_type = unassigned DNA
atggaacaagaattatttaacccacagtcctcttccgtaagctcctctcgaatcatttacaccccatcaacctttgcacggacatcgttgctccatctgcaggaggttggctctttgcaggctgttcatccgcatacatccacccgaacagaccttgtatcatttctatgctttgtggtcttatctggaaaaggcagtctgaaatacgaaggtgtggattacgaactgagaacaggagactgcgtgtttatcgactgccggaaagcgtacagccattctacatccgataatctctggtcgctccaatggtgccacttctatgcaccatcccttccggctgtgtatgagaagtacaaagagcgaggcggtcggcctgtgtttcacccagatgatttagcttcttttacatcaatcctgacagacctttatgacctcgcttcttcgtctgattacatacgagatatgcggatcaatgagaagctggggactttgcttaccttactgatggaacagtcctggcatccggagagcgttacaatatctcgaaaacggctggaactggcagctgtaaaggagtatctggacgagcattatacggagaaaatcgcactggattacctgtcagaacacttctttatcaataagttctacctgtccaaaatcttcaaagagacttacggaacaacggtcaacaactatttgacctcaaagcgaatcaccagagccaagcagctgcttcgcttcacaaatatgactgtagatgaagttggtgctgcggtcggcatgggagatgcgaattacttcagccggatgttccgcaaggtggaaggcatcagtccaagagaatatcggaaacagtggtgaccttgaggcacagcgagaaatcgctgtgttcttcttaaaaacatatagtttgaaatgaaaataaaaggagacttacaaaatgaacacaaagccaataatactcacagtaccgtcctttgaagacttcagaggataccttgccgtgccatatgaccaatctataaattttactgttcgacagatcaatcagggatacagcaagaaagcgttcacactgcgtggactgcattttcaggaaggggaacacgcccaggcgaagctggtgtcctgtctgcacggttcgattttcaatgtggctgtggatctgcgccaaggagaaaccttcggtcatgcttacagtgcggtgctgtcttttgaaaatcgaaagcagatgctgattcccagaggttttgcgcatgggtatctgacgttggaagataacaccctgatgcagtggtgtgtggataatgacttctgcggtgaggccgccaaggccgtgcggtatgattcggagttcatctgggaaggtgaaccgtggccggaagctgagtatataatatcggaaaaagattggaatgctgtgagattggagaatttttgtgggagataaaagaccatataaaccaagaaaatccggtgctggccggaaactgttgaagccgaactatgatgcggcagctatcctgcaggagcagatacaggccgtcgtggtcctctacgaagaagataactcccttcagacaatcgcagacacgctatctctcaatcccatcaaggtgcgaaagctattgatcacggccggtgtttatgaatcggaaattgcagatgcggtgaacgcttcttttgaggaaaaacagggaatgtcttataaagaagcattggaagcggtggctgcagaactgaatttgtcaaaagcatctgtgacttcttatttaccttataagaaaggcgtgtatttcagagaggattgtgatcgagaccagatcagcgttgtggcagaggggcttcgacgaatgcggcagaggaaaaaagcagttgaagcgttgcagagcagtcatgatgaacagcatctctggaagtgcatcgttgcttttcaaggataccgattcaagacgatatcaggattgccgttttcctataagattaagaccgggcggaatggggaactgaccaaggaactgtggatcgatcgtcgagaaagcagtaagagcctgacgtggagttcggtactgcttgcttttgaaaagacggaaggaaagccgctggtagagcggccaaaagcactgggagatatccgtggtgtgtcctatatttatgggatgtttaacaggtttggtctgatcgaggtaccacaggggaaagtttaagggatttttgagcagcactttccttgaatggatacagctaggtatatttcgtgaacgccaaaaaccaatattatgctaatagaacaccgcttttgccctttagagaaggcactctaacctataaaatataattgtacgataatattatacttagtctatcaaaagataaatcatttttcagagaggaataaaacacatgaaaaaagcacttatcactggtatcaccggtcaggacggctcttatctggcagagtttctgctggagaagggctacgaagtccacggcatcgtccgccgtgcttccatctccaacaccgcccgtatcgaccacctgatcgagaagaatgcaatcaccctgcatgacggcgacctgtccgattcctccggcctgatccgtctggtgggcgagatcaagcccgatgagatctacaatctggccgcacagagccatgttcaggtctccttcgacgcacccgagtattccggcgatgtggatgcactgggcgttctgcgtgtgctggaagctgtccgtgtctgcggcctgaccaagacctgcaaggtgtatcaggcttctacctctgaactgtacggcaaggtcgaggaggttccccagcgcgagaccactccgttccatccctactctccgtacgctgtcgcaaagcagtacggcttctggatggtcaaggaataccgcgatgcttacggcatgttcgctgtcaacggcatcctgttcaaccatgagtctgagcgccgtggcgagaacttcgtcacccgtaagatcacgctggcagccggccgtatcgccgagggtctgcaggatcatctggagctgggcaacatggactccctgcgcgactggggttacgctaaggattatgtcgagtgcatgtggctgatcatgcagcaggataagcccgaggacttcgtcattgctaccggtgtgcagcacactgtccgtgacttcaccgagaaagctttcgctaccaacggcatcaccatccgctgggaaggcaccggcatcgacgagaagggctatgatgcagctaccggcaagatgctggtctgcgtgaatcctcagtggttccgccccaccgatgtggacaacctgtggggcgaccccactaaggctaagaccgttctgggctggaatccgcagtccactacttacgagcagctggtggagatcatggccaagcatgaccgtgagcgtgcaaagcgcgaaaaggccctgaagaacgtctgatgcaggcaaagaatctctgcttttacctgtccgatcacggtttcgggcatatcgcccggaatattccgttgattgcagaagcggtgcgcagaaccaatggatttgtctacgtggtatgcgggaagcggcatctggaatttgcaaaagccaatctgctggagcttcttacgccggagcagtcttcccatatccggtatcgtgcagaacataccgacattggattgatccttcagcaaggtacgctgctggtcgatacggctgcgctgaccgatgcctgtgcgcagtatctggccgaacggccggaacgggcaaagcaggaggctgactggttacgtcaacacgatgttgcggccgccctttgtgatatgcccctttggtcgatttctgcctgtgagcaggccggtgtgacgctgctctatgtgggaaatttcacatggacagagttgtaccgggagtttttaccggaacatatctggaaagcatatgccgcagagtaccagaagatacagcacgggatgctttatgcactgcataatccggaaatgctggagtttctgcctcgggcagagttgagcgaaacttcgctggtggcgcgccccttccacccggacgaaattcgggcaattcgcgcacagcatacctgcccggtcgtgttcgtggctttgggaatgtcggcacagttcacacagcctgtctcggtagaaggtgtggaggctcatttctacgtcacagagggcgttccgctgacgggaagcaatgtgacggtgattccctattctacgctgcacacgcaggactatgtggcggcggcagactatgtaatcaccaaggctggctggggcacggtggccgaatgcctgctggcgcaaaagccaatggctctgtttgcgcgtgacagcgtgctggaagaccgcacgaccatccgtttgctggaacagaaaaaactggggataaaagtcacctacgagcaactgacggaaatgccagacctgcttgaacaaatgaaacagatcacctatccggcagtgccggaatatcacaacgcagcggccgaaattgtttcaaagctgctgacgctgactgaataaaggagcgtcttattatgatggaaaagaatgctaagatttatgtcgccggtcatcgcggcatggtgggctctgcaatcgttcgtgaactgcagcgtcagggctacaccaatatcatcactcgcacccacaaggagctggatctgacccgtcaggatgctgtggaagagttctttgcacaggagaagccggagtatgtgttccttgctgctgccaaagtcggcggcatcgtggccaatcaggaagctctggctgacttcatgtatgataacatgacgctggagatgaatgccatccactcggcatggaagaacggctgcaagaagctggaattcctcggctcctcctgcatctacccccgcatggctcctcagcccatgaaggaaagctgcctgctgaccagtgagctggaaaagaccaacgaggcctatgcactggcgaagatctccggcctgaagtactgcgagttcctgaaccgtcagtacggcaccgactacatcagcgtcatgcccaccaacctctacggccccaacgacaactatcaccccacccacagccatgtggtcccggcgctgatccgccgtttccatgaggccaaggagcagaatctgcccagtgttacctgctggggtgacggctctccgctacgtgagttcctgtatgtggacgatctggcaaacctgtgcgttttcctgatgaacaactactccggcaacgagactgttaacgccggtaccggcaaggagctgaccatcaaggaactgaccgagctggtcgccaaggtcgtgggctacaccggcgagatcaagtgggacaccaccaagcccaacggcacgccccgcaagctgctggacgtgtccaaggccaccaatctgggctggacctacaagaccgagctggaagatggtctgcgcctgtcgtacgaggacttcctgaacaacccgatgcgtgcagaacgctaaaatagaagaatcaacgattcacaaggtcgtgtgtccgtgcagggccgcggccttttttgttaaatgataggagaacaattatgaatttggtgttattgtccgggggctccggccagcgtctgtggccactttccaatgatattcgttccaagcagttcattaagatcttccatcgggaagatggtgagctggaatccatggtgcagcgtgtctaccgtcagatcaaggcggtcgatacggatgctacagtaaccattgccacttccaaatctcaggtttcggctatccacaatcagctgggcgaggaagtgggaatcagtgtggaaccttgccgccgggatacttttccggccatcgcgctggcagcagcttacctgaaggacatgcagggcgttggcgaggaagaatccgtggtcgtctgcccggtagacccctatgtggagaacgactactttgaggccctgaaagcactgggcgaccgtgccgccgtcagcagcgcaaacctggtcctgatgggcattgagccgacctaccccagtgagaagtacggctacatcatccccatcggcaaagagcaggtcagcaaggtgtccatgttcaaggaaaagcccacacaggaagtggcaaaggactacattgcaaagggcgctctctggaacggcggcgtgttcgccttcaagcttggctatgtgctgaaccgcgcgcatgagctgatcgactttgtggattacgatgacctgttcaataaatatgatactctgaacaagatcagcttcgactatgccgtggtggagcatgagccggaaatcgaggtcatgcgctttgcaggaacttggaaggatctcggcacctggaacaccctgaccgaggcaatggacagccacgcggtgggcgaggcactgttcaatgagaactgcgagaacgtccatgtggtcaacgagctggatgtgccgatcctctgcatgggcctgaaggatgtagtgatctccgcaagcccggagggtattctggtctcggataaggaacagtccagttacatcaagcccttcgtcaacacgctggaccaccgggtcatgttcgccgaaaaatcgtggggcagcttcaaggtcatcgacatcgacaaggcttccatgaccatcaaagtgaccctgaatgcaggccatcagatgaactaccacagccatcagcaccgggatgaggtctggacggtcattgcaggcgtgggcaagactgtcgtggacggcatggagcagaatgtgaaggcgggcgatgtcatcaccatgtccgcaggctgccgccataccattatcgccgagaccgagctgaagctcatcgaagtgcagctgggcgaagccattgacgtccacgacaagcagaaatttgagctggaatattgagccaccgcaggaggcagctatgcaaaacaagaacaagcctcttttgctccggccgtccggcaaggattatctctggggcggtagccgtttgaacgatgaatttgaaaagaacatcgacctgagcccgctggcagagacgtgggagtgttccacccaccctgatggccccagctacgtggtaggcggtgcctttgatgggcaggaactggcagaggtgctgagagcacacccggagtatctgggcgagcgccataagggcgagaacgctctgcccatcctcatcaaattcatcgatgccaagaaagatctgtcggtgcaggtgcatcccaccgacgcctatgcacaggagcacgaaaacgggcagcttggcaagaccgagatgtggtatgtgctggatgccagcaaggacgcaaagctcgtgtatggcctgaaacgggagcgcactgaacagcaaatgcgggatgccattgccaagggaaccctgatgaaggatctgcagtgggtcccggtcaaaaaggacgatttgtttttcattgaggcgggtactatccatgccatcggtgctggggcattggtggccgagattcaggaaaactccaacctgacctaccgcctgtacgattatgaccgtgtgggcaaggacggcaaaaagcgggagctgcacattgacaaggcgctggatgtggcgaacctgaagagcagcgcagagccgaagcagccccttcgggtgctgaaataccggcagggcattgcctctgaactgctgacccgctgcaagtattttgaggtgtaccggatgatcgtcaacaccgagcggcggcagaaggtgcactaccgggcggatgagatcgcgttccgggtgctgctctgcgtcaacggctgcggcacgatctcctttgaggacggcaatcttccgttctataagggagactgcatctttgtcccggcggattccgaggtgctgaccattcatggacaggcacaatttctggatgtaagagggtaa

SEQ ID NO: 741 - DNA, 23441 bp, unidentified
  source 1..23441: mol_type = unassigned DNA
tttttgcgaaaaagtaaagtattattttaaagcaaaatccaaaaatgttgtttgacaagaaaagaaaaacgggtataatacatcatgcaaggcagcgcactgcacaaaagcctgccgctgatattgagattcaccactttatatactttcccacccctctatacacaaaaacccgctgccaggcgggtttttgtgttttatgcgtttttggggaactatacagcatgaccccgcgttttcacgcggggtcatgcttttatgcagaagggttttacagaaaacgaaagaaaaattattctgcgtacagagagatgatgttcagcacgatctcagtgcagcggtccatccgctccacggtggtgcactcgcacacgccgtggaagttgaagccgccggtgcccagattggggcagggcagaccattccagctcagggtagcgccatcggtgccgccgcgcacgggcacctccaccggctccagaccggccatgcgcacagccttgcgggcggtctcgatgaggtggaagtggggcttgatcttttccagcatattgcggtagctgtccttgatctccacttccacggtgcctgcgccgtacttgccgttcaggtaatcggcaatgtcctgcatattgtccttcttgaactgcagtttggcggcatcatggtcgcgcaggatgtagcccagctttgcggtggtgacgtcgccgtacatctggcacaggtgatagaagccctgacgcccctcggtggtctcgggacgcgccatcacgggcagagcgccgtggaactccatggcaacgttggaagcgttgatcatggtgtccttggcagagccggggtgcaccgagaagccgtggatagtcacggtggcagcagcggcgttgaagttctcgtactcgatgtcgccggcatcgccgccgtccaccgtgtaggcaaagtctgcaccaaaaccggggatatcgaacagatcggcaccctcgccgatctcctcgtccggggtaaagccgatgcacagcttgccgtggggacggccctcgcggataacggtctccacggcggtcatgatctcagccacaccggctttatcatctgcacccagcagggtggtgccgtcggtggtgatcagggtctcgcccttcatggaggcaaggaaggggaaggcagagaccttcatcaccttgccggtggcgggcagcaccacatcaccgccgtcatagttctcgtgcaggatggggttcacgttctcgccgccggcatccggggcggtgtccatgtgggcgatcagacccagcgcgggcttttcctcgcagccgggggtggcgggcagggagccgtagacgtagcagtgttcgtccacccgggcatcctccacgcccagagccttcagttcctccaccagcttgtgagccagatcaaactcccgcgcagcggaaggatgggtgccggactccgggtccgaggtggtgtagaccctgacgtaatcaagcagtcgttcataggcgcgcataataaagcacactcctttagcaatattgaaggatcacagcccgtgatccagcttctatcataccccgtttttcctgttttgacaaccttttttgctcacttgggacagaaagcacgggcgcaataacaaaattcaacgtaaaaagttgtccgtcagtcataaacgtgctacaataaagacacccttataaagaagcgggcgcaccgcacagcagaaagatcaggaggagattttatggcagtcaaagtgtttttctacaccctgcgcccctacgatgagcagggcatcgtagaggaactggcaaagcagtatggcgtcgagtacggttatactgaggtgtatcccaccatggagaacgcccagctggccgcaggctgcgatgcggtatcggtgactccctgcgatatgagcgcacccatgctgcagcgcttccacgatcttggggtgaaagccatctgctgccgctccatcggctacgaccatatagatctggaaaaggcacgggagctgggcatgaagatatccaatgcggattatcctcccgagggcgtggcgaactttgccattatgctcatgctgatgagtctgcgcaaggcggggcacatcctcaagcggggcgaagtgcaggactactccctgaagggcaagctcggacgggatatctcccactgcactgtgggcgtcattggcacgggacgcatcgggcagactgtgctgaagcacctgtccggctttggctgccgtctgctggcctacgacttgtaccagagtgaagaggtaaagaaaatcgcggagtatgtgccgctggacaccctgtttgccgagagtgatgtcatcaccctgcacaccaatgccaccgaggaaaaccatcacctgctcaacgccgaagcctttgccaagatgaagcccggcgtgaccatcgtgaataccgcccgcggcaagctgatcgacagcgatgctctgctgaaggcgctggaaagcgggcaggtgggtgctgccagtctggatgtgctggaaaacgagaacggtctgtactattacgaccgcatgggggatgtgatcccgaacccggaactggctgcgctgcgcgcgatgcccaacgtgctcctgaccgaccacacagccttctacacctacgaggctgtaaagagcatggtgctcagtgtgctggaaagcgcttccgcctttgccgagggcttgcccacccggcatgatgtgactgaccgctgagaaatggtgaaatgcaaaaatcggacagaccgcggtctgtccgatttttgtgctatttatccatagtatcccaacgcaaattgatgctcagcccagacagacgcccatgcggcgcgccacgctcagcagctcgcagttttcaggcacattgcgggtcttgccggcaatgtctgccagacggttctcggtcacccggcggttcaccatggccacggtcacgccgtagcgctccacctccaccagctgtgcggcatagctgccgaactgggtggcaagcacacggtcgtaggcgctggggctgccgccgcgctgcatatgacccgggatgcacacgcgggtctccatgccggtctttttctgtaccgcctgcgcaatgcggttggtggcggtggtgccaagccctgcctcagcacgcttggccatccagtccttgcgcttcatgtgggcttcctcggtgttgatggcaccctcggccacggcgaggatggagaaattcgaacccttcttcgcacggcgctccacggcctcgcacacgcggtcgatatcgtagggcagctcaggcagcaggatgatgtccgcgccgccggcaatgccggagtacaaggtaagccagccggccttgttgcccatgatctcgatgcacatcacgcggctgtggctgccggcggtggtgtggatgcggtcgatgacgtcagtggcgatgtctacagcggtatggaaaccgaatgtcacatcggtgccgtagatatcgttgtcaatggtcttgggcaggccgatgatgttcagcccctcctgtgaaagcaggttggcggtcttatgggtgccgttgccgcccagacacagcaggcagtccagcttggcagccttgtaggtctttttcatggcggcgaccttatcaatgttgtcgtcctccaccacacgcatcatcttaaagggggtgcgcttggtgcccagaatggtgccgcctaaggtcaggatgccgcggaagtcgtcctcggtcatctcgcggtaatcgccgttgatcaggccgctgtagccgttggcgatgcctacgatctccacgttatcccccatgcgggcgtacagtgcttttgcaacgccgcggatggtggcgttcaggcccggacaatcgccgccggaggtcaggataccaacacgttttttcattcaaaagccctctttccttatcattcaggcaaagccgaaccgcccggcaaaggatgccggagcgcccggggtcctacctttttatagtattagagtattccgaaaggggagtgctgtcaagagaaaaaccaaaaatttacaagcctgtgtgcaacgaaaagctgctgtaaaaacttttacagaaaaactgaaaaaatggttgacaagcagcccgctggcgtgtataatatcccttgtcagcaacgcacgatgcggctgacaaaaccgaatattggggatttgcatagtggtagtgcggtagactctgactctacttgtgggagttcgattctctcatccccaaccagaaaaccgcagtcgccttccggctgcggtattttcggggcatagcgcagttggtagcgcgcctcgttcgggacgaggaggccgtgggttcaaatcccgctgctccgaccaaaaaatgcacgttgattcgctaagaattttcgtgcttttttctttattcggcagaatgacgagccgggtttgaaaaagtgccaaaaattatttcaggcgcaaacaggaaatctgttggaggctgactctgacagacttttttgtaaagctgaacgaggaaaatgtcgaggacagttccaccgggtggtgggactgtctttttttgtgtggctgctggcaagcagaagttgacgccagattgacaacttattcgagcatgggggatcggctgggacgtttctccttaaaataagcgtgttgttgaaaagaaacgcttcatgcaatgtttttatctgagaaaacccgctctgtttatattgatttccctctgcatccatgataaaataacaggagaattcgtacaattatgtcgaaaatgattgcaatggaagctacccttacggagatctgaatactccttgtgtcagctgtagggcagatggttataaacggagccgatgattggcttgacaaaaagtgcccggaagaagtcaggcaaaaacagtaattgcatcataacttcagaacgagcagaaaagttggaaaagataggaattatgtgggatactatggagcaaaagaagggcaatcggccatgaagaaggttttgctgatcgcaacaacacggcttaccatggacggtttgacagagatcctgctccgggtagcccgcatagcggcacgggaatatttggtgggctttgcactgggtgaaggctgcagtgcggatatccagccgcagctggaagcgattggcagcgtatatcagctgccttcccgtaaaaaaaagctgccctgctatatggccgcactggcagtattggtcaagaaaaaaggctatgaagttgtgcacatccacggcaacagtgccacgatggcatttgacttgctggctgtatgggctggcggcgcgacagtgcgcattacgcattgtcataactgcgcgcaccagcctgcccttaagcaagcgacccttggcagactgctgaaccgtttggttacggatccggtggcgtgttcgcgtgcggcgggagagatgctatatacccggccattccgggtacttgtcaatggaatagactgcgagcgtttttccttttccccgtccgtacgagaacaaatgcgggcgaaattggggctgcaggactactttgtggttggccacattggccgtttcagccagcaaaaaaatcatacccggcttttccgcatcttcaaaacagtcttgcagcaaaagccacaggcaaggcttctgctttgcggccaaggagagaatttcgaacaatctcagcaggaagccaaggcgcttggcattgcggagatggtgctgttttgcggtaatgtgaataggccggaagattatctgcaggcgatggatgtatttgtgatgaccagcctgtttgagggattgcccattgtgggtgtagaagcgcaggccagcggtctgccctgcatttttgctgacacgatcacgcaggaagtgaagatcctgccgcagactcagttcctcgcacttacacagcctgatgaagcatgggcagagcgtattgtccagacaaagccgatggaacgcagccttgcgggacattgcgtagagagtgctggatttgcagaagaaaatctggacaggcaggtctgtgcgctgtatggaatggaggaacatcattttgcgaatatcagtggtcgtgaccacctataacggaaaaatgcatctggaaaagcagcttctgtcgttgttgcagcaggagcgtgcaccagatgaggtgctgatctttgatgatggctccacggatggcacaattgagctggtacagagcttcatccgcaagaattgtctggagagctggcagttttatgtcaatgccaagcgcaaaggctggaagcaaaactttatggagggtctgcgaaaagccgcaggggacattcttttcccttgcgaccaggatgatatctggtacccgaagaagcttgcagaaatgaccgcagtgatggaacagcacccggaaatcaaactccttgcctgcgattaccgtgtgctctacgagtccggagccctaaaagcaacggtttacaagaaaacacctgcagaaacgcagggcctgattacaagatatgggtttaccaaacatttctttatgaacccttatccgggctgtacttatgcggtgcggcgcgacttttttgatacggtcaaagagctgtggtttgatggctcgccccacgacgaatttctatggcttatggccgcagtgcaggacggcgcatggttttacaaccgtgtgctgatggattatgtgcggtattctgataatgcatccggggtgcgctacaaagatgttgccctgcaaaaagaaaacctgcgctatatccacaaacagctttgtgccctgcaatcttttgcggcagagcacccggatgctgtgccggtagaacgctgcaaaatgcttgctgcggcgcagatctggtgtgcaaagcggcagaagctcatggaaacacgcagtccgctccgctggctggcactggcaccgtggtgggggtactacaattcaccaagaaactgcctgagtgatttgtggctggtggtgtttgggagttttcaacgtcgcagaaattagaactgccaaaggagaaaaaattgagacgacttggagtttttgtattttatgatcctcaaggagttgtagatgattatgtggtgtttcttttggcatcgatgcgaaaggtttgtacggagattgtgaccgtttgcaatggcttcctgacagaagaaggacatgatcggctttcccaatggagtgaaaccattttttgtagagaaaacaccgggatggatgccggagcactaaaagactttttcacaaatcttcggtcaagagagtattggaacacatttgatgagctggtctggttcaatgatacctgctacggccctctagtgccgatagacaaggtctttgaggagatgaagcagcgtgagccttgcgacttttggggaattaccatccatgcaaggtctaatgctaaatggccaggcagtaaacagcccggaattgctgaacatttacaatcatattttattgtaatacggcaaccgctgctccaggatgagcggttttatctattttggaaggatatgaagatatccgataatttcaatctcacggtgtcaaattatgaattgtctctaaccaaaacatttgcatcatgggggtatatttacgctgttttttgtgataccagaaagctggacacgaatccgaattgcgtttgcaatccaacagctgatgcaatgtatcggctggtaagccagtatcactgtccctttgttaaacgcaaaaattttattcgcacaaatgcagaagccacagtcttcaccaatggagagcaagtcatgcggtccatgagctacatccgcagccataccacatatgatactgcactgatctatcggaaccttatgcggctatacgaccaagaactgtggaagggaaacctatgcctgaacttcactttgccttcagaatattctgccaatgaccctactccgcctgcattgatcctggcagaacttgatcatgaagattcgattcacgagttatcggagagcctatgcagcctttctgaatcttgcgatttgaacgttataacgcgtcgcactgaactcattcctacaatcaaaaagttttttccatcttgtaacatcacggtttcgtctaatcgaccgcagggacttgcttccctatttttggtgctgaaccagatagaaaccgataaatataagtatttctgtattcttcaggagatgtggggaaatccatcaaacggtctgcatatttcagaatcttcgattcgttttagtatgtacggtaatttggtcgcaggaccacactttattcggaatgtgattcatacgtttgagtcagaacctctattaggaattctaaatccgccgatctttccgcaaagccgcagtgcaatggttgctcatttcaatttaaagcaagctgcaaaagattatggaattcctcttccgcaacgcctgtgtgattacgaggctttttgtcagccctcgctatggtgtcggaaagaggtagtattagctgcgcttgaaaagttgaacgatcagacatctccgctggaccccggcgttttggaacatctcctctgctatattgcacttagcagcggatatagttgcggtgaagtaaaggaaagccgtcaggcggcctgcttgcaagaatcgcagcaatggcttatcaacggtttttattctggaaatattgacttaaatctctttcagaaacgtcaaaagtttcaggctgtggctgccattcgttcaggaaaatgcaaaccagaagagacgaatattacaccatcggcattgcgaaaacttctatgggaaactgtaatttactggtttgaaaagaaactgaacccgcacatatcctcttctaaaaaggatacatactttttgggagcccgtgatgtatacgatgtatatcgcagggttgaaaaggcacggcgctattcttctgaaaaatagaaaaggacaaacaaaatgaatttcgaaaaggcgaaaaagttgctgacacagttgtcagtgttttattttctgcttgcagcaatgatattctttgtggccggagatggctttcgacatgaaattgtaaacggttccgccttatctcccagctctgtgattggtgaaatcgttgacgggatggtcgttgaacagcggttgccgctgggagccgaccatgttgaagcgttaaatcttcaagttgccacttttggcagacaaaatactggtatccttcacgttgatatctatggcgaagacggcaccttgatctcctcagcacaaggaagacttgaggatatgggggacaatcaggtgatacgcttttcgtttgcagagtcgcttgatggaatgcgcaaacagtatagcacggtaaaaatctggtccgaaggctgtcggcccggcaacgcaataaccgtttattacggaaacagcgttcaggcgggaaagtatacgcttcagaagggcattgcatcagaagatctgtatcaagtggatggcacttcgggcagtggaactctgtgtgcatattttaatggttacaacgacctgattttttataaggtatactggctgctgatccttttcgtgtatgcagcggttgccgtagtgattagaagatggtggaatcaggcaaagcagggaaaatgcaaccccttgacaacattttacgcaatggtgatccaatatggctttttgacccgccagttggtgagccgagactttaaaacaaagtacaaaagaagcctgctgggcgttggatggagcatcctgaaccctttgctgaccatgctggtgcagtatgtggtattctcaacgttgttcagtaacggaacaaaaaactatcccgtgtatcttttaacaggaatagtgttttttaacttctttaatgaagcaatcaatatgggaatgacctctatcacgagcaatgcagcattgatcaaaaaggtctatatgccaaaatatatttaccccgtaagccgcgtgttttcttctttgatcaatcttggaacctccttgataccgctgcttgcggtcatgctgttaacgcgtacttggcccaagtggtcgttgctgttgctggtgtttgatattctctgcttagttgtctttgtaatgggaatgagcttgatcctttccacctgcatgactttctttcaggacacgctgttcctgtggggcgttgtgagtatgatttggatgtatctgacgccgattttttatatggatacgatcattccagaaaagtttttggcactttaccacatgaatccaatgtaccaatatatcaactttgcgagaatttgcattattgatggcgtttctcccaatccgatctcttatctgtggtgtatccttacggcggtggtggtgtttgccattggtgtatcggtattccgcaaaaatcagaatcgttttgttctgtatttgtgaggtgggggcgtattatgggaaaaatgattgaagtgaacaatgtttccatgcgttttcgtatggcaaacgaccgcgtgtccagttttaaggagtttgccattcgaaaactgaagggcgatttgaaatattcagagtttgaagcgctgaaaaatgtatcgttttctgtggaaaaaggtgaagtggttggtttgatcggccacaacggcgccggtaaaagcacgctcttaaaggtaatttccggcattcttcagccaaccgagggaaatgtggtcgtacatggcaatgtggttcccatgttggagcttggaagtggctttgatatggatctgacaggcaccgaaaacattttcctgaacggtgccattctaggctattctgaggactttctgaaagaaaagtaccagcaaatcgtggatttctcggaactgggtgcagagtttctcgatatgcctttgcgcaactactcttctggtatgctggcaagattggcgttctcagtcgctacggtagtggagccggaagttctgatcgtagacgaagttttggcggtaggcgatgcagatttccagaaaaaaagcatgaaccgcatgatggaactgatgagtggcggaactaccgttctgtttgtgtcgcataatattgagcagattcggaaaatttgcggaaaatgtgtttggcttgaacatgggattgtaaaacaagtcggcctgtgtacagatatctgcgatatatttgaaggtaaatgaaaaagaggaggaatcaaaatgaacttattgtatagaagatatcgctgcttctacgaaaatggactgtggtatactttgcggaaaatctcatggcaactttttggaacgttagatccagaaaaggatgatcaatggcctgttcataaagagcgttttatgaaaaggcatccaaaacggtttccagcgtatgcttcatcttcaataatgaagaaaattgcgcatgatattttaatagtatctggagtaaacgagacaaatgttcctcagtgtctccgctacagagtattacatcaagtggagcagcttaccgcagcaggtttttctgtaacgtggattccgtacgagaggtgcaacaaatatacaccgttagattgcagagctataatattctatcgctgtccctttacagagccaatcggcgaagcaattcagatggcgaaggcaataaatgttcgaacctattatgatatcgatgacttggtatttgataagaactatacggatagtattccgactgttcaaaaattaagtcgcggagaacgagcaatttatgatagtggcgtaattcgtatgggggcaactttgaaactttgtgagtacggaattacgacaacggaacggttgaaagaacagatggaaaagaaagttctctctgtttttattaatagaaactgtgcatctgaggaaatgcttaaaatcagtgaacgagttcggaaaaatcgtaaaaaaaatagcttgaagaatacagatgttattattggctatttcagtggctctcttacgcacaattcggattttgagctgattctgccagcgttattgcacgtgatggatgaaaatcccgaggtaaaattactcctgatgggggaactggatttaccagagacactgaaaccatataaggctaggattattagaaaaccgtttgtagattggcgacatttgcctgaagtgataggaagtgttgatattaatttggcaccaatcgaaaatacgatttttaatgaggcaaaatcggaaaacaaatgggttgaggcatctttagtagaagtgtgtacagtggctagccgtgttggggcatttgcacagtgcattgaagatggtgtaacaggttttctttgtagcgatgatgaatggtattctgtgctgacaaagctcgtacagaatgaaaaactccgcaatgaaatggcatttcgtgcttattcctattgcagagaaaattatgtaacaacacgcaataatatcgcattacgcgattttatgaataaaaccatttcaaagcacattggttttgtacttccttcctgtgaaatcagtggtggaatcatggttgctctttggcatgcgtgttttcttcaggaccagggttgggaagtggacatcattgcaaatggaaaaaagtttgaaatatgggaatttgctaaccataaattcccagtgtttagtcgggagaatgataccacatttgaaaataaaatgtggtatgatgttctggttgcaactatgtggacgacagttgactatgtactgtcttataaaaatgtaaaaaaacgttgttatttagtccaaaattatgaaacggatttttacaaatataatatgaatgaacgtctgcagtgtgaagcaacctacaatctgcaggataatatgcagtatctgacaatttctgcatggtgctatgattggctgacaaaacactatggtcataatgtttcgtgcgcgcaaaatggaattcagctggagaaatacccttttgtacagcggaagtttgataaagaaagaaaagtcagaattttaattgaaggcgattgtgcagttgactacaaaaatgtggacgagagttttaaaatcacaaatcgactagaccgtgaccgatttgaagtgtggtatatgtcgtacaatgcgaatccaaaggcagaatatagatacgataagttcttacatcgtgtaccgtatgagaaaacgccctcggtttatgcagagtgcgatattctgctcaaatccagctggttggaaagtttttcgtatccgcctattgagatgatggccacaggaggtttctgtgttgttgttccgaacaacggaaatcacgagtatctagtagatggggaaaactgcttactatatccacaaggagatatcgacgcagcaatttctgcaatcgaacaaatttgtaacaatgaagcgctacgccaaaaacttgcaaagaaaggctttgaaacagcagaaaaacgagattggaaggttttgaagtcggatattcttaaattgtatatttaaactagtagtcgattaaaagttggtacaacacgaatttgatattttttgcatacttttttgtggcatgagattcctcctgcggagaacctactgcaaatattgatcgtatagaaccattgttctgctaacaagtccaaactcgttccggcgaaattttaattacatcatatcaaaactgccagtacccggtttgtggatactggcagttttttcaataggcagaccgctgtctgcaaaaaagtggctcagaaacgccgacaggcgtttctgagccactaatattatatcgtttccagcagtgcgggcagctgggcaaggtcgtcgatgacatagggactggccttttccagccgggcgcgggactggtgcccgccggtgtacagcacacagaccgcaccaatggctgcagccaccgcagcgtcgtggtcggtgtcgccgaccatcacgcaggccgcaggggcgatgcctgtgcggcgcagatagtcggtgccaagctgtaccttgcttacaccgtaaatgtccgcaaggccgagcaactcggtaaaaaagccttgcagaccccgggcggatacctgctcgatcaggtaatcacggcgggaggcagaaagcacagcctgctgccagcccatgcgggccagcgtttgcagggtgtcaacggcgtgtgccgttacagcgcagccgggcacaccggcgttgtagtgctccataaagcgggcggcaagctccgggtagggatgccgcgcaaagtcgaacccggcgcagcggtagtagtcctcgatgggaaagccgaacagctcccggtaggcagccagatcgtaccgctgggggtagccgtgggtctccagcatccagttcaggcagctgtgggtaaaatccacatcgtccatcagggtaccgttccagtcccagaaaatcataccgttcggctgcatggaaacctccttgtgttattccgttgcaaacaccttgcgcagtgcggcgttgctctcgatcagctttaccagcacgacgcccagcacggtacagctgatcagctcgccgatgcccaccgagatgccgttggtgatgcaggccagccagatgggtgcgctggacgtggggtccgggaacatcacggcgatctcgatgccgatgatcaccgcgttgaacagcaccggcggcaggctggcggcaatggccagacccttgaagcgcacattgcgcagcttgtaggtgacaaggcaggccagcagggtagccagtgtgccaaagatcacatccacgatggtagagcccagcaggtttgcaaggaagcagcccagcacaacacctacgatgtactcggcaccgaacacgggcagcaggcacagagcctcggccacgcgcacctgcacagcaccataggaaaggggctgcagtgccagacacagcaccacatagatggctgccactacaccgcagtgcaccagcttacggacggaagaattctgattcatgataatactccagcggtttgattttgaccgcacaggaaccgccagctcctgtgggttttgcccggcactgctcgagtgatgccggggagcctaaaatcctaagttgctctttgaggatactgcacaaaaaagcacagcagaaggaagtatatcacaaaatcggacagattgcaatgggaagaggacgattaaaacttgcccgccgcgctgctctgggcgtattcatgtaaaaatggaataccggagcgtccgcagacgctccggtattccgaaatttcaaataatgattccgctgaatatggccaaagcgcagcggcggccattccaaatgtttttaacctctggggtggccggtatatgtcagcgctacggtgtcggggccggtgttggcagagaccacaccgcccagctcaaatacggccagcggcggcttgccaaaggctttgcggcaggctttttccagatcctctgcctgcgggatgttggtgtggccgatcatatactcaaagtcctccacatccccggcgcgcttctggcacagatccaccatggcgggcacgactttttcatcgccgcgcaccttggcttccaccttggtcttgccgtcaatcagggtaatgatgggacggatgcccatcagctcgcccatgacggctgcggcggcggagatgcggccgctctttttcatctgtctcaggctgtaaggccccagcacgacctccatgcagttcatctgccgctcaaactcgtggatgacgtggcggatctctgcgccgttttgcagcttgcgtgccatctcgcacagataccagccgaacaccatagaataggtgtggggatccagcagatggatgttcagatggtgctccgggcgctcttcccgcagcatcccctgcgccatcagggcgttgttataggtggaggaaccggatttgttgatgggtacatggatgacatccgtgtagccctcgtccacatactggcagtatttttcacagaactggataggcgtgatggcggcggtagagggcacaccctttgccgcgcgcatcttatcgtagaattcggtgttggtgcagtccacacgctcaacatagtccacatcatccagcaggatgtggaagctcatgatatcaatgccgtacttttcggccatctcctgcgggatatcgcaggaggaatcggtcaggatcgcgatcttgctcataatttccctcatttccattcataatctcgtaggtggccgtggtccagcagctccggaaaatcccactgccgcagcacctcatacacgcccaccgccacgctgttggaaaggttcaggctgcggcaggtgtcccgcatgggcatccgaatgcagtgctcctgattttccgcaagcagtgcttccggcaggccggcatcctcgcggccaaacaccagataagccccgtccgggtactgtacatcggtgtagcgatggggcgccttggtagtaaagtagtagtaggggccgttgttgcgggcaaaaaagtccgcaaggccgtcgtagtaggtaatgtccagataatgccagtagtccagcccggcgtgcttgagctttttgtcgtcgatggcaaaacccatggggcccaccagatgcagacggcaggcggtgcaggcacaggtgcgcgccacgttgccggtgttctgggggatgcggggctctaccagaacgatattcaaggtcggcttgttcatcataagatgccctccggatcctcccgcaggggacacagacggggcagcagcggctcgaaccacacgccgaagcgggtgtcctgcgtgtagggcgtgccctgaatagccagcgaaacaaactctgcggcgttatcggcagcggcgctcagggcgttgccctgcagcagcgagccgatgagcactgcgccgtacagatcccccgtgccggggaagctgcggctgatatgcagctttttgataacgaaacgatccgtgccggtaccggcacagccgatgtacttgcccagcggcaggccggtgaccaccgcgttgggggccagcggctgcaaagcatctgccagcgcctgcgcggcggcatcgtccagctgctcggtcacgggctgctgctgcaaaagcagctgtgcttcggtgtagttgggcaggatcaggtctgccgcgcggcacagattgcggatgcgctcgatcagcgccggggtaacagtggaataggccttgccgttatcgcccatcacggggtccaccaccttgtaggcggcaggccacagggcaaaggctttttcagccagcgctacctgtgcttcgccgcccagatagccggtatagatacaatcaaattgcagttccagcgcctgatagtgctccagcgcggccatgccgtaggcgctgccgtccatccgggcgggggtgcccagaccgccggtgtgggtggaaagcaccaccgtgggcagcgccaccggctggaagcccatgaccgacagcacgggcaggatcactgcaaggctgcaccgtcccacgccggacaggtcgtggatgcaaaggatcttttttggttcaacgggtttttgcaaataggaaaacctccttgccgaaaagccgcgcgcagcggcctataaaaagcatcatacaacagtataccacaaattgctgcataaaaaaagcgcataccagattcttttgcggaaataatagcactgcaagccctgtcatgacaggccgaaaggagaaattcagaatgaaacagcgagaaaattctgccgcaggcatggtagtgggcatggccgccggtgcagccctgggggctgccggtgccatgatggccacccagagcaagcgccagatgcgccgcaacgtgcgcaaggtgatgaagggcgcagaaaacgcggtgatgcagctggataagatggccaccgattttgtggaaaagcacatcgactgctgaacagtaaaaagcgccgtcccgggtggaacggcgctttttgttatcgtgcggcttattttgcccagatgcacatccgggcggtggtgttgatctcgcccagcaggctcagatccatctggatattgcaggtcacggtcagcgctttgcccacctcgctgccggtcagcactgaggcaggcaggtttttgatggtcaggatgccgttgcccttttcaatatcgccggtcagggtgccggcgtaggtcacatcgccgatggtcaggccggacaggtagccggtcacattgagcttggtcacctgcttgacgggcagcgtcagggtgtaggtgccgttggactggcgggtaagggtggcttcgcggtcagaatcgatgccagagttggccatggattccttatcggacttttccttccagaatttgaccccaacgggggtattggctgcggcagaagcgcccagtgtgagcacacagaacatcagcagcgtcagcagggcagcgccggtacgttttaaggcagtggtcatggttttatcctttctgccgcagctgcggcatggtgaaacagagtatataatgccctataaggtactgatttgtcaatactaacataacatgaccggacggcgttgtcaatgcgccttggcagtctttcacaaaaatgtttcgaatccgtcacagagcttggagaagcggaaaagccgcggcctgccattgactgctgtctgacaaaaacgccccgcagcggctgatagaaggccgctgcggggcgtagtgctatttgaggttactttttgccgtgacggccaaagcggtactccttgccctcgcggatgcgctggatgttggagcggtgcatataaatgaccatcgcgcccatgatcaccgagccgatggcacacacggtaagatcggcggcggagtagccccggaacacaccgtacaagatggtgagcaccgggtagagtgccgccatggtcacgctgcccagcgataccatgcccgtgggcagcaggcaggccagaaagatgaccgccagacaggggatcagcaccggctggatggccagaatggtaccacccgccaccagtacgcccttgccgcccttaaagccgaaatacaggggcttcaagtggccgataatggcaaagatggcggcaagatacaccgcaagatacggcgagagcgtggtactctccggcatcagggtgaacagccagcggccgatgcacacagccagcacgcccttgagcacatcgccgaaagcggtaagtgccgctgcctttttgccgaaggtgcgcagcatattggtcatgccggcagcgccgctgccgtacttgcgcacatcatcgtggtacaaaaacttgctgacgaggataccggtgtcgatgctgcccagcaggtatgcctgcacggcggacaccgcagcgatgagaacagattccatcatctgagccctcctgacgtgttatacgtccttggcacccacctcgccggagccgcgctcccgcacgaccagacgaatgggcgtatgctccagaccaaagttttcgcggatctggttgatgagataccgctgatagctgaagtggaacaggtgctttgcgttcacgaaggccacgaacgtggggggacgggtagaggcctgcgtcaggtagtagatcttcaggcggcggcccttgtcgctggggggctgcatccgggcggtagcgcgggcaagcatctcgttcagcacaccggtgggtacgcgggcaccgttctcggcgtccacatcccggatcagctgcatcagcttgttcacgttgtagccggtctgggcagagatgaagatgatgggtgcgtagcccataaagctgaagcactcggcataaccgcggcgctgcagctccatggtgttggtctccttgccttccacggcatcccacttgttcaccacaatgatgcaggccttgccctgctcgtgggcgtagccagccaccttgctgtcctgctcggtaaaaccgacagtggcatccacaaggatcagcgccacgcggctgcgctccacagcagccagtgcgcgcaccaccatgtagcgctccaagccatcgctgatgttgctgcgcttgcgcagaccagcggtatcggtaaagatgaacttgccgtaggcgttgtccaccggggtgtcgatggcatcgcgggtggtgccggcttcattagccacgatcatgcggttctcgcccagaatgcggttggtcaggctggacttgcccacgttgggacggccgatgatggcaacggggatacgatcctcctccaccacggtctcgctgaagtccagatgtgcacacactgcatccagcaggtcgcctgtgccgtgaccgtgcacggaagaaatgggcatcacctcgtcaaagccgaggttgtagaactcgtacagctccatgggggcttcgcccaccttgtcgcacttgttcacggcaagaatgatgggcttgtggctgcggcgcagcatatgcgccacgtcctcgtcggctgcggtcaggccgttgcgcacgtccgtgaccatgatgatgcagtcggcagtgtcgatggcgatctgtgcctgctcacgcatatgggccagaatgccctcagtggccttgggctcgatgccgccggtgtccaccagcaaaaactcgtggccgttccactcgcagttggcaaaaatgcggtcgcgggtaatgcccggggtatcctccacaatggcaaggcgctggccgcacagcttgttgaacagggtggatttgcccacgttggggcggcccaccactgctacgatcggtttgctcatggggtctcctcctttcttaaaaggggtaaaatacaataaaaatggcgttatcagctgccgctctttcttctgcgggcaatgtgcaggccgctgcgcagcagcgcgcgggcttcgtccccgcctgctgtgggcagcacctccacctttacgcccagctgatgccccagctgctccaccgtgatatcgtcaaggaaggtatccttttcctcccgcagcatcacagccgggatgcccagcgtttttgtggcaagtttgcctgcgcactgggcaatgatatcggtggcagtgatcaggccggtcaccccaacattgccgccgaaaaagcggttctggatggtgtggacgtgcacggtgatcatggggtactggcggtgcagctcctccatcatgcgtgtgatgaggggcgctgccatggtgccggtgaccacatccagctccttggtgccgtagacccggtggggcttgtccagctctgccagaaattcttcctcgaacaggcgcatcatgcccacgccgttttccagctggtcgtagtcctcgtagaactccggcgcagggatgggccggcctgccttgagataccattcatcgctggggtagatgatgcgcttgccgtggcggcgcttgcactcatcgccaaattcttccataatgtcgatgacctcggcgctggtctttgcatcgtagggcacctgcgggtacagatttttgcggtaatccgtaatgccgcagggcacggctgcaatgctttgcaccatgggggtcagttccagcaggtcggcaagggtgcggcgcagctcgtcgccgtcgttcacgccgcggcagagcaccagctgacagttgacggcaatgccgccctccaccagccggggcaggtacttgagcacctcgccgccgcgcttattggccagcatccgcacccgcagctgagggttggttgtgtgcaccgagatattgataggggagatgtgcatcttgatgatgcggtcgatctcgtgatcctgcatattggtcatggtgatgtagttgccgaacaaaaagctcagccgctcgtcatcatccttgaaatacagactctcacgcataccggggggcagctggtcgatgaagcagaacatacagtggttggagcaggaatgctttgcatcgcccagataggtcttgaacccgcagccaaagggaccgcgctgcggccgctgtacttcccactcccggatgccgtctgctacccgggctttcaggtggaagctgctgctgtcggtataaaaatcgtagtccagcgtgtcgttcagctcgttgttgtccacgctcagcagctcgtcaccgggggcaaggccaagagcttcggcttcgctgccggcatctacctgctcgatccgtatcgccatctgcatccacctcctttaaagaacaagaaggggaaggctttgcgccctccccttctgtacataacaccattatgccaccaattacgcgcaaattaggccttcttgatgacttcctcgcccttgtagtaaccgcagttgccacatgcctggtgggggagcttcagagagccgcagttgctgcacttcaccagtgcgggggcctccagcttccaaacattgctgcgacgcttgtcgcggcgggccttggaaagatgtctcttaggtactgccatatttttgcacctccttgatgggtttatctgttcagcagtgatttaaggatcgcgagcctagtgtctacgggggcatcggtctgctctgccggtgggcaggtgcattccgcctttttcttaccgcactgcgggcaaagcccagcgcagtcggggctgcaaagcagcaccgtggggatctggaacataaactcctgattgagccattcgtccacgtccaaatgtcctttttcatccagcggaagatcgaaatccgggtcatccagatcccgctccttgacgatccactccgtatcgactgtctcttcccgggtgaccgggtctagacagcgggcgcactctccgtgcaccaatgcctttgcccgcaatgttatctggacctcgtcgccatcggtctgcgcgtcaaagacggctgtgactggctgcgggatccttgcaccggcataatcgtacgcagataaatcacactgaaactctgcatggtacggttttgcgccggctgtgataaactttctcaggtcaaattgcatagtacacctctgaaaaggctgctttgttagtatagcgccaaagcaaccctttgtcaacaccaaaacaggcagaaaaccgaaaaaatttatttttctccggtcttctgcctgttggaaaagcttttagccctgttcttttatcaaattacaggtacttcttcacatcgtggggcagtgcggcctcgtctgcgctgacggtcacggtgaccttcacgctgtcgccggcaatggctgccatctcatccagcacaacgcccagacggttgatatcgtgatccagcaccttcaggatgccgtcaatgtacaggtcggtgatgtcgtagttgcttgccatcaggccggccacaaagccgtacagcatttcgccgccggagatcttgtactcgtccagatcgatcagacgtgctgcaggagcgatgtcgtaggtgagcttcatgcccttttccacaacaacaacattgcctttggaggtcttgaccgcgtcgttgatctggtcgatcatagccttggtcttgccggagcccttggtaccaacaatcagtttaatcatagttcagtcctcctgtattttccacgccttgcggcggga

SEQ ID NO: 742 - DNA, 9118 bp, unidentified
  source 1..9118: mol_type = unassigned DNA
ttatgtgatcgggaacgcgagcttcagcgccaggaacacggcgatcgccaccggtacggcgatgaggaagcgcttacagtttttgcgggcacgctgggacagcgcctcgtcctcctcgtttttccagcggacatagctccagccggcacccagaaggcacagaacggggacgaaatacaggccgatcgacgcgacgtaaggcataggtcatcctccctttttttgtgcttacagtatacaggaaacgggaggaaaggtcaaggaaaagacttgcggggacaaaaaagagacgccctcgggcgtctcttttttatattgtgctgggtccgatcacttggcggccttggcagccttgatggactcgatcagttcgggaacgaccttgaacagatcgccgacgataccgtagtcagccacctcgaagatgggggcggtgtcgttcttgttcacggcgatgatgcactcggagtcctgcataccagccttgtgctggatggcgccggagatacccagagcgatgtagaccttgggatggacggtcttgccggtctggccgacctgatggtcagcggagatccagccggcgtccacgcaggcgcgggaggaacccacgacgccgcccaggacctcagccagctcctcggccagcttgatgccgccctccacgtccttggagataccacggccaacggacacgatgaagtcagcgccgatcaggtcaaccagcttcttggcggccttgacggtctcggtgacctcggtgtggatgtcagcagcttccagaacgaacgcgggatgcaggatctccacgttcttcttgcactcgcgcttcttcataacgccggggcgaacggtcgccatagcggggcggaagcgggggcaaatgatggacgccatcaggtgaccgccgaaagcgggacgggtcatcttcaggtcgcgggacacatcgtggggctcacggttgatcatcacggtgcccagcttctcgatgcgctcctcgggcagggtggaggcctcgcgcaggaagcccttgtagttgggcatgtcgatgtccaggtgggtgcagtccgcgcacaggccggtgtgcaggcgggcggcgcagcggggagccagatcacggccgatgttggaggcgccgaacagcagcacctcgggcttcagctcctcaacggcctccacgatcaccttggtgtaggcatcggtagtgaagtccttcagcaggggggagttgtagacgtacaccttgtcggcgccgtactcgcccagctcagcggcgatgccgtccacgttgtcgcccagcaggatgccgcacagctcgacacccagctcattggccagcttccggccctcggagatcagttcgaaggtggtgggcatcatcacgccctggcgctgctcgcagaacacccatacgttcttgaaggcagcggtatcagcactattaaaagccattttcttttctccttccttagatgatgtgcttggcggccaggatgccggccagcttgtcggtggtagccttgtcagcgccctcgagcatcatgcccgcgcccttctgaggaggcgtgaaggaggtcagaatgttggtgggagaaccggccagaccgatggtgctcttgtcgatcagggggtgatccttcagggtctcgtaggtcatggtgaccagaggcttgctgtagcactcgaacgcgccgcccacggacaggtaacgcggggtgttcagctccttgatgcaggtgatcatgcagggagtcttgaccttgatggtcatgtagccgtcctccagcatgcgcttgacggtcagggtgtcgccgtccttggtgatctcgccggcataggtgacctggggcagatgcagcttctcagcgatctgggggcccacctgtgcggtatcaccgtcgatggcctgacgaccggccaggatgatgtcgtccttctcgatgccgtaggtgtcgatggcggcagcgatgatctgggaggtagcgtaggtatcggaaccgccgaactcacgggcggtgaccagaacaccctcgtccacgcccatggccatcagctcacgcagcataccctctgcgggaggaggacccatggtgaacgccacgaccttgcagcccagctcgtccttcagggacagggcggcctcgacggcgttcagatcgtcggggttgatgatggtctgcatggacgcacggtccagagtgccatcgggattgacggccaccttaccggaggtatcggggacctgcttaacagttacgagaattttcattttccttttacctcctaccttacttcacgcccagattgctggcgatgaccatgcgctggacctcgctggtgccctcgtagatctcggtgatcttggcatcacgcatcatgcgctccacgggatactcacgggtgtagccgtaaccgccgaacagctggacggcgcggcgggtcacatcggaagcggcctcggcggcgaacagcttggccatggcggcgtccatggagtaaggctcgtggttctgcttcttcatagcggcggagtagaccaggaactgcgcggcctgcatacgggtgtgcatctcagccagctggaactgggtgttctggaactgggagatgcgcttgccgaactgaacgcgctccttggtgtacttgatggcttcctcgacagcgccctcgcccaggcccagggcctgagaggcgataccgatacggccgccgtccagggtcttcatggcaatcttgaagccctcgcccttcttgcccagcatacggtccttgggaatgacgcagtcctcgaagatcaggtcgcaggtagaactgccgcgaatacccatcttcttctcgtgcttaccctgagagaagcccttgtcgtccttctccacgatgaacgcggagatctccttcatgctgcggccgcgcttgtcaacggtcttgccggtgacggcgatgaccacgaaggtgtcagctacgttgccgttggtgatgaagcacttggagccgttcagaatgtagttctcgccggactcgtccagcacggcggtggtctgctggccctgggcatcggtgccggcgccgggctcggtcaggccgaaagcgccgatcttcttgccggagcacaggtcgggcaaatacttcatcttctgctcctcggtgccgttctcgaagatgggggcggcgcacagggaggtgtgggcggaaacgataacagcagtggtaccgcagaccttggccagctcctcgacgcacatggcataggagagcacatcagcgccagcgccgccgtactccttggggaagtaaatgcccatcatgcccagcttggccatcttctcgacggtctccatggggaagcgctcttcctcgtcgatctcagcggccaggggcttgacctcgttctccgcgaaatcgcggtacatcttgcgaacgagcagctgttccttcgtcagatggaaatccatacttttttctcctttttctgattttacttgttgtagttgaagaagccttcgccggacttaatacccaatttgcccgcacgaaccatcttccggatcagcacgtttgcgcgatacttgctatcgtgagtctcgttgaacagcacgtccataatgttcagcaccacgtcccagccgatgaggtcgcccagatgcagggggcccatgggatggttgcagcccagctgcatagcaatatcgatatcttccgcggaggcaacgccttcctgcagaacgcaaacgccctcgttgcagtaggggatcaggatcttattgaccacaaagccgggggcctcgttgaccaccacgggggtcttgccgatctccacagacaggttcttgatatagtccaccaggtcggcgggggtgttgccgccggcgatgacctccaccagcttcatggcgggcacggggttgaagaagtgcataccgatcaggtgatgcttcaggccctgacccatctcggtgatggacagagaggaggtgttggaggcgaagatggtctcgtccttgcagatggcgtccagcttgcccagcagttccttcttgacggccatgttctcggccacgcactcgatgaccagatcggcatcggcggcagcgtcaaactcctcgaccagaacgcggctcatgatatcgtccgcggcttcctgggtcatcttgcccttggcgaccttcttgttcagggaggcggccagcttgtccttatgacgctgtgcgctggcggtgctggaagcatacatcagggcggtgtggcccttcgctgcgaaaacctgggcaatgccgctgcccatcgtaccggcgccgaatactgctactttcatgatagttcctcctacttaaatttttacatgaattgcttaattatcaggcggtgtgcctgtcaattaacttacttgttctgatagggctcgtgcttgcgcttctccaggaaggcggacataccctcgatctggtcggcagactggaagcagctgccgaagagcttttcctcgatgacgatggccttgtccatgtccacctgaaggccctcgttgatggcctgcttgcaggcgcggacggcgataggcgcgttcttggcgatggtctcggccagcttctcggcggcgggcagcagctcgtccaggggatagacggcgttgaccaggccgatgcggtaggcctcgtcagccttgatattcttggcggtatagatcagctgcttggccatgccggggctgaccaggcgggccagacgctgggtgccgccgaagccgggggtgatgcccaggccggtctcgggctggccgaagaccgcggtgtcggcgcagatgcggatatcgcaggccatgctcagctcgcagccgccgcccagggcgaagccgttgaccgcggcgatggtggggatgggcagcgtctcgatggcgcggaaaacgttgttgccgtgcttgccgaaggcctcgccgccctccttggtcagggtgctcatctcgccgatgtcggcaccggccacgaaggccttttcaccgctgccggtgatgaccagagcgcggatatccgcgtccgcctttacggcggaaaccagctcgtccaggtcggtcaggacctcggaattcagcgcgttcagcgccttgggacggttgatagtcgccacggcgatgaggcccttcttttccagcagaatgttggtcatatcaagttcctccttatggttcctttccgtgggcgcagcgcccggaaacggcacggggccggcaggtgggcatacgcctcctcatacatatcacattatagtggcccgttagaaatttatcaagtccaaccaaccggctttttacttttttagcggtttccacaaaagtgggcaccggaatttgcacactttttcgggcaggggcgcagcaaacaggggtatcagggaaaaacgtgcttgtatcccggcgcaagatggggtatgatgggagaaaatcgtaaaatggcgaggacatgaatatgcggatgcggaagaaaaaaaatctggcgccccggatggaagcctgcggcgcgtacctgatccgggacccgttcgccctgcgggggcgctggcgggagctgatgccggaggcacgggagctgcgggtggagctgggctgcggcaagggcggcttcaccgtggggaccgcggcggcagagccggaggtgctgctgatcgccgtggaaaaggttccggacgccatggtggtggccatggagaaggcgcgggacgcggggctgcggaacgtgtggttcgtggacggagacgctgcgctgctgcccgatatgttcgccccgggcgaaatcgaccggctgtacatcaacttctgcgacccgtggcccaagagcaaccagaaaaaacggcggctgacccacgggaactttcttaaaaagtatcggcaggtgctggccgagggaggacagatccatttcaagaccgacaacgacaagctgtttgagtggtcgctggaggaaataccgcagttcggattcgcgctgtcggaggtgacgcgggatctgcacgcggacgggccggtgggcgtgatgaccgactatgagcgcaagttctacggcgagggcaagagcatcaaccggtgcgtggccactatggtggaatggacggagccggagatagaggacgtcccctcccctgctgagtaaacagaaaaggcacccctgacggggtgcctcttctgttatttcacacggcgccggggtaagacaccgcggaaaacggtgtcagtcctcgcgctttttgcccacaaacgccacgccagcggcggaggtcagcgccatgccgacatacagagcaatgcccgcgtcgaaggtcttggggctgcccttggtggtggtagacgtggtggtatcgctggtggaggggtagtagtaataggagatcttggttaccgtccaggtaccatcatcattcttcgtcgccttatatccggaaggcacagtaggctgactggtataggtgccgctggtgatagcgccgtccgctacgaccttataagcgccgccgcccttctggacgatcttgtcggccgcaacataggcgtccacatcgctggagaaggtgccgccggtgatgaaaccggtcacaacacccgttgcattattgccaacatagctgccaacggcatttgcattcgtgctgctgaatgtgccgccagtaatgctcacagcgggatcaccgccgggatagttgcacttgtcaatgaccagggcttcgcccgtaggattgccgccatttccatagtacgcatagtccgccttagcaccattacccacgatcgtaccaccggtaacagacacactgccacacttcacgtagatgccggtcgcaccggtaatagtgccgcccttgatgttcaggttgctggtgttcggatagtaaatgcccagaccgccgtcgttcgtgttcgtgaccaccgcaccgtcctcgatattgatggtaacgccgccatcggaagcattgccaataccggaaatcgccgcaccgccggcagccgtcaccttaccgtacacggtgacctcggaccctgtgttctgaacggtaataccgcccttattcgcatccgtgctggtggcgttgataaccatgtccgcggcaaccgtcagcttcgcgccgctctgcacccacgcggcccacttcaggcactccagcgttccgtttttcagcgtcagatcgctatatacatcgaatccgccgccagccgctaccgtcatcgtgcatccgccgaaatcgattgtgagcgcctttttaacttcggtatagctgtcgccatccacagttaagtcattcacaagcgcgatagtatccccggcctgcgccgcagtgatagcctctgctatcgtcttataggttgcgtccgctgcgcgtgccggtgccgttgtgtagcttacacttggatcgaccttcaatgtgacagggtcatccgcccagctgacgctgcacagccctatggccatgaccagggccagaatggttgctaatgcttttttcattgttaacactccccaatgattttgatatttccgcagggtgcttcgttttaagcttgttaaaacgccaaagcaggagtactcctgcggatagggcaattataccacaaatttcttggttgtccagagggttttgtaaaatatgccggtttttccggttttggggcaaatagggggaggaattggggggaaatgggaggggggaagcgcgcggggcgcgcgacacctcatccgcccctgcggggcaccttcccctcgaggggaaggcatgggggttccgcgcctgcgggcgcgggggacggattgccacggccagtctgcggactggtctcgcaatgacagggacgcaagaaggcagattttcttggtaaaacctattgacattgtagggtttatgtgctaccatgcacttacctacaaaaaagatatgttaaaggagtgatcctatgcaggtctatgcagataatgcggccaccacgcggatgagcgacaaggccgtggcggctatgacgccctatttccagcagttttacggaaatccctccagcctgcacaccgtgggccaacaggccgcggaggcgctggtggacgcacggcggcgggtagcggactgtctcgggtgcagctttaaggagatcacgttcacctccggcggcagcgaggccgacaaccaggccatcgtctcggcggcgcggatcggcgagcgaaagggcaagaagcacatcatctccaccgccttcgagcaccacgcggtgctgcacacactgaagaagctggaaaaagagggctttgaggtgacgctgctgggcgtgggtcccacaggcaccatcaccccccagcaggtggcggaggccatccgggaggacacctgtctggtgaccatcatgtacgccaacaacgagatcggctctatcctgcccatcccggagatcggcaaggtgtgccacgagaagggcgtgctgttccacaccgacgcggtgcaggcggcgggccacctgcacatcaacgtgaaggagcagaacatcgacatgctgtccctgtccggccacaagttccacggccccaagggcgtgggcgtgctgtatgcccggcagggcatccccctgaccaatatcatcgagggcggcgcgcaggaacgcggcaagcgggccggcacggagaacatccccggcatcatgggtctggcggcggcgttggaggagtcctgcgggcacatcgatgaggacaccgcccgactgacgaagctgcgggacaagctgatcgcgggactgagtaagatcccccacagcgcgctgaacggcgacccggtgcaccggctgcccaccaacgtgaacttctgcttcgagggcatcgagggcgagagccttctgctgctgctggatcaggcggacatctgcgccagctcgggcagcgcctgcaccagcgggtccctggaccccagccatgtgctgctggccatcgggcggccccatgaggtagcccacgggtccctgcggctgagcctgtgccacgacaccacggaagcgcaggtggactatattctggaaaaagtgcccggcatcgtggcgtatctgcgggatatgtcccccatgtggaaggacctggagtccggcaagcggacattcattctgtaa

SEQ ID NO: 743 - DNA, 8071 bp, unidentified
  source 1..8071: mol_type = unassigned DNA
atgggagataccaacaggatgagcacaaattccaaagaaaaaagaaataattacatttatattttaaaggctcttgccatattcagcgtaatatgtgcacactctacaccactggttgatggcagcaccaaatggaatgttctcagttcacagctgctggattatctgggaacatttggggtacccatttttttcagcatttctggttatctgtttgccggaaacacgcgaaactggggggatttttggaaacgtaaggtgactacacttttttggccctggatctgttgtgagacactgttgtggttttatgtggtgctccgaaaaggcggcatcagcatagctgcatggctgttgtttcttctgggttatcatcatacgacatattatctcaccatattagtactgttttacgtgatctattggaaaatacgaaaccatggtgtcatttggatgctgaatgctgttttgatcataagtatactggagactggatggaatgtgggaatatttcatcagctgaatatgattctggacagttattacctgaacccgtttaactggatgcttttctttggaataggattactgatgtaccgggatccgcagaaagcaatacaaagttttaaaggatggtgggggattttatgcatatgtggcagtgcagtatactttagcgtccatctttacctaggattggaattctattatttttcaaagtatgcgttgattggtgatttattgagtctcggaaccgttgtatatctcgggcggaaactgatgaatgggaagaaaaaagaggtacttctgaaaataggagactggtctttttccatttatctgctgcaccagtttgtagcgggaattgtagtggctatcacaaatcgttgggatttctttgtacttacattgtgtcggccatggatcatattggctattacagcctgcatagtgatggtgatagacaggatcttccgggaaaagctgtcctgggtcaggacaattataggaatccgatgattctgccggcaaagtgaatagaccattaatgttggaagcttttcctgtgctgttggcgcgtcggcagataggcgagtgattaagcattggtagttgagaaaacagccctcacatgttataatatcagataatttgaaaatacaaaaataaacgttggaaaggttaagaaacgatggaagaacgtgaaattgatttactggatatgatagcagacattctgtcacattggagagggttggttgttgcattggtgattggtgcggttttgatgggaggtctgagttatgtgaaatcctatcaaaatatacagaatatacagaatgcacagccaatagaagaggagacaacgctggatgcagcaacggtggaaaaacagttgatgcaactggaagaaactttggaggaaagccagaaagcggcggttttgactacaatggatgacgagagagagtatatctggaaagagaattatgcagagaattccgtgtacatgcagttggatccttttaatattgcacagcgacagttggtataccagattaaggcaacggaggaaaaccagaaccagtccttgggaaccacttatggggatgtgctcgataatgtaggcatgtataattgggtggaagagaagaccggtgttccggcggcttatgtaaaagaattaataactgtcagtacaacatcagcaatttcgattgcaaacgatcaatttgcaggtactgtgggaacagacagactgaaaataacagtaatacaaaaagatgaagaatcctgcaaagaactttccgatgcagtaaaggcttatgtggaacagcagaaggcaacattggcaacagaagtgggaaaccatgaactgattttattatcggaatctgcaggaatgaccttaggcatggatgttatgaatcgacagatagattatggcaatcaggttagtaatctcagatctgggatcgcttctgcaaaagcaggatttactgcagaccaggcgaagtattatgatctgttgacttgggaagagggaatggatgaggcagaaatagtgcagaaggataccgtagaggaacaggctgtggcagtttcaccttccgtcagcaagaaatatatcctgttaggagctgttttgtttgcgtttgtttatgccggaattctgttcttggtatatattttcaacagtaagcttcgtgtgtccgatgaattacagagtttatatcacattccccagatcggtgtggtggtaaaggattctaagaagaagtttattctggataagtgggtagatgatcttcgtcactacggtaaacggaagtttgatgccgaacagtctatggagctggcatttgtggcagtgaagattgcagcagtgaaaaataaactgaatactatctgtctgatgggatgtaatctggaggccggtgccggcagtgtatgtgaaaaccttaagacagcattagagaaggaaggcatcaacgttacagttctggataatgtcctctataatgcagagtccatggagaaagtagaggctatgacgggagtggtattggtagaaaaagccggttctactttgtacaatgaagtcgcaaatgaattggcattactgaagagacaggatattacagttttgggtggaattattgtagaataagatatattaagcattgttaaagactgcagaattcttgtctgacgagacgatagtagccaaagtccttttatgaaaaggactttggctattttttctggaattatactgtctcagagaatatgcgtaacaattgcgtttttccatataatatgttatgatgattaggaattttaagtgttgaaagtgaggacattatgttattagataataaatccattttgattacaggtggtaccggcagttttggtaaggcatttaccaagtatgtgttggacaactacaatcccaggaagatcatcatttattcccgtgatgaattcaagcagtttatcatgcagaatgaattcaaacagtatgctgataagcttcgtttcttcattggtgatgtcagagacaaggaacgtctgaccagagcatttgaaggtgtggattatgttatccatgctgcagctctgaagcaggtgcctgcctgcgaatacaatcccgctgaggcgatcaagaccaatatccacggtgcgcagaatgttattgatgccgcattggataccggtgtgaaaaaggtggttgctctgtccacagacaaggctgtcaatccggtaaatctgtacggtggaaccaaactggtatctgacaagttattcattgctgctaacgcttatgccggaagcaaggatatctgcttctccatcgttcgttacggtaatgtggccggaagccgtggatctgttattccattcttccacaacattatcaagaacggcggtaccgagctccccatcaccgactatcgcatgacccgtttctggatcagtctgcagcagggtgtggaactggtgatcaaggctttggaagagtccaagggtggtgagactttcatctccaagattccttctttcaagatcacagatctggctcaggcaatgctgccgggatgtgagatgccggaagtcggaattcgcgaaggcgaaaagcttcatgagatcatggtaaccgtggaagattccatgaacacatacgaatatgacaagcactttattgtatatccccagatggtatggagtgaatccagacgtgctgttcctactggcaagagagtcgctgagggattctcttatagttccggtaataataccgagtggctgagtgtagagcagattcgtgaattgttaaagacaattgatttagaaaaataattttaaaaagatctgccggtatgagagcagatcttttgtttttattccaggggcttatttcttaaatagcaaatcgtagtaggaaaatgagcagactattagaaagaggactagcatatgtgtggaattgtaggatttacaggaaacagacaggcagcaccgatccttctggacggactgtcaaaattagaatatagagggtatgactctgcgggacttgcagtccgcgatggcgatgccctggcacaggtagtaaaggctaaggggcgtctttcgaatctggtcgagaaaacggacaatggaaatgctttgaagggaacctgcggtatcggacatacccgttgggcaacccatggcgaacccagtcagatcaatgcccatccccatgtctccggcaactgtagcagatccggttccggcgcggtagaatcggaagtggtaggcgtacataatggtatcattgaaaattacacggaactgaaagaaaaactgctgaagcatggttatacattttacagccagaccgatacagaggtagcgatcaagctggtggattattactacaagaagtataaactcggtcccattgatgccattgcgaaaaccatggtgcgtattcgcggatcctatgcgttggagctgatgttccgtgactatcccggtgagatctgggtagcccgtaaggacagcccgatgatcatcggtattgcggatggggagacctatgtggcgtccgatgtcccggctatcttgaaatataccagaaatgtgtattatataggcaaccttgagtttgcaaagctgactccgggagaagctcatttctataacctggacggggatgaaatcgagaagcagactacggaaatcaaatgggatgcagaagcggcagaaaaggccggttttgaacatttcatgatgaaagagatccatgagcagccgaaagcagttcaggataccctgaattctgtgatcaaagatggcaggattgacttcgaagcagtgggaattaccgaagatgagatcaagggctttgaacagatttatattgtagcctgtggttctgcatggcatgtaggcatggcggcacagtatgttctggaagacatggcagatatttcggtgcgtgtggaacttgcatcagaattcagataccggaaaatgtccctgaacccgaaggcactgatgatcgtggtcagccagtccggtgagacagcggatactttggctgcattaagactagcgaaggaaaagggcattaccactatggccattgtcaatgtggtaggcagtagtattgccagagaagcggataaagtattttacacactggcaggcccggagatttctgtggcaaccacgaaggcctatagtgcgcagcttgcagcaatgtattgcctggcagtgcagtttgccaaagttcgtggtaagatcacagaagagcagtatggttattatattgccgaactgctgacgattccggagaagatacagaaaattctggaagacaaggagcgcctgcaatggtttgccgcaaagtatgccaatgcgtctgatgtattcttcgtaggacgtggtatagactatgccgtttgtctggaaggaagcctcaaactgaaggaaatcagctacattcattccgaagcatatgcggccggggaactgaagcacggaaccatcagtctgatcgaacagggaacgctggtgatcggtgttctgacccagaacgagttatacgagaagaccataagcaatatgctggagtgcaagagccgtggtgcataccttatgggcatgactacctatggcaattacgaaatcgaagatcaggtgaacttcgctgtctatgtgccgaaggtggacgagcatttcatggccagccttgcggtgataccgctgcagctgctgggatattatgtcagtgtcgcaaagggactggatgtagataagcccaggaatctggcgaagagtgttacggtggaataaaaaattgggaacggaaacgccagagcttctaaaagctctggcgtttttgaaaagagtatttaaataggttttgcaagatctcccacatgaggattgtcaaaaggtatctgctcccggttatcatcctgaacaatttcttccacggtactgccggcccacatagtcatggacggtgttgtcttacggattgtctttttggctaccggtttccgatatgtgacggatgtgatggtgcacatcttatcctggacatggacgacctccccggtacccttcacaaattccagatatcctaaggattccccggtatccggatccacgatctcgtggtcggaaagagaatataccagaaatttgtccccttcctgcaccccattaatagaaccaacattaagagaaacatcacaattatcatcggatacatgtacgatcttaatctgtttactcattggaaacctcctgatttaatattttatagatataaggcacgatatcgcttgttatagtagggcgcacaataatattatttttattgtcattaatataagagacaaaatcggaaatttccgaagcggagacttggttcttgctccgcatgtcaccgggaacgatccgaatctgtgcggattttccgccgctgtttatagtttctactaatccgaatccaattaatttttcgaaattcccatccttcttataaaatgtaacaatcgagttgtatgtgataaaatcatgtgttttacaaatacagacattgtgactgcattcgatgatggatatcgtgggaacagccttatcgtttttggattctaaccatagctttgcacacatccagatggcaattaacagaaagaataaaacaatagaaaatgcccaaaaggggacagcggcatccggaggaaacaggtaaagtagaatggtgggaatcaatccgatggcaaatgcaatcagattatatttatccataataaatttccgcatttaagatcaggctcctttcgggatgttttataaaaagtataacattatctaatgagggagtaaagtttttgacggctaaagtgatttcgataaatcgagggaacttaagaatcgtggagcggagaattgcaattcataccatattatatggaaaacgtaatttctgcgaatcagaattccggcgctttatatatgaataaatattccttgcaacatatcttgaaagatactatcatcaatgatataatatgaaataacaaagtaatcagtaacatagaagaagggtatgaattatgaaagaaaacgatataagagaagatatgaatggcataaaatttgaaattttgcgagatgacgaggagcggaaaaaagatcagctaaaaagattgcaggcatatgtggaagcaatacagaaaaaagtgtcgagtcatacggatgaagttgtcaaggaattggtggcagagagacatcgacagggtttgacacagagtgatatcgcggatcgtacagggatgaaagcgtctaatattgccagactggagaatggctcgggaattcctacattggtggttttggaaaaatatgccagtgcattagggaaacatattgaagtaaaaatactgtgaaagaaagtaaacataagatgaaattatatcatggaaccaattatagttcagcaataaatatagttaatcatggaatcaatctgaaatatagtaaaccctatctggattttggcccgggtttttatacaacgccaagctatgatcatgcagcgctggcagcaataagaactactcagaaatataatgcgaaaaataataaaaacgaggaaccatacattgtagaagtagattataaaccgataagtgcaatggatttagtaataggttcctatccacgacattcggaaagatggggaaaatttgtcctgaataatcgattgaaaccacagatgctgtctgcatacaatatactagagcacaatcaggatggaaaatacgatatttgctatggagaaattgcggatggcaatataattaatatagcgtataaggttaacggaggcaaagtcataccggaagacattaattataaggagtttttgaaagataatggagaggtatatccgcaacagtattcctttcatactttaaaagcgatatcttgcataaaagtattatcttgtgatatgataaataacaagaagaaatatttgaacgcaaggggaagaaggtga

SEQ ID NO: 744 - DNA, 27996 bp, unidentified
  source 1..27996: mol_type = unassigned DNA
gatggatatttgtgcgaacgcggggttgccggccaaaagggcgggaatgagcccgaaaagcaggtaaaaatatttcatagtgaagcgattataattgcaaattcaatatgcaaatttatgaaattatttacaaaatccttaactttgtcttaagttaatacagagacaatcatatgaaatatatcggagcacacgtaagtgctgcgggaggtgtggaaaacgcgcccgccaatgcacacgggatcggggccacgggcttcgcccttttcacgaagaaccagcgccagtgggtggccgcgccgctcaccgcagcgcagatcgacgccttccgcacggcctgcgaccaatacgggtatacacccgcgcagatcctgccccacgactcgtacctgattaacctcgggcatcccgaacgggaggctctggagaagtcgcgcgcagccttcctcgacgagatgcagcgctgcgaagcgctggggctcgaccggctgaacttccaccccggcagccacctgcaaaagatttcgcccgaacggtcgctcgacctgatcgccgagtcgatcaatatcgcgctggacaagacccgcggcgtgacggccgtgatcgaaaacacggccggacagggttcgaacctcgggtttgccttcgaacacctggcctacctgatcgagcgggtcgaagacaaatcgcgcgtgggggtctgcatcgacacctgccatgcctttgccgccggatacgacctgcggacggcggaggcctgcgacaaaacctttgcggagctggaacgcgtggtcgggttcgaatacctgaaaggcatgcacctgaacgacgccatgaaaatcctgggcagccatgtcgaccgccacacgccgctgggcgaggggatgatcggcatggaatgtttccgctatatcatgcaggacgcgcgtttcgacggcattccgctgatccttgaaacccccgacgagcagcgctggccggaggagatcgccctgctcaagtcattggccgaagaataggaaaccattgactccgcagccggagcaggcacggcgatgcggaaaattacggccggcatgcgccgtcgtcggaaaatagttgccgcatatgtttaattgcgggtaatcgcggccgggagattccggcgtaatacgaaaaaagagggtttccgaccctctttttcgtttggccgcccggcctatcccaattcgtcgaggcatttgaggatcagtgccgcgcttccgcggatctcctcctccgagatcgtcagcggcggcgagatgcggaacgccgtgtcacagaacagaaaccagtcgctcaggatccccgcctgcttgaacagttccatgatgcggtagagtttctgcggttcgcccaattcgaccgccagcaacagtccgctgcggcggatttcacgcacggcgggatggttgccgagcagttgtgcgtagagtgtgcccttcgcctcgaccccttcgacgaccttgttgtcgagcaggtaattcaatgccgcgagcccggctgcgcagcataccggatgtccgccgaaggtggtgatatgccccagcacggggttttcctgcagggtctgcataatctccggcctcgaggcgaacgctcccagcggcatgccgcccccgaatgccttggccaggcacacgatgtcgggcgtaacaccgtatttgagcatggcgaacagcgctcccgtgcgccccatgccggtctgtatctcatcgaatacgagcagcgccccgacttcgtcgcaacggcgccgcagcgcctccagatagcccgggacaggcgggcggacgcccgcttcgccctgcacgggttctgcaaggacgcatgccgtgcggcgcgtgatgcgctctaactccccgaaatcgttgaattcgattgcctgcacgtcgggcagcaggggccggaaagctcctttccactcctcgccttcgggagcccccatcatgctcatcgacccgtgggtcgacccgtggtaggcacgccgcatggagaccagctccgtgcgtccggtatagcgtttggccagcttgagcgccccttcgaccgcttcggcgcccgaattgacgaaatagagactcgacaacccgcccgaaagcagcgacgccacctttgcggcatactccacctgcggcgtttcgaccagctcgccgtagaccatgacgtgcatgtaacgcgcggcctgttcctgtacggccttcacgacggcaggattgcagtgcccgacgttgctcaccgatactccggcgaccaggtcgtaatagcgttttccttcgggcgtatagaagaacgacccttcggcgcgcgccacctcgaccagcatcggggacggcgaggtctggccgacatgggccaggaattgttttctgaggatggtattcatggtaggtttccgaatttgcgggcgagaattcccttggcgtccttcacgctggacatcatccagcggtagagcacttcggcctgccgcgcctcgtccatgcgccagtcgccgaccgtgagccgtacccgttccgagagcatgtagatcaggattgcggccgatgccgaaacattcaggctttcgaccatgccgcacatcgggatgcgcaggaattcgtcggccccggcaatgacctcgtccgatattccggcgtgctcggtgccgaagaccagtgcgaacggcccgcgcgtgacgtcgaaagtctcgggcgtcacatcctcgcggtggggtgtcgtcgccacgatgcggtacccgtcccggcgcagtgcggcgagcgccccagcggttgagctatggcgccgcacgtcgacccattggtcggtgccgcgggcgatatcgggattggggtcgaatctgcagagtgtctcgacggtgtgcatctcctgtatgccgaaggcttcgcaatggcggatcagcgccgctgcattctgtccgtggaacatgttttccgccagtacggtcatgtagcgcgtacgcatggcgaccgtgcggcgaagtacctcattgcgttcgggtgtcatgaactccgcaaggctggccgtacgcgcgccataccaggcggtgtccctatttgcggtatttttcatcttcatcgaggattttcaggtaactctcgtagcgggcataggcgattttcccctccctgaccgcttcgaccacggcgcaccccggctcgtgagtgtgggtgcagttgtagaagcggcactcaggggcgacgcgcatcatctccggaaaatagtgccacagctcggcatcgtcgatgtcgatcagcccgaaccccttgatgccgggcgtgtcgatcaccgccccgcccccggccagcgggtacatcgtcgagaaggtcgtggtatgacgccctttatggtggctgtcggagatctcccccgtacggatgtcgagcgacgggtcgatggcatgtatgagcgtcgattttccaacgcccgagttccccgacaacagcgtcacgcggccttcgagcagttcgcagaccgcttcgacgccgacaccttccgtggccgaaacctccagcacgcggtatccggcaccttcgtatacggcgcggaattccgccatggctgacggatcctgcaggtcggctttcgaaagtgcgatcgttacgggcaccttgtaggcctcgcaggtcaccaggaagcggtctacgaactccgtggctgtttccggggcccgcaatgtcgccagcagcaatgcctggtcgatgtttgcggcgatgatatgggactccttcgaaaggttcgaagcccgacggatcacatagttgcggcggggacagatgtcgcagatgacgtagtcgcccccgtcgtcggactcgcaggtgacctggtcgcccaccaccaccgggttggtcgaccggatgccttttagacgcaggcgcccgcggatgcggcagcggacggcctccccgtcgtgcagcacctcgtaccaactccctgtggcgcgtatcaccacgcctgtgaaccgttttcccatcggctattcttcgtcctgctcccgcgcctgccgcggcacctgttcgccgacccattccaggaacgggaaaatacgctcggagaggcgcatgacgggtttgtaactttttgatttctcgatcgtacgggcccctatcagggtgtagtcctcgttcagcgtgtcgaacgccgaaaacaggacgctcagcagcagcatgtatttcaaaacggatacggcgatgcccagtacgatatcggctatcccgaaccccgcaaagtggcacaacttgcgtaccagccgtcctgcgatggctaccagcaggacgaccgccaggagcaccacgacgaatcctccggcagctgaaatcgtctcgtcaagcttgagccaggcgccgacttcggcaccataacgtgaagcaacccagatgcctgcgatgattccggccaacgaacatacctgcatgacaaatccttggcgccaaccgttccagacggctaacaccagcatgaggcagacgatcaaatcgatagtgttcacaaatagctgtaccttattttgtttcggtcgtaaatatacgataaattaccgaaaatgcccaaaaaaagaacccttcggacgataaggccgggatatataaatataggtatatcccttttagcgaattacatcgcgcaggctcacactcagcgcattacaaatgatacacatcgttttgaccgtaaggttcgtacgtcccgcttcgatacggctcaaattggatctttccatgtcgcaacggtatgcaagttcctgtaccgtcagacgtcgctccttcctcaactctctgatcctggaagagatataggatatctcctcctcgtaaacaactcccatttcaaaaatttggataaaaattttgttgtgcaaatttttatatatatatttgcaccatgcgtatcatatatgataccagcaactatggtgtcataactggaaaatttaatgcgtcaactaattataaagaatgcgtcacttaatacaaataacgtgtttgatggtctgaaaagtctatgaaatactacaaaaggcagactccgcgaatgagaaatagcaagcgtcactctattgataaaactaaatgcgtcaacactaaaaaacaattccatttcaattcttcattactatgaaaaaaaacttattcagaaaatttcttgcactgttcctcacgggaacattgttagccggtgtcggttgtaaagactacgacgacgacatcgacaaacttaacgaccgcctcgacgagttgaccactggtaaaattgcgactctggagtcgcagctcggttcgttgcagacagccgtcgacaacctgaagagtgccgatgatgctctcggaaaacggatcgacgagctcaagagcgacgctgacgccaatgccaaggatatcgaagctttggagaaggcgcaggatcagctccagaaggacatcgacgccatcgaaaaagaccttgcagacaattatgtaactaagagctatctgaacacgacgctctcttcgtatgcaactaccaaatatgtgggtgacgccgtagcggctgttacgaacaatcttggtaaattcacgacggagaaggctattcaggatgccatcaacgcagcaaaggacgcagctatcgcggctgccggcgacgcttgcaaggatgcattccagacgtcgttcaatgctgccgtcgcttcggccaacctcgtcaatgagaccaagttgacccaggcgatcaacgactacgacaccaagatcaagcaatacctcgaggatgccattacgaaagaggacggtttcatcaacaaggccattgccgaggctgtcagcgatgctgtcgcagacctgcaggctatgatctccggtcgtctgaccagcgtgctgctgatccccgacctgtatgtcaacggcatcgaaaccatcgagctgaaatcgctttcttacgaggcatggaaagtaacctcgagcgcatcggccgagaccgtgacacaaggttcgacgacctcgacgactgctgcttcggctacttcggtacgctacaacgtaagcccctcggtcgttacgaaagaggatatcaaggatcccagtttcgtgttcgagaaggctgaagttcgcacgcgcgctgctgtcagcgagcaactgctgaacgtcgcttcgtgggatatcgcaggcggtgtgctgaccgtagacgtgaagaagacagcaggtaccgctcttacgctggatgcaaaacacatctacacggctgccctgaaagtgcccctcgcagacaaatacctcggcgaaggcgaagtaggcactgccgtatattcggactatgttgcgctgaccgaaacggctatcgagccgaaaatcgccgccctgatcgacctgaactcggccaagagcgaggacggtgaattcgagtgcgatgaagcagcggatcactatcacttctcggctgattatgaggctgcacaggctgccgatccttcgttcaccgaagcatacaacaagccgatcgacctgctgtcgatggttaccggttgctatatcgacgatgatgaagccaaagagatcaccaaggaagcgctcaaggctgccggcctcgagttccgcttcgtactgccgaccaagccttacaaggtaggtgacaacgataccgaccagcagaaattcgccagcgtagccaatacggacggcgcgtggacgctgacctcgaaactgcccgacggcacgactaacaaccaggctgctatcgacaagacgccgatcgtacgtgtcgagctggttgacgtgaacaacaagaacgccgtcgttgacgttcgttacttcaaggtacagtggctgaaggagaagatcgctccggttgacctgaaggttctcaagacgttcgactacacgttgacttgcgatgccttcaagggttcgttcacttgggaagagatggttaccaaggtactcggcaaactcggtgagaacggtctgtcgcaggctgagttcatcgcaacctatgctgctcccgaaatcgccgctaccgatcataccgtaggtaccgtggcccaggccgctgctgacggtgtcgagctgctttacaacttcgacgctactgctgccgagtccgctgccgccttcacctggacgctgacgcccgagcagatcggcaacgtgatcgccgacctgattgctggcaaggaagtgaagaaggttgtcaatgtgacgatccctgcacagaacgtataccagggcaaactgaccttctcgttcgttgtgaacatcaagaagccgaccctgccttcgatctacggttacgactcttcgttctggcactccgattacacgctggcttatgtttacccgatccagtacaatacgcccggtgcatatgcgacctgcgcataccgctatgaactcgaccgtctgttcgccgacagcaagcccgtcacgaacctgctgccctgcggcaaatgggatatccagttcgccaagaagcagcctgctacgggttacgctcccgcactgacgggtgccgaacctgccggtgaaaccgacgtgacgggttatacgctgaagaagggtgttatggatgccgtcaagctcaactacaacggtatgggtgacaactggtatgctcccgcaaccacgaacccgggtgccgtcaataccgccgccgctgccgacatcaccgtacaggtgctcaataacgaagccggtatcgggatcctgaagcagcaggcaacgctcaaggtatgggctgcgatcaacccctataaccacatcgagctgacggatttcaacgtatatttcgtcgagcctctgaagatcaacaccgagctgaccgacgcctacttcgtagaccagatcatcagcggttccgaggttgactgctcgaaggccttcaccatgaccgacttcaaggactacatcgtggctgaggtgacgaccggtacggacgagaaggagaaatatgcttccgacctctatgcttactatgcagtgaatgcccccgcttgggatctggccaatgccaagaccaacctgaagaaagatgccagcggcaactacgtagtggatgggacgatcacggcacagactgccacgatcaaggctgaagaccgtttcggtgtgaactgcatcaccaaggatggctcgaagcttgtcttcaagaacatcaacggagtgaaggtcgagaaaactgtgaagctcttcatcccggttaccgttagccacaagtggggcacgatgaccgccaacgtgacgatcgagctgcaccccgaagagcctgctaactaattctgatcctttccgcggaatccggcgctgcctcgcagcagcgccgggaacccgggaaatactccctaaggcaggggtcgcacatcccaaatttttttggtaacaacaactcccactttcaagtaaaactcctgcctgtggcagaccgaagaggcgcggtctgccgctttttttatgcccggaagtttccctgcgttctctcgatccgcattgtgggttcgttatcctggagcccggttttttcggggggaggtttttgtacggctcccgtttcttgtgtggttcgcggttctcgcgcggattgcggctttcgggcgatcgctaggctgcaggcacggaatgcccgggcatcttatggaatatccgtcgttgcatcgggcagcggcggatattcctgccttttacgggcggttgtttggcccatctggagactgatggacgaaaaacagccgggatccgaggatcccggctgtttcgctattcggttggtgtgtcgtaaatttttcttttgcccgttattttgcctttgcggcctttgccgccacagccttgtccagttcgatgatgaaatccgagaggacgttcatgtagttgatgaaagcgtcgtaggccgaatcgtaggggttgaaataggagtgtacgtcaccgtccgagagccatttggtagccatgtagtagaaatggtcggaggtctgcatgaaactccacacatagtcgaagtcggggcttttcagtgccgcgatcttctccttctgggcgtaaagcttcgagaacgcttcgttctgcaactcgttgccgagccatgccgtcacgtcgcgctcctcgtcggcccacgacatcacgtgcggacagtggagtactgctacgggctggtgtttcttggcggcttcggtgacggtcgcgaactccagaccgtttttcttggcgaggattgccttcggcagcgcgcgcatgaactcgaagattcccgtgtcggcggtctggtgttcgccgaaagtttcatagtccatgaagaggttgatgacctcgcccggagtctcgtccgaagcgagccattttacatatttgtccgccgtcagcggccattcgttccaactgcggttcgagaagcggaaggcgatgtcgtccgagagtttgtagttgcgcagcagcaggcgcagtttctggttgacggcgttggcgtatacatagttgggcgatttccagcccagcacgtgcttggcaccttcggccagcatcgtacggaagcccatttcggccactgcggcgccgatgtcgtcggagtagatcagctctgtgtttcggaaggcggtcggtttcaccccgaattccttttttataagtgccgtgtggagttttacctgttcggtgaaatcctccttcgaagccagcgaggccagcgagtgggagtaagtctcggcgaggaactctacgcaacccgtggcggccagttccttgaacgattcgaggacttcgggcgcataggtgcggaactgttcgatggcgatgcccgtgatcgagaacgagcagcggaacttacccttgttttcccggatgagcttcagcaacagggcgttcatcggcaggtagcattgccgggcgactttctgcatgatggagcggttcagcaggtcgtccagatagttgtgatccttgcccatgttgaagaagcggtacttcttcagtcgccagggctggtgtacctgaaaatataagcagacggttttcatagggtagctattttattgttttttattctcttcgatcaccgcttcgtatacggttttgattttggctgcggcatcgttccatttcaggttcgtgacctcttccaggcctttcgaggcgaacatccccgcaagcgccgggtactggatcagcccgtagatggcatcggccagggcatcgacatcccagtagtcgaccttcacggcatagtcgagtacttcggccacgccgctctgcttggagatgatcaccgggacgttcgaacgcattgcctcgaggggcgatatgccgaacggctccgaaaccgacggcatgacgtagacatccgacaactggaacatcttgtgtacgtcctcgccgcgcaggaatccggtgaagtggaacctgtcggcaatgcccagccgcgccacgcggcggatgacgtggttcatcatgtcgcccgagccggccattacgaaacgtacgttggggactttcttcagcaccttggccgcggcctcgacgaaatagtcggggcctttctggtaggtgatacgccccaggaacgtgacgatcttgtcgtccacgccccgttcgggcattttgcactggcctgcggcgaaccgcacggcattgtgtaccgtcacgaccttgtcggccgggacgccgtagcggttgatgacgatgttgcgcgtgaggttcgaaacggcgatcacccggtctgcggcatgcatgcctgcacgttcgatggcgtagacctgcgtgttgacgttctcgccgctgcggtcgtattccgtggcgtgcatatgcacgaccagcggcttgcccgatacgcgcttggcggcgataccggcgtagtaggtgagccagtcgtgggcgtggatcacgtcgaactgcccttcgaggtctttggccacctgcgccgcgactacggcatagcgggcgacctcctccataaggttggcgccgtacttgcccgagaaggtatagcgttgtttccaggcatcggtcgtcgaccagactttctgtccggatttgacgtagcgctcctggtactgttcgtactcttcgggggagatgtaaggtaccatgttcgagtcgatgtggatgaacgacatcttctcgagaatatcgtccgcgccgcttcccgtagatccgtaaagcgcctccacgtcactggcattcaggacgtgcgtgaatcgctgatcctcgtcgccgtaggcatggggtactacgaatgttacgtcgacatcgttgcgtgccagcccgcgggtcatcccgtaacatgccgttcccaaaccacccgcgatgtggggcgggaactcccaaccgaacattaaaactctcataactatatccttgttttgcaatttttacctttcctctcacaggaacgtcccggctcacggccacaagccgcggttgcaagtccggacgccccggaatcccgccttggcaggattttcctcccgtcacagcctgttatttcccagtctttatcttttttgtcgcggcctttgttgcggccggctttttttccgtcggtttcttctccgcactctttttcgctgcgggtttcttttctgcggcctcttttgcgatggccgtctttgccgcagttttctttggtgtattgtccgttgcggttttctttaccgcagcttttttggcagtacttttcgccacgggcttcaccgccttcgcggctttcccagcggtgttgctttcccgggcctcctccttcgtgcgctcgcggatcatgctgtggatattgagcacggccccgacgctccacgcctgcgagatagcgccgcgcgatgcgtagggcgggtcggcatcgtaaagctcgcaaatagacccgataccgtagctctggatgtcttcgtcgaaattggcgagtatctcccgggcctgcggcaggaatgcatccccgtcgatatcgaaacatgccttgacgtagaattgcagcagccacggccatgccgaaccgttcttgcccgcgaaatcgcgctctgcgggcgaacctccttcctgcgaacctttgtagagcaggttgcggggcgagagtgtccgcagccccttggggatgagcaggtgctggcgtacggtgcggatcacctccagttgcagctcttcgtcgagcatcttgtaatccagcccgcaggcgacgatcatgttggggcgcgtcgatttgtcgggcccgtccgtccctacgaaatcggccagatagccttccggcaggcggaacagttcgacgaacgacgcctgcgtgcgtgccgggagtgactcccaggccttgacgaaggctttgtcgccgtgtttgccggccagctcgagcgtgtagcatacggcgttgtaccacaatgcgttcacctctacctgataaccgttgcgcggagtgacggggcggccgtcgatcagggcgttcatccatgtcatcgggacgtcgtccgcagcggcccacaccagcccgttgtcatgcagcgcgacgcgaccgccgactccccggcggtagctttccagaatatctttcatggccgggccgtaggctttccatatctgcttgccgcccacctcccgttcgagttgctggagcgtccagaagaaccacagcggggcatctgctgcgacggccgccgaggcgttgcccgtgaacatgccgtcgcgcatttcgcgcaccagcgtgtcgagggcgtcgatacagtcctccttatgcccctgttcgagcgtgatgcccgggagcgaaacgaaggtttggcgccccgaaaccccgtgccacgggtagcccgacaccacttcggtgcggtcgccgggacgccggatgacgaattgccgcgccgagtgctccaggcagctgatgaagtcgatcttgtgcgtgcgccgggcgatggatgcggcgaatacctcttcgatggtcttgaccgatcccatttcgtcgagcgaggccgagaagatgatgctttcgcccttcttgagttccgtttcgaaatagcccgtcgtgagcaggtcttcgtaaccgtcataaccgcgggccagatcctgctggtattcgaatccgtagtaccagtcgggcgcgggcacgaattccgcaccgggcttgctggtctgcaggtagagccacgggaacgacccgtagaggcggcatttcacaccgttgactgccgggtaggagtgcccgtcggcctccatgttggcatgcgtcagcgcgtgtttgtcgcgaaaggcgaggaaaggccgcagccgcaggtgcgtttccgaattcgcttcgacgagcgtgtagcggatcatcagctgcgtgcgcttgtgtatccacagcatctccttccgcaggatcacgccgcccacgcggtaggtgatcgtgggggtcggcgtatatttgaagtcggtgatatacttgtgtccgcgcggctcgtatacccccttgaagcggtgcagggccaggttgaatgtctggtcgtgctggacgatggtttcgtcgagcgacgagagcaggacatacgtcctgtcgctgtcgtctatgggcgctaccatcaggccgtggtagcggcgggtgttgcagcagacgatagtcgtgctcatatatccgccgatacggtctgtggagagcatctcgcgctggagcgaatactccaggttgcccaattcgcttttgtcgaaagtaagtgctgacatgtccttctaaaaatacggttcgttctataaagatagctgaatttttgcgaaaaggcaatcgcatttccgaaaattcatatcttttttacattattagggccaaattggctaagcccattttaccaatgcaaaatccatgcgatggggcaggtgcgggttcaccgggaaaatacgcagcgccacgtcgaacgtgccggcttcgtcgggcgtataatccagtgcgtaggtaacgcggctgccttcggtcttggtgtgcttgagcccgatcgtgtgcatcacgttggcattctgcccgccaacgatctgctgtgcaatgaccatctccacgccgatgtcctcgggacgcaggctggcgatgtccacggttacttcgaaatggtacttttcgcctacgaagatcgccttgttgtcgatttttacgcgctgtacgtcgatcacgcggatctgatcccataccgacgagaccttgcgtttccaggccgcgatctcgcgggccagcttgtagccgccctcgacgatccggtgcttgcgtgccgcgagcttgttgtagaaccgttcctcgtagtcgtttagcatgcggttggtcgtgaaattcgatgcgatgtcggcaacgcatttcttgaccgactccacccatgcgtggggtacgccgtccctgtcgcggtcgtaatatttcgggacgatctgctcctcgatggtgttgtagatcatttcggcgtcgagctcgtcctgatagtgctggtcggcgaaggtgcgctccatgggcagcatccacccggcgccctccttgtagccttcgacccaccatccgtcgagcaccgagaattgcagcacgccgttcatgacgcacttctcgcccgacgtccccgaagcttcgagcggacgggtcggggtgttgagccatacgtcgacgccctgcaccatgcggcgtgccagctccatgtcgtaattctgcaggaagaggatcttgcccacgaactgcggcatggcggccacttcgacgatgcgtttgatgaggtcttgccccggcttgtcgttggggtgggccttgccggcgaagatgaactgcacggggcgctccttgttgttcacgatggccgagagccggtcgaggttcgtgaagagcaggtaggcgcgcttataggttgcgaagcggcgtgcgaaaccgatggacagcacgtcgggcttgatgccctcgatgacctgcaacatctggcgcggcgagtcgagccgcacctggctggggtcgctgtaacgcttgcggatatgcttgatgagcttgttcttgaggtgcatgcgcccggcccacagctccccgtcggggatgttgtggactttctgccatgccgggatgtcgtaggcgtgcccctcgaagccgtcggcgaaatagcgggcgtagaggcggcgcaggttcgtcgcgatccatgtcgggaagtgtacgccgttcgtgacatagccgatgtggagttcgttcttgaaataacccggccacatgttgcccaggatctccttcgacacttcgccgtggagccacgatacgccgttgacctcctgtgagaggttgcaggccagcaccgacatcgagaacttctcgttggggtcgttggggttggtcttgcccaggttgatgtactgctcccaggtgatgcccagcacgtcggggtagtgcgacatgtactggcggatcatcgactcggggaaggcgtcgtgcccggcgggcacgggggtgtgcgtcgtgaagagcgacgaggaacggatcacctccagcgcctccgagaaggagagcttcttgtggttcaccaggtcgcggatgcgctcgatgccgatgaacgcggcatgtccctcgttgcagtggaacacgtcgtgcttgatgcccagtgcgcgcagtgcgcggataccgccgatcccgagcaggatttcctgcttgaggcggttctcccagtcgccgccgtagaggtagtgggtgatctggcggtcttcctcgaggttggcctcgaaatccgtgtcgagcaggtagagatccgtgcggccgacctggcatttccagacgcgcgccgaaagcgtacgccccgggaaggcgatggtgaccgtcagccagttgccggcttcgtcgcgcacgggcgagatcgggagtttatagaaattctgtgcctcgtaggtcgcctcctgcgccccctgtgccgaaaggcgctgcgtgaagtagccgtaccggtaaagcaggcccacggctgccatcgggacgttcttgtccgaggcctccttgaggtagtctcccgcgagtatgcccaggccgcccgagtagatcttgagcgacgagtgcaggccgtattccatcgaaaaatacgaaatcgtgggggtcttcggggcgggtttttcgttcatatagtcgcggaactgcgcatatacggcgtcgagctgcccgagaaaggcctcgtcgcgttcgagcccctttatgcgttccacgctcagtttgtcgaggaaagcgatcgggttgcgctcgcattcggcccagagtgccgggtcgatgccttcgaacaggtcgcggggcccggggttccagcaccaccagaggttgcgcgaaagttcttccagggcatgcaggcgcttgggcagggttttgtcgaccatcatgcggttccagttgggcttctcggcgaagagctgctggcgtacgaaattgatctgttcgttgcgggcgttgctctcgtcgagcacggcgcggttggtacggatcaccgaactttcgacagcctcggagtaggcctgttcgtaggcggcgaaaaggtgctcccagagcgcagtttccgatatctcgtaggccgaaacgcgcatctcggagacatgtttctcgtccagcgcgctgaagcgcagcagcgagtcggcgatcttctcctcgacctccttgtcgttgtagtcgtcgcgtcggatgacctccacgcccaggtgctcgcgttgcttgtcgacccacagcccgaaccctgcgagggtcgtggtgatggtcggcaccgagaatgccaccgattcgagcggcgtatagccccacggttcgtagtaggaggggaataccgtgatgtccataccgacgagcagttcgtagtaatccttgttgaagatgccgtcggccttgttcaggtaggtcggcacgaagatcaccttcaccttcgaatcgtcggtcgtgaggatgctgccgttcagggcgttcacgatcgggtcgctgttctggtattcgaggtaatgggtcgaatacttgtattgtccgccgtcgatcgggctggccgggtcggccaggtgtgcctgcaagtccgcacgcgggccgcggttggcggccggaacggtgacataggccaggacttcgcgtttgagacggtcggaggcggccagctttttgagcgactcgatgaatacgtcgagccccttgttgcggaattcgtagcggccgctggtgccgacgatcagcggttccttccggaacttgtgcccgaggcaggcttcggctaccgagatcatcgccgtgcgggcttcggcacgtttggcgtcgtactcctcgcccgtccatacgaagtcgttttcgaacccgttgggggtgatgccgtccggttcacgccccagcaggtatttgcattcgttggccgtgatgtcgctgaccgtgaggaaggcgtcgtggtatgtggcggccatcttctcgatcgagtgtttggccacgacgttgaactgccgggccagttcgtcggcattgaacttggccaggtcgttgtagagcggcaggccgttgccggcgatgcagcgccccatgaccgtggcgtgcgtcgtgaagagcgtggccacatagggggcgtgtttgcgcaggtggagtccgcctgcggcggtcatccactcgtggaaatgcgcggcgatcttgtccgtcgcgttgcagaaattgtcgacatacgaggcgatgaccatgcccgcggcatagccgaagagcacgggctcgatgtagtcccactgtcccgagagcgaatccacgtggtacgtctcccagagtttcttgagtatttcgtccttgcgggggatcagcgaagtaaagtccaccaggatcaccgtcggctcgcccttgatcttccagtgtcccacgcggatccggaggccgtcgctgtatacgctctggcgccatgccttcagcatgtcggggtcttcctcgaattcggggttcgccccctcgtgctggaggtcgggcccgatgaggatatagcggtcggcgaatttacgggttacggtctgtgctttggtcgagatgacggtatggatgccgccgaccttattgcagacctcccagctcacctcgaaaaggtagtcgggagtcagttttgcattactcatatttgtcgtgcttgtttgtaatttactcgatgaatcggttgaaaaccgctgcaaaggtaatacttatatttatataaaacaaccttgtctggttagttagtaaaaatatttaataataacttaacatttctgtttcacatcgttgcatgtcgtgttatgtttcgaaaagcgctccgatcacggcatccgagatcagaaatttttccggagggagggccatccgcccccggtctatgcggagcgtgcccgaacggaggaacggtgcagcctcttcctgcatccgtgccagccgttttgctccgaaacgtgccgcggcctcttccagatcgatcccttcggccgtccggagcgccgtcatgacgtattcgttgaaccggtcgcgttgggtcagcacttccttcccggcgggagcgcctgctatgtatttttccaccgaacaggcattccagtgtctctcctcgccgtcgaacgagtgggctgcgggcccgatgccgaggtatttcgtcccatgccagtaggaggcgttgtggcgggcgcgaaaacccggcagggcgtagttcgaaacctcgtaatgctcgaatccggcggcggtaagcgtctggtgcaccgtgaggaactcctcctcgctgacctcttcctccacgacgcggaactcgccccgtgccgcacggcggccgaaggccgtatcgggttcgacggtcaaatggtatgccgaaatgtgctgtacgccgagcgacagcaccccgtcgagcgatcttttcagcgaatccccgccgaagccgggaatgccgaagatcaggtcggcggtgatgtttccgaacccggcgcgttgtgccgcccgcaccgcaccgatggcctgtgccgccgtatggcggcggttcatcagcttcaggcagtcgtcgtcgaaagactggatgccgatcgacagccggtctatgcccgcttcgcgcagcccggcgaggtaatcccccgtcaggtcgtcggggttggcctcgagggtggtttccgcggcgccggagcagtcgaacaactgcgcggcatgattcagcagccctttcagcgcggcgggtgcgtagagcgaaggcgtgccgccgccgaaatagcgggtcgtgaccgcttcgccgcgcaggtaatcctgccgttcgtccagttcgcggtgcatggcggccgttacgccgtccatctgctccagccggacgctcttgtagaagtcgcagtaggcgcagatgcgtttgcagaacggtatgtggaaataaagcccggccatggtctatccgagtttccggggagcaggagcttccgccgaattgccggcgagtgcctttatcgcctttacggttttccgtccgtatctgttgaacgtaaatattccccccgccatgttataccacgggtcgtagaccagggcccaccggatttcgtcgcttctccaccccaagatcagcaggtcgcagtccagaaaggggatgccctttcggtttacggcctgcaaataacgctgattgtcgtattcgatcctccatcccccgtcggccagcagtttccgtatctgctctttcagtccgtcgtgttgcccggagagcgggatactcttgaatttcagtttccggcattggatcgtatagagggcaaagccggcgccgaatagcagaagcgcggcgagccagtaccgatcccagaatccgtgaatgaggtcggagacgaaataacagcagaagaatgtcccggaaataaccaacacgatggagaaactatggtagtttatccattcgatcgaaaacggtttcaggcagatcctgtcgtggcgtatttttatcgggcgcattattcggaacgagtaacgatgtttttatagggctgacttatcaaagatagaaaaaattccggtatatcgtcccctttcgttccggttttttcggagttcgtgcgtcgggttcattccggctgccgggcggattgtcggaaaatacttccagttccctgattgcgatgcggttgccccgcagacgccgctcccgtcattgcttatgtccggcggtgtttcgtcgggcgggcatgccgtgcgccgtcgatgagtgtttcgaccgaagcggggcctatgcgtccgcctcgaattccatcctgcgaagcgccgctgcggattccggccgtatgtttgtggtagggtatcgagccggctttccgtgcgactgtccgggatgcggtacctgcttataaatgaatcatatacgcttatcggaaaaaataatggattttttttgctttttttactgttagttttttcacaagtgtaaaagtttttctacctttgtgcggttaaagtccggtcattcggatttgagttaggtaaatcaggatttgatgttttattaaaatagcaattattatggacaaaatggatttgaaaaagtacgggatcacgggcgtgaccgagatcgtgtacaatccgtcgtacgacgaacttttccgcgaggagaccaagaagggactccgcggtttcgaaaaaggccagctgaccgagaccggtgccgtgaacgtgatgaccggcgtttataccggccgttcgcccaaggacaagttcttcgtaatggacgagaccaccaaggatacgatctggtggacttccgatgaatataagaacgacaacaagcctgttacgaaggctgcctggaaggagctgaagaaactcgctacccaggagttgtcgggcaagaaactctatgtcgtggacacgttctgcggcgccaacgagaattcgcgcctcaagatccgtttcatcatggaggtcgcatggcaggcccatttcgtaaagaacatgttcatccgtccgaccgacgccgaactggagaaatacggcgagcccgatttcgtggtgctcaacgcttcgaaggccaaggttaagaactataagaaactcggcctgaactccgagacggccgtcgttttcaacctcaccgagaaaatgcaggttatcctcaacacctggtacggcggcgagatgaagaagggtatgttctcctacatgaactacctgcttccgctcaagggcatggcttcgatgcactgctcggccaacaccaatgccaagggcgagaccgctatcttcttcggcctgtcgggcaccggcaagaccacgctttcgaccgacccgaagcgtcagctgatcggcgacgacgagcacggctgggacgacgacggcgtattcaacttcgagggcggctgctacgccaaggtcatcaacctctcgcaggagaacgagcccgacatctggaacgccatccgccgcaacgcgctgctggagaacgtgacggtagacaagaagggcaagatcgactatgccgacaagtcggtaaccgagaacacccgcgtttcgtacccgatcttccacatcgagaatatcgtgaaacccgtatcgaaagccccggctgccaagaaggtgatcttcctttcggccgacgcattcggcgtgctgcccccggtttcgatcctcaatgccgagcagaccaaatactatttcctgtcgggcttcaccgccaagctggcgggtaccgagcgcggtatcaccgagccgaccccgactttctcggcatgcttcggcgcggcattcctttcgctgcaccccaccaagtacggtgaggaactggtgaagaagatgaagaaggccggtgccaaggcatacctggtgaacacgggctggaacggtaccggcaaacgtatctcgatcaaggatacgcgcggtattatcgacgccatcctcgacggttcgatcgacaaggctccgaccaagacgctgcctatcttcgacttcacgatcccgacggagctgccgggcgtagataccaagatcctcgacccgcgcgatacctacaagaacgccaaggattgggacgtcaaggccgaagacctcgccaaccgcttcgtgaagaatttcgtgaagttcacgggtaacgaagagggtaagaagctcgtagccgccggcccgaaagtgaaataatctctgaataaagttttgaatggtagaaccctgcgccggaaggtgcggggttctttattttgcggcattgcgtatgctgcgatgggaggggcttccgtatcctcggaagggctcggatcctgtttcccgcggggcgggttgctgcctgccgcgattccgggttgtcgcctgaccggggcggggttgtggcgggtgtgcctcggaagggcccgctgcaatttaccccgggtttaggttcccgggccggccgctgtttccggttgcccgcattccgggagtactgctccctttggttccggagttgcggactttccgtgcatggctgcctgccgcagtctgcaactgctgtttagcgcacgtccgctgtccgctgtttgttgcggggcgtgaagatgcgatacccgatcgagacgccgatcttgttgggataccactccgaagagccgttgaacgggtcggggtgttcgggttgtacggggcggtgggggtacatgtcgacctggccgtcgaaactgtacccgttgtaatggctgtccatccatgcccaacccaggaaagcgtcgagcagccagcgtttcccgaactggtattcataacccacgcagaggccgatcatcatgccgtatcctttgcagtaacggtcttcgaatttcagtttccacccttcgatgtaaggtttcgacatgtcgaaggccatcatgccgatgtttgcccccaggtaccagccccggttatgctccttgaaatagcggcggtattcgcccatgaagatggcgaagagcatgtgcttttcgttgatcgacttccatggcgagatgacgatgtcggtctgcaaggtcgatttgggcgagatggcgaactccacggcgggattcaccacgcccaccagagcataggggacattgagcttgacatatccctgcggggatgcctgctgcgagcagaacagtgcgaacaggcatgccgggatgcagagcccgaagcggatgtttttcataggcggatcgttacaacggacaaagatatgaaaaaatccggccaacatactgtgctggccggattttaactatgtgctggacggatttataccgtcatgatctccttctcctttttctggagcgcctcgtcgagggtcttggtgaatttctccagcaatttctgggcctgtgcttcgccgtccttcgactcatcctcgggcataccttctttttgggctttcttgaatgcctcgaccgcgtcgcggcgggcattgcgcaggctgatgcgggcggtttctgcctcgttgcggatttgtttcaccaactccttgcggcgctcctcggtcaggggcgggatcgacaggcggatctgctcgccgttgttcgaaggcgtcagcccgatgttcgagtcgatgatggccttttcgatcgcacgcagcatgttcttgtcccacggctggatcaggatcgtcttggcgtcgggtacggtgacgctggcggcgcccgatacgggcacctgcgagccgaaataatcgaccattacgccgttcagggcattgggcgacgcttttcccgcgcgcacgttcaaaagttcctcttcgaggtggtcgatggccttctgcatacggccggaggcatcgttgagaatcgtcttggtatccatattattcgagtattttttcgatggttttgatcatttcgtcgaactcttcggcgtcgtaacctactgttgccagcacgactttaccatcggcgccgatcaggaaattccgcgggatataattcgaggcataacggtcgtaaatggcctgcgaggggtcgaggcccatcgggaacgtatagcccgtcttttcgcggaacgccgccacgtcttcccgcttttcgccgcgcgatatgggcaggaatacgaagttgcggccggcgaaacggtcgatgatgtccttctgcacgcgggtcagttcctgccggcagggcgggcaccaggtggcccaaaagttcagtaacacgactttgcctttgagttctgcgagggaggtttttgtgccgtcgaacatctctacggtgaagtcgggggctttgtcgcccgccttgaccagcgtggtcgattcggtatccgcctcggctttgccgccgcggctgccgcacgagggcagtaacaggattgcggcgatgatcactgcgatcagcgccagcatgatccatagctgcttgttgctcttttttgtggccataatcttatttttttacaagtgtcccgatcctctccccggcaagcaccttgccgaggttgcccggcgtgtccatgtcgaagacaatgatctgcagtccgttctcgcggcagagcgtgaatgccgtgagatccatgactttcagccggcggtcgagcacctcttcgaagcttatttcgtcgaatttgacggccgcagggtctttttcggggtcggccgtgtatacgccgtccacgcgggtgcccttcagcatcacgtccgcctcgatttcgatgccgcgcagcgccgaagccgagtcggtcgtgaaataggggttcgacgtgcctccgccgatgatgaccacataccccgcctcgaggtattcgatggcacgcgccttggagtagtattcgccgatgggctccatgcggatcgaggtcaggactttggccttcacgccgttgtcctccagggccgattgcagggccagcgagttaatgatcgtggcgagcatgcccatctggtcgcctttcacgcggtcgaagcctttctttgcgcccgtgaggccgcggaaaatgttgcctccgccgatgacgatgccgatctggacgcctgtggccgcagccgccctgatttgttcggcgtaggactggagtacttcgggggagagcccgtatttctgcgaaccttgcagcgattcgccgctcagtttcagtagtattcgcttgtatttcattgtacgatggggtttaccgtaacgcgaagataaaaatttttattgaaaaaaacgcaagaatgactatctttacagaaaataggcggtatggcggctatgccgggaaaaaacggcgccatgtccggtctgagctgttttacggaacacaggcttcgccttggcaatgtccgaataaatttggcattgtgctcggcttgtgctatctttaacctcgtttcagataggctgcggttcggacaaactcaaacaagtttggtttgtcgcgctccttgcgctatctttgtgctgccatgacgttggatgaatacaaattactccgaaaaataaattctccccgcgacctcaagcaactctcggcggaggaactgcgtacctactgcgacgagctgcgcagctatatcatcgacgagtgctcggtaaatcccgggcacctggcgtcgagcctcggctgcgtggaactcgccgccgcactccactacgttttcgatacgcccgcggacaagatcgtctgggacgtagggcaccagacctatgcccacaagattatcaccgggcgccgcgaggcgttcaagaccaaacgcctgctgggcggcatcagcggtttcccgcgcatgtccgagagcccctacgacgctttcgggggcgggcatgcctcggtgtcgatttcggcggcgttcggcatggccaaggctgccgagatgcggggcgagaggcatcaggtcgtggctgtcatcggcgacggttcgatgaccggcggcctcgcgttcgaagggctcaacaacgccggggccagcaaacgcaccaatatcctggtgattctcaatgacaacaacatggccatcgaccaggccaccggcgcattgaagaactacctgctcaaaatctccacatcggtgcattacaaccgtttcaagcagcagttgtggggcatcctttcgcatacgccgcgcctgctgcgcctctgccagaaggcgggcaacgccgtgaaacagggggtgctgaacaagagcaacctcttcgagagcttcaatttccgctatttcggccccgtcgacggccacaacctcaaggagttggtgcgcacgcttcaggcattgcgcgacatcgaagggcccaagttgctgcatgtcatgaccgtgaagggcaagggctacctgcctgccgagcacgaccagtccacgtggcatgcccccggacgtttcaatcccgatacgggcgagcggatcgcctcgccgggcgctgcggcgcgttaccaggatgtcttcggcgagacgctcgtcgaactggccgggctcgacccgcgggtcgtgggcgtcacgcctgccatgccgtcgggttgttcgatgaacatgctcatgcacgccatgccgtcgcgttgcttcgacgtgggtatcgccgagggccatgccgtgaccttctcggccgggatggccgctgcgggcatggtgcctttctgcaacatctattcgtctttcatgcagcgggcttacgacaatgtgatccacgacgtcgcgatccaggatctgcccgtggtgatgtgcctcgaccggggcggcatcgtgggcgaggacggcgtgacccaccacggggtcttcgacatggctgcattcggtgccgtgccgggacttacgatcgctgcgccgatggatgaactggaactccgcaacatgatgtataccggtctgcaatacggccatcccttcatgatccgctacccgcgcggcaacggtgcgggacgtctgtggcggggcgttcccttcgaggcgctgcccgtcggccggggacggaggctccgcgaaggtacggacgtggcgctggtgacggtcgggacggtcggcaacgctgccgcccgtgccgcggaacgcgccgcggcgaagggcgtgagcgtggcgcattacgacctgcgcttcgccaaaccgctcgacgaggccctgctggccggggtcggtgccgagttccgccatgtggtcacggtcgaggacggttccctgcgcgggggcgtcggcgaggccgtcacggcatttttcaatgcccgcggctgcgaggtggccgtacactcgctgggcatcggcgacgagtgggtcgagcacggaaccccggctcagctctacgccctctgcggttacgacgaggagggtatcctgcgggcgctgctcgccgcggggaaataaaaccgtccagccctgtttgccgtgctgcggcataaaatctgtcacatgctccctgaaaaccgttcgggaagtgaaaatcgcgatcgtattattggcctccgcgctgcttgtcatcggcgtggcatacggccgtgccgccgaccgtaccgaccgcactccggtgccgtcgttcgatcaggcgtgctacatgggctcttggcaggaggtcgcccgctacgaccatccgttcgaacgggggctggccgaacgacgcggttaccggacggacaggctcctgttcgtcgaccaggggcaatgaaactgagccggagggttcttcttcggtttcctgcggccgtgttacatcgtgaacgtccagtcgtcgccccggctgagcgcggcgtcgaaccggaacccttcccattcgaattctttgagcatttccggatccgcaatccggtttctgatgaggtggcgcgtcatctctccgcggcacattttcgtgtagaccacgatggttttcagacggtcgccttcacggatgcggaattcgggcgtgatgatacgcgcttcgcggcggatgcgtttccagtcgaacaggcgcttcatctcgctgctggcgaggttgaccaggatgccgtcgtcggcatggattttttcgaggaaggcctccgtcagccgtccctgccagtacccgaacatcgtttggtcgtcgtgccccggcaatacggcgtccccttccagccggtagcggcggattgcgtccagcggccggagcagcccgtagaggaacgacgtgatgttgaggtgctgctgtgcgtattcgaaatccccgggggtgaatcgctccggggcgatatgcctgaatacgacgcccgtgtaggccagcagcgcggggagggcctcttcgccgtggaactgccggtaacgccggc

SEQ ID NO: 745 - DNA, 20140 bp, unidentified
  source 1..20140: mol_type = unassigned DNA
atgaaggaaagattacttcgaatcaaaaacaataagaagatgccgttaatactggctttttgcattccgttttttcttgcactgggagtctgtatcggccatgagatttatccttttggcaatcagtgttttctgcatattgatatgtatcaccagtatgcaccgttttttacagaattcatgaataagttaaagagcggaagcgggttattatatacatggaatctggggcttggtacagattttgtatccctgatggcatattatctttccagtccttttaactggctgttattattatgtccgtctaatctggtaatcgaatttatgacggtattgattctaattaagattggacttagcggacttacttttgcattttacttaaaccggcattataaagataatggatatcgcattgctttatttgcggtattctatgcgttatccgggtttatgtgtgcttataactgggatattatgtggctggatacggtagtgttattgccgcttattttgctgggtctggaaagattggtagaaggaaagaagatgacgctttatgtggtaacactggcggtttcgattctttcaaactactatatttccattatggtctgcatctatctggtgctttattttgtgattctgatattagatcagaaaagcggaataggaaaagcaattcttaaatttgcgaccggctctatcctggcaggcggtatgggagcaatactgattctgccggagattgtggcattaagcggaagtggttccggtggaatctcttttccggaaaaaatggagtggtattttggcctgctggatgaagcagcaaggttctgcattggtgtcgagccgtcttctacggtaggacatatgccgaatctttactgcggagcggcaattttattattattattcctttatcttttaaatcgcaggatccgaattggcacaaagattccaagactcttactggtggcatttttctttgtgagctttgcaaataataaactggattttatctggcatggctttcattttccggatggacttccggcaagacagacctttttatttgcatttttactgctgaccttaggttatgaagcagtgcgggaagaaagaggcaatagcatttttaaaatcctatttgcattcctgttagcggagctggtattggttttatgtttccggtttacagatttagagcaggtgacaccggagcagatgcttttaacaggacttttgattttaggttatgcacttctgctgttattctatcggcggaaggataagacgatgcggactatcgtatcgatatttgcggtgattctggtatgtgccgaggcaggcgtaaatcttgacacgaccagtatttctactaccagccggacgctgtatacccagcatttagaggattataaaacactggcggagacagcaggagcagaggatgacggtttcttccgtatggataagtttaaccggatgacgaagaatgagtcggcactttcaaactatgcatccgcatctattttttcttctcttataaataaagatgtggcagatttctaccgggagatgggaatggaaggcggtaagaattattactgctataatggtgcaacgatgcttacttcctcgctgctttcggtaaaatatatcctgacggacagtgcagaagaggaaagtccgtatcgaagtctgatatcagaacagaatggcatatacttatatgaaaatacttatacactgccacttggttttatggtagatagtgatttgacggaaaagtgggattttacccttggaacaccgataatggcacagaatgaactcgcctatgcccttggtgcaacggagaatcttttagagccggtggatgcagaattacatgatggcaaaaccgtgattcaggtaacggaaaccggctattattatggttattatacgatgaaggatgccaaaaccattaccgcaaccactggaaaccgcacgcggacattttctaaatgtgaccatgtctatttactggatttgggatattgtgaggctggggaagatattacgctgacttctgccgatacggaccagatactggtgcagggctaccggttaaatgatgcagcatttcaggcagcatatcatacattatcccagcagaccatggagttaaaatcctacagtgacagcagaatcgaaggcagcatcaacgtaaaaaaagccggaactcttttgctgtccgtgccggatgatgaaggctggcatgtctttgtggatggggaagaagtggattatgagcatttctgcgatgcgtttatcagcattccattaaaagaaggcagccatgatattatattaaaatatacaacaccgaatctgaaactgggagcattgctttccggtggagcattgttcttattcctttgcattatctggataccggttgttgtgagaaaacgaggagagagggcatgaagaaaaaaataacatttctgatatttacggtactggcgctactttgtgttgtttattcggggatggtactggcaacgggttccggaacatcattttttcttgtgtggattgggctggcggtacttttcttcctgtttgggtattctatctggaaatctttctggaagaaagttccccggctggttaagggaatctgtattgctgtcgttgcagtgggatttacagcatttttcatcgtagaaggctgtatcataagtcagatgcatgaaaaaggcgaagcgggacttgactatattattgtgctgggggcacaggtgagggaaagcggaccaagtgctgcgttaaaataccggctggatgaggcagtggaatatttagaggataatccaaagacaatctgtatcgtatccggcggacagggtgcaaatgaaccatattccgaagccgaaggaatggcacagtatttaaaagaacaggggattgatgcgtcccggattctcttagaggataagtccttaaatacagagcagaatatggagtacagcaaggcactgataaaagatggggcatccgttggaattatcaccaatgattttcatctgttccgggcaaagcagattgcacgaaaatacggactggacaatgtctgtggaatagcagcaaagtctacaccggtttatcttccaaataatatgctgcgggaatttttagcagagataaaatttttgctgtaattatgcggatgaatggaaaagtcaaagactgaccggagactttgatgtgtgccaaggcacattctttgttctaaatgggcttgcatcgggtggaagaatagaatagtataaaaagtaacaggagttttatggagaaagggtttatatagctatggagattaaatgcgaatactgtggctccatcattaaggaaacagatgagaaatgtccttactgtggagccaccaatcaggcagtaaagcgtactgcagaccatacgccaaagactattgaagaattgcagcagtggtatcaggcacggaatctgccgccgtatgaagtgacgagattctttatcggaatcaattacacacagcccaaagcctttggtatttacagggaaggacagaatgttattgtctataagaacaaggcaaacggcgagcgggcaatccgctatcagggaacggatgaagcctatgcggtaaatgaactgtatcttaagttaaaagaggaaatcttaaaccagaaggaacataatcgggctggaaatgtaagaagcagttatggaaataacagaaagccaatgtcaacaggaaaggtaataggaagaacctttgccgggattggagcattctttcttttcttctttggttcctttgtactctttgtgttagatacattataccggggaattggaactgcactttttattgcactgattgccgcagcaccggtggcagtgatattagaccttattgtttgtggtttaaggggaaaaagtacggtatttgaaaagatatatcagggatttgccggaaagaaattcttaacctgtgccgtttgtttcctgatgtgctttttaatcgttctgattccgatacataattacaagaaggcaagttattaccagtaccaaaatacggtctatgtacacagccacaataactggttcgagtatgatggttatgactatgataagatagacagtgatgaggtaccggatgatattttaaataaccgttctgattatgaaatgacttatcagaatggctatgactgggataacagcattaccaattttgaagacagcagatattatgaagagcattatggctcagacagctcggacagcagttcagacagtggatatgactgggattccaatgacagctgggattctaattcatctgactgggatagcgactggtaaatattaatatatcatttagaaatttatttttctgttaagaataatctaagaaatgaaatagaatatctttaagaacactcctttttcgtgtgctttactaaatgtaaagaatgaaaaaggggtgttttttatgatgcagtcagaacatgcaggacaacgaaatttacaacaatcaggagcagccggacagcggaatacacaacatgcaacgaacataaaaaagcggagcatgcgccggaaaaaagcaagaagaatgcgaagaatcaaaagaatatttgtggcagcaataattctgctggtagtttttgccgcgggcagaacatcatttgtgcaaggcttcttaaatcactggaatgtaaaatcagaggcaacacttacggcagaggggtatccggaaagccttgtacaactttacgagaaaaatgaagaagcaagacagtttgtgcttgattataagaagaatggaaacaacgagcagccgattgatatttcatcggatgtaacagatggtaaaataccgcttttccttcagtgggacgagcgttggggctatagaacctatggagataatttccttgcaattacaggatgcggtcccacggcattgtccatggtctatgtgggactgaccggagatacttccatgaatccttataccgttgcccagatggcacaggaggatggcttctatgtcaatggaagcggatcttcctggagtatgatgacggaacttgccacaaagcttggcttatccgcacaggagctgagtctcagcgaagacagtatccggcaggaattatcccagggacatccgattatctgtatcatgggaccgggagattttaccacatccggacattttgttgttttaacaggagtagattccgatggaaaaataacagtgaatgattccaatagtaaaaagaacagtaataaggcatggaagatagacgaccttatgagccagatccgggatttatgggtgtatcagtagaagtggcattctttacgaaaatctgctataattcttgataaaatgatttgaaaggcgagtgggaaagagatagacagtggttcttccgacagtgatgttgaaatatctggcttattctccaaagtgaggatgcctgataaggactgttagaggcacataaaatttcggatggagtccggcaacgctggcacatggaagtgccagcgaggtgcatatgaacatggatgtgaatttgcatcggttgccagaagaaaataaaaatgaaatcgaaattcttagtgcctcttgcagttcttatggagcatccgggttcggagaataagccagatattacatcgcacgaatgccggaagaaaaccggcatcacatttcccactcctttacaaatattttaacaagaagggagctatagaatatggaaacatggtattacgaagtcgtatccatcgatggagactatgcaaatttaaagaggacagacattgcttcagatgatttgaaacttgtggcaagagcacttcttccggcagaaattatggagggaagcaagttaaaatacgaactgatgcagtatgagattatagaatagcggataaaggagttagggaagatgaaaatcgaagcggcaaggcgggaggtttagcaaaaattatgaaaaaggaaaaggttattgaaattggggtactgcttggaattattattctggcagtgattgtagttgtagtggcaggaaatcagagaaaaaataaaacgaagactgagacagaaaataaaacagaaacagagacgcagatggaatcagactcagaatcagaatcggaaacagaaactgcacctgcggataaagagtctttggacgcagacgagctggtagaagagaactttcgccaggcaggaattacagaatatgaaaaaataaatctggaagattatgagagccaggcaggaatcgatttatcagaatatgtatcttatcggttttattatgatagcgatggactgaaaattgaaggatatttcagtgcaccaaaagatttactggatggacaaaagacttcctgtcttatttataatcatggtggaaatcaggattacggagcattggaaaatatagaaacctgcttttatgcctatcagcttcataccatttgcattgcatcaaactacaggggatgtggaagcagtgaaggagaagaccagtttggcggagcggatgtggatgatgttatccggcttttagacttgtgtgaacaattttcctatattgatgaggatgccataaatatgatgggtatttccagaggcggaatgatgacttatgaagtgttaagaagggatgagcgggtgcataaggcagttgtcgtatctggcctttccgattgctttatgtcatatgaggaaagaagtgatatgcagaccatattcgattctttggtaggcggttccccggaagagatgccggaggaatatgagaaacgttctgcaacctattggacgaatgaaattaatacaccgctgcttatcattcatgccaccggagatgaaaaagtatccgttgcacaggcagataaattaacagaaacattagagcaggcaggaaaaacctacgaatatattacctttgatggaaattcccacggagaaatccgggcagaggatggtgagaagataaaggcgtttctggaagggcaggagcaggaagaagatagtgaaaagaataatgtaaaatagtgaaaaaatagtgtaatatttccttcgcatggtactgttgtattcaaataaggtttgtgaattgtcggagagctcaaacgacgaaaaattggaaggaagcctttcatatctaaaaagtagagaaaaagaattgctcttgctgctcatgaagaactacaaaagagagttcacgcctatcgaagtcagcaaagaacttaaggttaccaataagacggtaacaaactatgcaaaatgggatgattgatttatatgtgagaggtaataattctgtagcttattcagagatatattcatcgtttgcatcagaaaaaatagttatatttctgatttgttgttgctggttatcaataatgacagctctaaggtacgaaaacatggagaaacatatgaagttgcaggtgttcgatttgcagcagaccagattcctaaaatagatacaaataagttattagaaataaaagcttgtaacaatataattgatttcggacagaatcattacttcaaatatgtttcttcagacggaaaagagcatgcattatttacaaatgacaagggtgttggggttccctactcggaacatatgcggggagcagagcatgatgcagttgctcagagatatgctcatttttggcggtatatgatgaacgatgatcctgtatatgtaggattgacttattctaatgatgatattgatgaatttatgaaacatgcaggcatagaaaatggcttctttactgttagaatggggaatcgggaagcaacacaatattataccaaaagcgaaaaccatactttggatattccatacggagaagatttgtggtgtttggaatacccgtcaaattatagattttgggaaaaaattgattaatctctgagagtctatttatatgtgttgtagttatcaagcaaagggatacttatatcgtgttacaggacatggtgtaggtatcctttttgcatattatctataatcattacataaaaaagtgcaaatgcacaaaaaatagtaatggttattgaagtgaaaataatttagtggtaaaataacattaccaaaattcgtgcaatgcacaaaaataaggagtgatactatggagattaagagagattcataccttgaacagttaaagataagaaaagataacggaatgattaagattatcacaggaatcaggagatgcggcaaatcattcctgttatttgtgttgtttaagaagtatttactggagagtggcatagataatgaccacatcattgagattgctttagatggcattgaaaatgaggaactgagagatccaaagaagtgttatcagcatattaaagagcgggtggaagatgaccggaagtattatctgctcttggacgaagtacagtttatgccacgatttgaggaagtgctgaacagtttgcttcgtatcagtaacattgatgtgtatgtaaccggcagtaattctaaatttttatctagtgacattgtaactgaatttagaggcagaggagatgagataagaatttatccgttgtcttttgcagagttctatgcggcttatgatggagattatgatgatgcttgggaagaatatatgatatatggtggtttaccacaagtggcacaattttctgtagaacgccagaaggctgagtatcttaaaaatatttttaccaatgtttatatcaaggatgtggtagagcgaaacaaaattcaaaatgttgatgagattggaactttggtggacattcttgcttctgccataggagcacctaccaatccaacaaaaatatcaaatactttcaaaagtgagagaggtatcaattacagcaataaaactatatccaatcatattgattatttggcagaggcatttttgatttctaaagcggaccggtatgatattaaggggagaaaatatgtaggagccaatctgaaatactatttttcggatataggacttagaaatgccagactaaacttcagacagcaggagccgactcatattatggaaaacattgtttataatgagttgcttgtgcgtggctataatgtagatgttggtattgtggatgtatttgcaaagaatagtgacggaaagagagttcataagcagctagaggttgattttgtagtaaaccagggcagtcagagatattacattcaggtggcttatgatatgacttctgaggaaaagcaaacacaggaacttaattcactccgaaatattccggattcatttaagaagattgttatagtaaatggaacaaaaaagccttggagaaatgaggaaggctttgtgatcatgggcatgaaatattttctgctcaatgaggatagtttggagttttagtatggaaggagataatatattccgatatagaaatatggatataaagttaggaggcagagaaatggcaacggttgtgtattctaatgaagaagatgatatgtgttctttggtgatagatggagaagaatatgttgaagatgaagaaagggcaattatccccaaagctgtattaaaacaaataagagttgaggatattcaggataatttccaaattgaaatatgtgagtcaaaagattcttcagtaataatggtatctgttcctatgacttttataaaagttggtaaaaatgagtttcaggttatttatgatgaacttattactagaaaatattgggatggatcagtaggacttgatgtatttaaaatctcttggttaccagcagaatgtaaaaaccaatggtgtatggaccaaaacaacagttaagtcaatattgacaaatcaggcatacattggttcggtggtgcatgggaaagtagtaattgagaaatacaataatattccactccatgcaacagatccaagtgaaaggagtgccgaggaaatgtggcactcctttcttctgcaagcataaatattgctttcaatatactgcaatagcaggtataatggaaagtgatatttgagggtaaaaaaaaatcagttttttttggtctagggttgacacgagcaggcaattatatgccaccggttgaaatgttggaagaactcagcaatatgtataatatgaccattttacacaatcgtatgatggcttacgttgaaaattgcatatatggtgggaaatgggatgagtataaaacgagagaaaaataatttgactttttccaaaaagaaaaatataatgacttttgaacgagtagcaaaattgcgtaaatccagttttgctgctcttttttgtaattttataatgcaatgaaaaagtgtgtagcttatcagcgtaagtccaacttataagataggtgcgcactttttatattaccaaatatccgtaagaagctgccagtggcagcttctgcaggtggaaaaaggaggattaagttaagatggcagaaagtaataagatgaagaaaatgccggtaaataagctcatggtgcagatgggaataccgatgattttatctatggcattgcaggcggtttataacattgtagacagtgcctttgtaggaaacatgaaatcaggaagtgaggctgcacttaatgcgcttacactggtgtttccggttcagatgcttatggtagcagtgggaatcggaacaggtgtgggaaccaatgcgcttcttgcgagaacactgggagagggaaaaagtaaaaaagctgcgaaagttgcgggaaacagcttatttcttggagtaattatttatgcagtatgtctgctgtttggaatgtttggagtaaaagcatacatctcatcccagaccgtagattcggaagtcattgcaatgggaacaagctacttaagaatatgctgtgtgatttcatttggaattattttcttctcgttatttgagaaactgttacaggcaaccgggcgttccatttattcgacaattggtcaggttgtgggagcagtggtaaatattattcttgacccaattatgatttatggcatcggacctgttcctgaaatgggagtagaaggcgcagcctatgcaaccgtaatcggacaggtggtatcagcggcattgttatttattttccatgtaaaattaaataaggaatttgagcatggtgtaaagtttatgaaaccagagggcagaattatcagggaaatctatgcaatcggacttccggcaattattggacaggcgcttatgtctattatggtttatgtgatgaatctgattttaaaattcagtccttcggctcagaccgcatatggattgttctataaagtacagcagtttgtactcttccttgcctttggacttagagatgcaatcacgccgattattgcatttgcctatggaatgcatagcaagaagaggattcaggatggaatcagatatggcttaatctatacgattgtgcttatgattgtgggtgtggcaattacagaaattttcccgggggcttttgcaacattatttaatgcaggacagtcaagagaatattttatcgaagccatgagaattatttctatcagctttattttcgccggaatcaatgtggcatatcagggaatttatcaggctctggacggtggcatggaatcacttgtgatttcactgctcaggcagcttgtaatcatattaccactggcaggtgttttctccagtttggtcagaaacggacagatgggcgtttccttaatctggtgggcattcccgataacagagattgttgcatgccttgtgggatatgtatttttaaagagaatccggaagaataaagtggaaagtttaagttaaggaggaagcagatatggcaaaaagaatcattacaatcagcagagagtttggaagcggcggacggtttatggggaaagaagtggcaaaaaaacttggtactgtattttttgcagtaccttttctttttctggaaaatgaagtatgatacagaggaagagtagctgcttgacgacagaagaattgggtaacataagaaaaatgtggaggtaaataaaaggcatgctgaatgtgaaaaatgctgaaatggcagatttagagcaaattatgaaaatttacagatatgcacaggattatatgataaagtccggaaatccgactcagtggggacatttttacccggatgcagacctgataaaatctgatattgataaaaatgcatgtaaggtaatatatgacaaggatggaatccacggggtattttcggtgtttgatggtacagaacctacttataagcatattgagggcggtaactggctgaatgaagaaccatatctgacgattcacaggcttgccggagatggtcaggtacatggcttgtttccgtgtgctttaaactattgtaaaaagatttctttaaatatcagggtagatactcatgcggataataaaactatgcaaaggctgattgaaaagaatggttttataaaatgcggtacgatatatgtaaaaaatggaacagcaagaatagcatatcaaaggactgattttcgggcggcaagatttgcaagcatatcacttaataccactaggtctgcggcaagaagcgtaagctcatcggtcgacaggcattcggacaactggcaggaaattgtggagaggtaaaaaagatttgtacagtttgacatagtggttgtccataagatatttagcgttaacggatcgtccctttacaaacagaataaaaaagcatataattcttttataaaatatttaataaaagaggacaaaaaaacggaaaataaagataaaagaaatatagcaagaaaaaaaatcatcaattatgtgctgaatcatccggttatgtccaaagcggagctcgcgaaagaattaaatctgagtatgccgactgtgttagcaaacgtaaatgacctgttggagaaaagactgttagaagaagtgggcgagtatgcgtcgacaggcggacgaaaggcaaaaagtataggaattaataagtcatattgtcatgcaatggggcttttgatcactgcgaatcatatcgaaatggtactggtaaatcttggagatgagatcgtaaaaaaagaccgcatccgtttaaaatttacggcagaattatcctactgtacagaggtggcacaaaaggttgaaacttttctggcagacgagcctgcgaaggagacactgcttggaattggtattgcgatcccgggaattatcgatcagaaagaacggattgttttaaaatcccacgcgttagggatagagaactatagtctccgctttttagagcaggctgtgggaatgccggtgtattttgaaaatgatgccaatgcagccatgcttgcagaaaaaaagcagaagtatcccaatgcgatatatctgtctttgaatcatacattaggcggtgctttctgcatagatggaaagttgtatcgcggacaaaaccagaaagcaggagagtttggtcatatgatacttgttcccggtggaaaaaaatgttattgtggtaaatcaggatgcgcggatgcatattgtgctgcaagtgtactgacggaagataacaggcagtcgctggatgcatttatggaaaatcttgaaagtggagataaaaaggttttacagatatggaatgagtatctggatcatcttgctgttttgatatcaaatctacggatggcatatgatatggatatcatactggggggcgatgtcggaggtgtactctcagattatatgatacctttgggagaaaaagtgatggcatataatggttttgaacatgatgtttcatacctgaagaactgttcgtacaggaaagaagcgtcggctgttggagctgcgaaatatttttttgcggaacatatgatggaaatataaattattatagtgtgaaaacagagtgaagtgtgagcaaaaaaacggaaaggaaacggtaagtgaggttttctttccgtttttttgtgcgttgattagaaaatatatacaaaaagcatatctgcaaattgtgcaatgcgtaaaattgagagaaatatattgacaaaatatgtttaaaggatgataatgtaattactttaataaaacatttaataaaacataaaataaaacagtataaaaaaggaggaagcaattatgttacagcaggtaatgacaaatccaggagaaattattttcagagaggttccggttccggaggcaaaggaaaatcaggtgttggtaaaaattatgaatattggtgtctgtggatcagatattcatgtttatcatggaaaacatccgtttacaaaatatccggtaacacagggacatgaggtttccggtgagatcacagaacttggaaaaaatgtcacagagtttcatgttggacagaaggtgacgatagagccacaggtatattgtggacactgctatccatgccgtcatggaaagtataatctctgtgaggaattaaaagtaatgggatttcagacgacaggaacagcatctgagtattttgcagtggatgcatctaaagtaacacctattccagaagatatgtcctatgaagaaggagctatgatcgaacctcttgctgtggcagttcatggtgtaaaacagatgggcgatgtggctggcatgaatattgcagtccttggagcgggaccgatcggaaatcttgtagcacaggcagcaaaaggaatgggggcagcgaaagtgatgatcacagatatcagtgatcttagactggcaaaggcaaaagaatgtggaattgatgtgtgtgtgaataccaaaaataaagactttggtgaggcaatgatcgaagcatttggaccggataaggcggatgtaatctacgactgtgctggaaacaatatcacaatgggacaggcaattaaatatgcaagaaaaggaagcacgattgtactggtggctgtttttgcaggaatggcagaagtagatcttgcagtggcaaatgaccacgaacttgacattaagagcacgatgatgtaccgccatgatgattatatagatggaatcagattggtaaatgagggcaaagttcatttgaaaccgctcatctcaaagacatttgcttttaaagattatctgaaggcataccagtatattgatgataaccgcgagacaacgatgaaagtaattatcaacgtcagtgaaaagtaaggagttcgtatggaaaataaatatggaattgtcggagttgcccatgtcgggcttccgacaaacgatttacagaaaacagttgagttttataggggtcttggatttgaagtaattatgcagacttataatgaaaaagcaggggaaaaagtggcatttttacagataaaaaattactgtatagagacttttgaaaatgggcaggcggcaatgtcagacggtgcataccagcatgttgctcttgatgtggaagacattgagagtatatatcagaaaatctgcaatgaaaaatacacagttatcacagacggaatcgaagaactgccattttgggaaaatggtgtgaagttttttatgattaagggaccaaatgaggaaagaatagagttctgtcagaaactctgataaaaacaggagggacatatgggaagcgaaaacaaaaatggaaaagtaccgctgatcagtaagattgcatatgggtttggtgatgttggatgtaatttcagctggatgtttgtcagtaattttctgatgatattttatacagacgtgttcggaatcagtatggcggctgtgtcagcacttatgcttttttcaagattctgggatgcaatcaatgatccaatcgtcgggggacttacagataaaacaaaatcgagatggggacggtaccgtccatggttgttagtagcggcaccaatcacagcgattcttcttgttatgacattctgggcaagacccgactggccgcagaatggaaagattatttatatggtaattacatattgtctgctggttttggggtatacctgtgtgaatattccatatggaaccttgtgtggtgctatgacacaggatattgatgaacgtgcaaaaataaatacatcccgttcggttgcagcgatgattgcaattggtgtgttaaatattatcacagttccactgctcagcaaattcggcagtcatagtgcaaagacaggatatctgacggttgcggtcatatatggatgtatttttacagcctgtcatttcttctgctttgcgaagacgaaagaggcagtgattactccggaaaaagaaaaaatttctgtaaaggttcagttgaaagcggttatgcagaacagaccatatcttcttgcattggcaggacagatattatttggatttacactgtatggtagaaacgcagatattctgtattactttacatatgtggaagggaatgcctcctactacacaacttattcgatgtgcatcattattccttctatcatcggggcagcctgttttcaaccattattccgcaagttgaataacaaaggaagaacagcatctctctttgctttatttacaggaatttccatgttgtctatgtttttctttaatgccaaagaatcaccggctattttttatgctttatctggtctgacacagtttttcttctctggatttaatactgcaatctatgcaattattccagactgtgtggaatatggggagtggaaaaccggacttagaaatgatggttttcagtatgcatttatttcacttggaaataaaatcggaatggcagttggaacagcacttttagcaggattacttggaaaatatggttatattgcaaatcagacacaaaatgcaattgtactttcaattatgaaacatgcatttacgacgattccgggtgcactgtggattgtgactgcggttgtattatttttctaccggttaaataaaaaacgttataacgagattgtggaggaactgaaaaatggaagaaaaagttgatatcgtggcattgggagaattgctgattgattttacggaagcaggacacagtcaggatgggagaaaattgttcgaacagaatcccggcggtgctccggcaaatcttctaaccgttgcaagccactttgggtatcgcacatcttttattggaaaagttggaaacgatatgcatggtaaatttttaaagaagacattgcaaaaggaaggaatcaatacagatgctattgttgaagacccgggttattttacaacgttggcatttgtggaaatcggtgaaagtggagaacggaaattttcttttgcaagaaaaccgggtgcagatacacagttaaaaaaagaagaactggatcagacattaatttcaggttgtagaatttttcattttggatcattatcgctgacagatgaaccggcagaaagtacaacgattgaagcggtaaaaatggcaaaagcagcgggtgcacttatttcctatgatccgaattatcgaccgtctctttggaagagcaaagaggatgcagtgaaaaaaatgagatctgtcatagaattggtagatgtcatgaaggtatcggatgaagagagtattttgttgacagaggccgaaagttatgagcaggccgcagaccaactccttgctatgggaccaaagctggtagccattacattgggagaacagggtgttcttatggcaacaaaaagcagaaaagaaatcatcaaagcatttcagatacatgcggtcgacacgactggggcaggtgattcattctggggaggcgtattatgcagtatcctttccatgaataagaatgttgaaaaaatgaaatgggaagaaatcagaaagtgtgctgttttgggaaatgcagttgctggattgtgtgtgcaaaagagaggtggcatccctgcgattccgacaaaagaagcagtgtttgaatttatgcagaaataatgaatgtatatgacaaaattggggctataaaaacgcccctatttttaacaaaaatataagcaggacaactttcgatatttgctcctgcctgtattttatgtaaattacgataagttttattccctgtgttcttcgccccatgtacagtctgattctggtgtagtctttaaatgcttttctgattcccaacaatcaatgcggagcatatagccagcagatatataaacatcaatactattaagctgtggattgtattctgcaaatattattctcgtcgtattttatctccttatcattcaatcaatcatttgttacaaaaatcagaagcatttcaatcagttcactatgtcactttcattttgtgttataatgtgttatcagatttcttggtctccgctgccgcttcggtcggcacagagcagaggtccactggacctcttgtgcccttgtatttgcccttatcagagttcgtaaacactggtgcgatgatataatacaagggaaacaataagggaaaactcacctgcgataaattcagtattttcaagggtttgcggagaatttaataacaaaatataacagttattaaatctcttaaaacaggtgaaatctcaattccagtttgtaggaacaatatggtacgaaaagcagaaaaacagaatttagaaatactggcaaatttagcagtacaatagaatcatttgtttcgcaaagacattataaaagaatgcagagaagtagtttatagagatacttctctgcatttttgctgtcgggcatccgaaaggggctgccggtggcaagtccggtaggtaagttatggtacatcttccgcagaagcagcaggctcacagattgatttccgggcggcaagatttgcaagcatatcacttaataccaccaggtctgcggcaagaagcgtaagctcatcggtcgacaggcattcggacaactggcaggaaatagtggagaggtaaaaaagatttgcacagtttgacatagcggttgaccataagatatttatgatatgttatgcaactgtcagagaaaatgtgtataataaaagaaaataacttcaggataatcatttgtaaaaaggaatgaaaggaatcaaatatgaaaacactgattgtagtagatatgcagaatgactttatcgatggttcacttggaaccagggaagcgcaggcaattgtaccgaaggtaaaagagaaaatcaaagagtatcaggagcgcggggacgagatcatttttacccgggatacccatcagtcagattatcttaacacaccggagggaaagaagcttccggtggaacattgcatcgaaggcacaaagggctggaaaattgcagaaggtttagaggtgccgggatgcagctatattaataaaccgacctttggatggacacactggtcggagagaaactttgaagaaatagaattatgcggtctttgtacggatatctgtgtggtatccaatgccctgattttgaaagcagaatttccggatgtagagattacggtagatgctacatgttgtgccggagtaacgccggaatcccatgaggcagcgcttaccactatgaaaatgtgtcagattcatgtaattggagagtagaaaaggcggaataattccaaaagaatccctccgacgcttgaacgtcgttcgttttttgagtataatcgtttcgtaaggaaggtgacagatatgaaggatacaagagttgatatttatcatggagtaacaccaattaaggtaaaaccgtatgagcataatgtaaaatattatgagacagaccagatggggattgtgcatcactccaattatatccgttggatggaagaggcacgcatggacttgatggatcagatgggcttcagctataaacagatggaagaccaggaaattatcagtccggtgctttctgtacagtgtgaatataagagcatggtgcgattcggagatactgttgttattgaaacagccattgcaggttacaatggaatcaaactcagtgtccgttatcgtatgacagacaaagagaccggagaactccgtactattgcagccagtgagcactgcttcttaaatcgtagtggcaagccgatttccttgaaacggtcataccctgaaatagatacaaaattcttccagatgatggatgaggaaagttag

SEQ ID NO: 746 - DNA, 15868 bp, unidentified
  source 1..15868: mol_type = unassigned DNA
  misc_difference 10708: note = a, c, g, or t
  misc_difference 10709: note = a, c, g, or t
  misc_difference 10710: note = a, c, g, or t
  misc_difference 10711: note = a, c, g, or t
  misc_difference 10712: note = a, c, g, or t
  misc_difference 10713: note = a, c, g, or t
  misc_difference 10714: note = a, c, g, or t
  misc_difference 10715: note = a, c, g, or t
  misc_difference 10716: note = a, c, g, or t
  misc_difference 10717: note = a, c, g, or t
  misc_difference 10718: note = a, c, g, or t
  misc_difference 10719: note = a, c, g, or t
  misc_difference 10720: note = a, c, g, or t
  misc_difference 10721: note = a, c, g, or t
  misc_difference 10722: note = a, c, g, or t
  misc_difference 10723: note = a, c, g, or t
  misc_difference 10724: note = a, c, g, or t
  misc_difference 10725: note = a, c, g, or t
  misc_difference 10726: note = a, c, g, or t
  misc_difference 10727: note = a, c, g, or t
  misc_difference 10728: note = a, c, g, or t
  misc_difference 10729: note = a, c, g, or t
  misc_difference 10730: note = a, c, g, or t
  misc_difference 10731: note = a, c, g, or t
  misc_difference 10732: note = a, c, g, or t
  misc_difference 10733: note = a, c, g, or t
  misc_difference 10734: note = a, c, g, or t
  misc_difference 10735: note = a, c, g, or t
  misc_difference 10736: note = a, c, g, or t
  misc_difference 10737: note = a, c, g, or t
  misc_difference 10738: note = a, c, g, or t
  misc_difference 10739: note = a, c, g, or t
  misc_difference 10740: note = a, c, g, or t
  misc_difference 10741: note = a, c, g, or t
  misc_difference 10742: note = a, c, g, or t
  misc_difference 10743: note = a, c, g, or t
  misc_difference 10744: note = a, c, g, or t
  misc_difference 10745: note = a, c, g, or t
  misc_difference 10746: note = a, c, g, or t
  misc_difference 10747: note = a, c, g, or t
  misc_difference 10748: note = a, c, g, or t
  misc_difference 10749: note = a, c, g, or t
  misc_difference 10750: note = a, c, g, or t
  misc_difference 10751: note = a, c, g, or t
  misc_difference 10752: note = a, c, g, or t
  misc_difference 10753: note = a, c, g, or t
  misc_difference 10754: note = a, c, g, or t
  misc_difference 10755: note = a, c, g, or t
  misc_difference 10756: note = a, c, g, or t
  misc_difference 10757: note = a, c, g, or t
  misc_difference 10758: note = a, c, g, or t
  misc_difference 10759: note = a, c, g, or t
  misc_difference 10760: note = a, c, g, or t
  misc_difference 10761: note = a, c, g, or t
  misc_difference 10762: note = a, c, g, or t
  misc_difference 10763: note = a, c, g, or t
  misc_difference 10764: note = a, c, g, or t
  misc_difference 10765: note = a, c, g, or t
  misc_difference 10766: note = a, c, g, or t
  misc_difference 10767: note = a, c, g, or t
  misc_difference 10768: note = a, c, g, or t
  misc_difference 10769: note = a, c, g, or t
  misc_difference 10770: note = a, c, g, or t
  misc_difference 10771: note = a, c, g, or t
  misc_difference 10772: note = a, c, g, or t
  misc_difference 10773: note = a, c, g, or t
  misc_difference 10774: note = a, c, g, or t
  misc_difference 10775: note = a, c, g, or t
  misc_difference 10776: note = a, c, g, or t
  misc_difference 10777: note = a, c, g, or t
  misc_difference 10778: note = a, c, g, or t
  misc_difference 10779: note = a, c, g, or t
  misc_difference 10780: note = a, c, g, or t
  misc_difference 10781: note = a, c, g, or t
  misc_difference 10782: note = a, c, g, or t
  misc_difference 10783: note = a, c, g, or t
  misc_difference 10784: note = a, c, g, or t
  misc_difference 10785: note = a, c, g, or t
  misc_difference 10786: note = a, c, g, or t
  misc_difference 10787: note = a, c, g, or t
  misc_difference 10788: note = a, c, g, or t
  misc_difference 10789: note = a, c, g, or t
  misc_difference 10790: note = a, c, g, or t
  misc_difference 10791: note = a, c, g, or t
  misc_difference 10792: note = a, c, g, or t
  misc_difference 10793: note = a, c, g, or t
  misc_difference 10794: note = a, c, g, or t
  misc_difference 10795: note = a, c, g, or t
  misc_difference 10796: note = a, c, g, or t
  misc_difference 10797: note = a, c, g, or t
  misc_difference 10798: note = a, c, g, or t
  misc_difference 10799: note = a, c, g, or t
  misc_difference 10800: note = a, c, g, or t
  misc_difference 10801: note = a, c, g, or t
  misc_difference 10802: note = a, c, g, or t
  misc_difference 10803: note = a, c, g, or t
  misc_difference 10804: note = a, c, g, or t
  misc_difference 10805: note = a, c, g, or t
  misc_difference 10806: note = a, c, g, or t
  misc_difference 10807: note = a, c, g, or t
tcagatcgccacatcctgccactgtccgccgatcagttcgcgggtggatttgaacccggcctttttcagcagttcgaatgcttccgcacgtccgtcgttcaccaggtcgggatagtggcagtctgagtttaccatcaccggaatatccagctcacgtaagcggtgcagatagtcggtatgcgggtagacctcctgtttcttcacgaggtttttcgtgttgacttcgaccatcagtcccttttcggcgatcaggtgcagacagtcgttgaatggtttttgataccagtccgcttgcaggtcgaagccttcgcatttgtgcccgttcatgtatatcttgtccatgtgcccgacaatgtcgattccgcctgcctcgatcattcgccgtgtggaactgaaatagtgggcgaccagcttgcggatatctccgtcgtagtaggcgtcgacagacttctggtactcccggaaaggaccgtcgatacacaccatattctcttccgcaagcggctgtgcgatcggaagaaagtggatggaaccgatacggtaatcgagcggcagattgcggaagtaggggatggacgcgttgtagctctcgtctaagaaatcgatttccagtcctacgtatatttccaaccggtcactgtatttctttttcagtcgttctatttctgtcagatattcgggcatatcgtctttagacatgttccagaatgtttcgaacggcagtggtgaatgggatgaaaaaccgtaggcgcggaacccgtgcgcaacagcgaatttaatgaagtcttccggcgtgctccgaccgtcacagaatgtacaatggctatggtagttactgagttgcataaatttttacttgtaaaagggcaaagataatttttttatcccgaaagacaacctgtttgataaaaaaaggcttgattgctgcctaagggttagcggcagaatcaagccttgaaaaacacgtgaataatgaaaaatcgtatgttttattttattacgttcagttcttttccaactttgataaatgcagcgattgctttatccagatgttccgtttcgtggcctgcggacaactgtacgcggatgcgggcctggcctttcggcactaccgggtagtagaagccggtaacataaatgccttcttcctgcatcttggctgcgaaatcctgggataatttagcatcatacagcataacggcgcagattgcggactgagtcggcttgatgtcgaaaccggctgctaacatcttttcacggaagtagctgacgttgttcatcagtttcgtatgcaaagcatcgctttctttcagcatcttgaacatttccaggctggcgcctacgatagcgggagcgacagagttagagaacagataaggacgggagcgctgacgcagcatgtcgatgatttctttctttccggttgtgaatccgcccatggcgccaccgaatgctttacctaacgtacctgtgaagatatcgactcttccgtatacattatattgttcagccacaccgtgtcctgtcgggcctactacaccggcagagtgggattcgtcaaccattaccaatgcgtcgtatttttctgccagttcacagattttgtccatcggggccacgtttccgtccatagagaacacaccgtctgttgcgatgatgcgatgacgttgtgcctgggcttcttgcaggcaacgttccaggtcggccatgtctgcattggcataacggtagcgttttgccttgcaaagacgtacgccgtcaataatggaggcatggtttaaagcatcggagatgatcgcatcttcttcagtgaacaacggttcgaacagaccgccgttggcatcgaaacatgcagcgtacaggatcgtatcttcggttttgaaatagtcggagatagcggcttccagttgtttgtgcagatcctgtgtcccacagatgaaacgtacggatgacatgccgtatccgtgtgtgtccatagcttctttggcagccttgatcagacgttggttgtcagacaggcccagatagttgtttgcgcagaagttcaaaacgtcgcttcctgcgtttactttgatgtcggctctttgaggagtggtgatgatacgctcgttcttatacaatccggcagctttgatgtttgccaattcctgagtaaggaaatctttcagtttaccgtacataactttgttttttgttagtatttttaattaagttgacaattatatctctattatcgcagacaagtggcaaaatattattcttgaaaccatttttttctttgtctctgatttgtctgccgatgcggcaaaggtcatattttttttgaatatataggctaaaaaatacaagaaattcataccggaatgtttttattctctatacctttgccatcgaaaaaacttaaaagaacatcaaacgcaatgaagaatgtattagtaattggttctaccggtcagattggatcagagttaaccatgaagttgagaggtatctacggtggaaacattgtagcaggttacatccccggacaggagcctaaaggcgaactgctggaatcaggaccttctgcaattgtcgacattacaaacgaacagcagattgctgagactgtgtccaaatataaggtagatacgatttataacttggctgcactgctgtcagccgttgcagaagcaaaaccgcagcttgcctggaaaatcggtatgggcggtttgtttaacgtattggaagttgcacgtgaaatgcattgtgctgtattcactccgagttcaatcggtgtgtttggcaataacacgccgaaagacaagactccgcaggatacgatccgtaacccgcgtactatgtacggtgttacgaaagtttcaggcgagttgttgagtgactactacaacatccgtttcggcgtcgacacccgttccgtacgttttccgggacttatctcctatgtgacacctccgggtggtggtacgaccgactacgcagttgatatctattattcggctgccaaaggtgagaagtttgtatgtccgatcaagcagggtacattcatggatatgatgtatatgccggacggtctgcgtgcagctattgaaattatggaagccgattcgacgaagttcgttcatcgtaattctttcaacattgcatccatgagctttgatcctgaaattatctacaacaacatcaaaaagtatgttcctgacttccagatggaatatgatgtggatccgttacgtcaggctatcgcagaatcatggcctaactctttggatgacacgtgtgcccgtgaggaatggggctggaaaccggaatatgatctggattccatgactcaggatatgttggctaaattgaaagaacgtttcaataagtaagaattaattttccgatcattagcagatcggtaggaaagaggcgactgcccggtgcgggcagtcgcctctttgtttggatcgtttttattcagtattgtaggctgtttcaatcataatgtgtctgttgcttgtgcagggaatgactaagtcaaaagtgtatgaaaaattatgttgtaaaacatgaaatggttaaatcaggttaagagaaagcttttttttgtggaaatattatgctgcataacataaactctctatatttgcactgtgtttttcatggtattagatttaaggttaacaatgaagattggctgtccgtgaggatagcctttttttatttatacccggttgatgttgtttcctccgagaagcgatcattttatccgaattgcccgttcttttggtattcttgattatatttgtatatctgaaaagattcattgtaataaaaatatctttatatggaaatgtacaaagcaaatgataaccggtatgccgatatggcttataggcgttgtgggcggagcggattgctattgccggtcatctctctgggattatggcataatttcggcagtgtagatgtgttcagtaactttattcagattgcgtatgccgctttcgacaatgggattacacattttgatcttgccaataattacggtcctgtgtatggatcggcagaggaaaatttcggccgtatcctgaagaaaggtctggggcaatatcgggatgaacttgttatttccacaaaagccggatatgacatgtggcctggtccgtatggcaactggggaagtcgcaagtatctgatggcaagccttgaccagagtttgaagcggatgggattagaatatgtggatattttctattcgcatcgtccggacccacagacgccgatcgaagaaacgatgggagcattggctgacatcgtccgccaaggaaaagccctgtatgtcgggatatcgaattacactgccggacagacggaaaaagcacttgccgtattgaaagaacatcgtgtgccttgcttgatccatcaagcgcgttattcgatgctggatcgcaggatcgaaccggacttgttgcctctgttgaagcaggaaggagtagggatgatcgccttctcgccattggcacagggcatgttgacggataagtatctgaacggtattcccgataattcgcgtgcggccaaatctacaggccatcttcaacgtgaacaggtgacggaagaaaaaataaataaagtaagacaactgaatgaccttgccaaacaacgcggacagacgttagcggaaatggcgattgcctggctgttgaaagacgaccgggtgacgagcgtcctggtgggagccagttcggttgcacagttgatagataacctgaaggcgttacaaaatacagccttttcagcggaagaaatacaaatgatagaaaatatattacagtaatatacactgataaatcatcatttattaatccaaacaattaatgaaaccattcttatatcaggttgcatcccttttttattctgaatacggggcggaagtgagccgtctggcctttgttttcccgaatcgccgtaccgggctgttcttccagaaatacttgtcggaagtatctgagaagcctcttttctcgccgacgatcctgacgatcaacgatctgtttgtacagttgagcggaaagcaggctgccgatcggatcagcatgctgtttaaactatatgatatttatttgagacatagcggttcttccgaaacgttcgacgagttcttgtattggggggaaatgctgctgaatgattttgacgatatcgataaatatatggcagatgcccgtatgctcttcaccaatgtgacggacctgcgtgagatagagaatgattttagttttctgagccctgaacaaattgcggctatccggactttttggtcttctttttacccgaaaggagatacgcccaaccaggaacaatttctggcggtctggcagattttatatgccctatataccgatttgcgggaagcgcttgccaccgaaggcaaaggatatgaaggtatgatttttcgggaagttgtcgaacagatggagaaagacgaatgttgcgacctgccctatacaaaggttgtatttgtcggactgaatgccctctcggtggctgaagaacgtttcctttccgggttgcaaaaacggggaatagctgatttttactgggattacgcctctccgaaagtgacggatccggataataaagcctcttacttcgtggagcgcaatttgcggcaattcccgtcgcaattaattgaaaatggacaattgactattgacaatgaagatgacgacaaaaagaagatcgaggtgatcggcatcccttccggaatcggacaggcaaagcaagtgtgcagcattctgaacgagctttgcaaggaagacgaaatgagtgcggaagaagcgttgcggacggctgtgattctgccggatgaacatttgttgattccggttctgaatgccattcccgaacagatcaaacggatcaatgtgacgatgggatatccgttggccggtacaccggtcgcatctttgatggaatatattctggctttgcaaaagaatattcgttatgtggaccggaggccggtgttctatttccgggatgtcttgccaatcctgaaccatcggtatatctcgactacttctccggagatggtttctaatctggtaaaagatatttcagaaaacaacaagatttacatatcgtatgacgatctgaataagacgccattgttgtccatcctctttactccggtgactgcggtggaaactttctccgattatttgattaacgtgttgcaggaactgaataaagcagttgaaggtggaaagttgaaagttgaaagtgtaaatagtgacacggagccactttcaactttcaactctcaactctcaactattaacgacatcgaacaggagtttatcttccattatttcgctacggttaaccggatgaaggaagtcatgcgggaggcgaatgtagaaatgaaaatcgacacctatttccgtttgctgaaacgtgtgacggacacaattacgattcctttccaaggtgaacctctttccggtttgcagatcatgggtgttttggagactcgtgcgcttgactttgaccggttgattatcctttcgatgaatgaaggaattttcccgttgaggaaagcggctaattcatttattccttataatcttcgtcgtggattcggtttgccgacatacgaacatcaggacagtgtttgggcgtatcatttctatcgtttgatttatcgtgccagccatgtcagcttgctttatgatactcggagtaacggattgcagacaggcgaggttagccgtttcgtgcatcagttgcattatcattatgaggagccgatacagaataagctggttgtttacaatgtctcttcttccaagactcctgccttgcaggtagctaagacggaggaagtcatgaaccgtctggctgatttccggagtggtgggacgcgggcgatatcggcgagtgcagtcaatacctatctggattgtccgcttaaattttatttctccgttgtcgagggaatacgtgaagaagaggaggtaagcgagacgatcgaaagtaatgtttttggaagtatcctgcataaggtgatggaagaattgtatcagccattctgcggaaagatggtgacggctgatctgctgaaagcgatccgaaaagatacgcctatgttgacgggagcagttgcccgtgcctttgccgaaattttctttaaaacggacattgttcgtccactcaccggacaaaacttcctgatcggcgagatgattcgcaaatatgtggagaaagtgctggaacgtgacgcaaaacagactcctttccgttatatcgaatcggaaaagaagataaaatgccttttcccattgacggataaaagcaatatccagttgaaaggatttatcgaccgtatagacgaagtacgcgatgtcgtccgcattattgactataagagtgggagcgggacgacgcagtttacctctgtagaagctcttttcgacaaagcagatacggatcgttccaaagcggttatgcaggtctttatgtatgcatggatgtttaacaggtcagttcagctttcaacagctattcagccgggtatctattatatgaggaccctcttttcttcctctttcgatcctggaatttaccatcgtacagaccggttcaaaacagaacaggttttggacttcgccaactattgcacggattttgaagacagcctgcgaaattgcttggatgaaatcttcgacacagaaaccccattcgtgcaaaccccgaacggcaaagcctgcatgtattgtccgtttaaggatatttgcggaaaatagtgtttttacagatttcccatatattcatccacaatttcattcaggaagcggttgaatggaagaagctttcgaaaacaatcgatggtttcttccatccagtccggctggctgaaaaaactgtcgggcttaatacctataacgctgaagtctttgtgccttaatatatgaccgtaaggagaatcggaggggaaacctgccgggatacgttttagcatgtccccttcgagtgacgggtacagagctttgaaggaaggctcttcgatgatggaaacaaattcatctatgttattgtatatttcacgtcgaaggactttcaatatttccggtttgggataccagataccaccggacagtacgcagtattccggttcaagatgaaagtagtaagctccccggatactatgacgtcctccttgagcaatacaggctgacatataagtcttgtaaggcgacttgtcgaggctgaagcggatgtcgcgattaatacggaacagacatttccgtgcatccaatccccgtatatcaggatcaaatacgctgattcgttcgattaactcttgtacttcgttgataaaagcacagcgaagtttgtcatatcgttctctattttcatggaaccaaacggtattattgttgcgtcgtaaatcgtctaagaatcggataatttctgcattcatattaggatattctttttttattgtattttgtatctccattgtttcggagtcatctgtttcatctttttgaaatagcgattgaagtagggaatgtcggtgaagccgcattgccaggctatttcgttaatgtccttatccggaaagttgcggagtaaagtgccaacggcctctatccggtattcgttgatgaagtttgtaaacgttttgcctgtttcacgtttgaaaaacgagcagaacgccgttgtgctcatgctgattacgtttgcggcgtccgaaagagttattttctccttgtaatgctcgatgacgtatttgaagatcagttgcatacgttgcatgtttttggtaatgccgttgaataccgtttcctgcaaaccgatagggattaaatcggttgtggttccgatttgttgcaggatgcggatcaacatcagcatcctttcgcttgcattcaggaggttcatttcttctaagcaggatttgatctttccggctgtttcgcctgtcagcaggatgccttgctggattgccgataaccggtgagcggcatattcccattcggtaaaaaaagacaggccggtttgtagcaagtcgggattgaattgcacaactatgcatctccgttttccatcaggctcgcagctttcggggttatacatccaacaatgtggttggttggtcgggaccagtacgacttctccctcctcgaacggctccagaaagtcgcctatcatccggtagcctgaacctttcacaacataacatatttctatttcgggatgaaaatgaagaggcatttcgtctttcgggtacaagctggaataatcgtagcgtaatgaggcacaactatcttttttgatttgttcgaattttagtttctcgtgcatgtcggatgaactttctgataaaacacagtaaaattagacaataattgcataatctgcgacaattacacttaataattttgttgtttctttgcggccggaaaaacagaaagattgaataggttatgaagaaaggtttgtatgcattgtcttttggcacatttgggttggggattgcagagtttattatgatgagtatcttgccggatgtggcggcaggatttgatatttccttatccgaagccgggcatcttatttcggcttatgcgttgggggtatgtgtgggagcaccgttggtagtggtggtggccaggagttggccgctacgtacgatcttgcttgctttggttgggctttttgttgtcgggaatctgcttatggctctgtcggccgattattggatggggttgtgtgcccggtttgtatcggggttgccgcatggggcttatttcggagtcggttcgattgttgccagccgtttggcggagaaagggaaaagcacttctgctgtagctattatgataatggggatgacgattgccaatttgttcggtgtcccggccgggaatttcctggggcactttctgtcctggcgtttggtttttgtgattgcagcgttgtggggtggcgtaacgatttggtttatccggaggtgggttcctgttttgcccgccctgccggcgacgaatctgaaagggcagtttcgttttttgagaaggccggaaccgtggatgctgattgctgctaccatgttaggaaacgggggagctttttgctggtatagctatgtcaatccgttaatgacggaggtgtccggtttcagtgtcgggacaatgcctgtattgatgttgctggcgggtgcgagcatgtgtgtcggtaactatttgggagggcatttgtctgatcgttttacacctggtatcgtagcgatgtccatgcagtttctgatgtttgcatcacttctgctgatttatttttttgcttcgtacggctttttgtccgctttgctgatgtgcgtttgtactggttgcctgtttgcagtttcttctccacagcaattgttgttgcttcaatattctcctggcggagagatgatgggcggggcgatggtccagcttgcttttaatttggggaatgccgtgggggcttattttggaggattgtcgatcgaacatggggcagggctggaaagtacggcattgatcggttcgttttttgccctgttaggaactacggtgtttctggtattcaactatatggtgtttaaacctcagaggaaattacttttaaaggggggaatataatttccgaggatcaagacggtgtttttggagataaaaaacagccgtcnnnnnnnnnnnnnnnnnnnnnnnnnnnnnnnnnnnnnnnnnnnnnnnnnnnnnnnnnnnnnnnnnnnnnnnnnnnnnnnnnnnnnnnnnnnnnnnnnnnncgaaatcgggacggtgtttttggagataaaaaacagccgtccgaaatcgggacggtgtttttggagataaaaaacagccgtccgaaatcgggacggctgtttggatttataatgtctcttgtttcagttgttcgacgaaacgatcgattcgctgtagttctttcggaatatcgattccctgcggacagtgtggattacattggttgcaactagtacaatgatccgcttggcggagtttcggtacactgcggtcgtacccgatcagataagcccggcgagcttcgcgatagttttcatcctgtccgctctgagggacattcccctcgttcacacatttattataatgaagcaaaattcccggaatatcgataccgtaaggacaaggcatacagtatttgcagtcgttacacgggatggtcggatactgcatcatcaagtcggcggtgtcgaacaagaaacggttttcctcttccgtcaacggttgcaacgggcagtaggtgcggagattgtcttgcaggtgctccatgtaagtcatgccgctcagcacggtgagtacgccgggaaacgagccggcaaaccggaaagcccaggaggcgacgctccgtcccggttcgcgttgcttcaggcgggcgacgatatggtcgtgcacgttcgaaagccgtcctccgaggagtggctccatgatgatggcgggaatcccccgtttctgcaattccccgtacagatattccgcgtcggtgtttcgcgggttgatctctttggcatgtttccagtccaggtaattcaactggatctggacgaaatcccattgatattcgtcgtgtttcgaaagcaaataatcgaacacctctatatctccgtgataggagaaacctaagtttcggatacgtcctgccttgcgttcttcgagcaggaagtcgagtatgccgttcttgacataccggttttcataggcttccataccacccatgccgatcccgtggagcagcatataatcgagataatcgacttgcagctccttgagcgaattgttatacatcgcgatagaggcttcgcggctccatgtgtcgggagagaagttcgaaagcttggtggcgatataatatttgtcgcgcggatagcggctgagggcgatccccatagcatgttccgaacgtcctttgcaataggcgggcgaggtgtcgaagtagttcacaccgtgctcgatggcatagtcagtcagccggttgaccatctcctggtcgatttcgtcatcgctgtctcttgcgctgtttttggcaatggtcggcaggcgcatgtatccataaccgaggatggaaactttgtcttttgtggacggcgtcgtgcggtatgtcatccggtccgtgggaataggggtggagcttcccggacctgaggccatcccgctgtccgaactgcacccggagagcaacggggcggtagttgccgtgctgattcctacaatcttcaggaaatcgcgacggtttatcgcttgatgattgtcttttttcatatatgatgattcttttatttcttgatcaaatattccggtgttgttcgtgtccttccacatatatggcgctgaacggacgcgacgggcacaggttttcacaggctccgcagccgatgcatttttcctcgtttacgaccggcagttgaggcgaatccgggtcgttcgggtcttttgccaccatcaagatcgcctgggtagggcaatggcgggcacagttgccacaagtgacgccgtcccggttgacgatgcaattttcctgaatcagtacggcatgtccgatctggatagccgtcttgtccgctttcgtgatcggacggatcgctccggtcgggcaaacttccgaacatttgacgcattcgggacgacagtatcctcgctcgtacgatacttctggctgcataaatgtttgaaggttccccgaaggacgcagcacatggttcgtacaaaccgatacacaaagctggcacgcggtgcaatgctgggagaaattggcagcgctcagcgagcccggaggagtgatcggggttgtccggtccggtttctttttatcttcgatgatggccagtccgccgtcgactttcttgtccgggagttgtactttttcctgggctttcagtgcggctgaagtggcaagtaatgccgatacggtaaagaatttgcgacgatcgggcttgtctacggccggttgggcggtctgtatttccgccttgtttgtttttctgcgtgtatatcggatggctccctgccggcatttgtcgatacaatccatgcaggcgacgcaacggctgtaatcgatctcgtgtgctttcgcattgatacaggctgctttacaattgcgggtacacaaaccgcaaccattgcatttggacgtatcgataaccggcttgaaaacggaaaaacgggagatcaatcccaaaaacgttcctaccgggcagatcgtgttgcaataggttcgcccattccgccaggcaagtatgatcagtataatgaaagtaactgtggcaatgataaaggttgggaggctccgtagccagacttccgtctcgtagaaagcataactgcccgcccgttccgccaagtaggccagaaagttgttcccccattgccagaggggtgcgaataagttagaggcgatacgcccgtaagcgctgtagggtgcgatcaaggccgcccatgcccctaacccactgatcatggcaaggataaagatcaccatcaccccgtatcttaaccaggacaaggcgggggaataccggaaacgatttttcttccgtttccccgccagccatgaaacgacatcctggaatataccgagagggcagattacagagcagtaaacccgaccgaaaatccaggtcaatgcaatgagcaacagcaccacgccgaggttgagtgccaataccgccggcaggaactgtattttcgccagccacccgaaccatgtatgcaacgtccccgtgaaatcgagaaacagcagggtgacaagcgtaaaacagataagtgcagttgtaagtctgatcgttcgcaacataataaactctttttagatagtctgttattttatgttgcaaacataataaaaggaaatggtttgcaacttacaggaattacggattgatgtaccaatattacggttttgtcaacttctgcaaaaagtctggctgacaaaccttagaacttcaggcaaggccgtccgccaataggtccagctatggccgccgtctcgtactcggaattcatgcctgatccctttctgcttcatgacctggtgcacctgcatgtttccgtccagcaggccgtcgtcatcaccgcaatcaatgtaataacgaattttgggcaagttgttttgattccagtcggaaaggatcttcaagacattgttttgcttccagtgttcgtctcccggcccgaacaggcggttgaataaatccttgtgcgatttgttttttcttgcctccatgactgtgtcgtcgaaaacggcggcactcaacggagcacatgcgcagaacatgtccggatgatgcaagctgtacaggaatgatccgtagccacccatcgacaatccggcaattgcccggctttctttgtcactgcgaatccggtatgttttttccatataggggataagttcttcaaaaaacatgtcttcataaggtacttttccatcatactggttgatataccaagtgtcccatgcgtccggcatgacgattatcatcggcacggcttcctcgtttgcgatggcacggtcggcaatcgttttcatttgtcccatctgtatccagttggtttcattgtccgtataaccatgcaagaggtagaggaccgggtaattccttttcgaggtgttgtagtcggaaggcaggtagatggagtaggaaactttcctacctaatttgttactttcgaaagagagcgattcgaaaactgtactttgcgaatatcctgcaacgttgaatagaaagcacaggatacaatagagataaaatttgtttttcatatactattaataattagatttgtttgtctggacagagtaagaataagagaagagagcttgccggaaaacccattaggtttcgacatactctctttcccttattgggaaattaatccgccaccggatagggaaattcggtcaaccctttgtacatgaattgataggtcggaacttcgattcccaattcttgggcagttcgtacgacatagcctgtcaatgtttccacttcggtgcgattgcctttttgaaaatcactgtgcatggaggttgtggagttgttaggcatgatcttctgggcgtcgatggcggagaatacttgaccgtccggcagacgaatccctttggcttctgccacgcttttgagttcataacctaatgtgatgaacagatcgatatggttatttaccacttcgccaatcgtttcattgaaataggaggtgatagtggcggcggtcgagatcatgaagaatttcttccagatttccaagtcaatgtcatccggtattgtggtaaggatacgggcgttggccaatatatcctgtaagtctttctgtcgtttcttgtttccttgtttacttccgaagaacatccggtcctttatggtgaacttttccactcttcccggtctgaccaagcgggaaccgatgtaaacgcatcctttccaaacctcattgttcggtaatagcttttgtatgcgttccgctatatccgctccgttcagcaggggaatgataaccgtattagggccgatgatcggagtcagctgaactatattctcctccaagtcgtagcttttggtacagcaaaacaggtaatcgactggtcctatttcagcaggattgtcggttgcgagggttggttttgctttgatcgtcaggaatgtatttttgacttcgatgccgttcttacgtatctcttccaggttttcaccccgggaaatgaaatagatgtcaatatcttcagagtctttgtaacgggcagctaatagtcctccgtagtagccgcctacagctcctataccggaaatcgctattttagttttattcat

SEQ ID NO: 747 - DNA, 13784 bp, unidentified
  source 1..13784: mol_type = unassigned DNA
ttaccctactgccatcggctgggaaagcaccgacactcaggaagaaaagatgcgccagctgggggcatgggtaaccgtacagcgcggtcacgccgtagccaacggtctgcccgttatcgccgtaaaccgtgtaggtcttgaacccgacccttccggccagaccaacggtatccaattctggggtaacagcttcgtagccggtccgcaaggcgaaatcatcgcccaggccagcaacctgaaagaagaaaacatggtggtagaaatcgacatgaaccgcagtgaaaacgtccgccgctggtggcccttcctgcgcgaccgccgcatcgatgaatttgagcagctcacccgccggtttattgactaacagacaatcactatattatgataaaagccattacttctacgtaatggcttttattttttcttatcgtctttcccaaaaactcggagtcagcagcagcaatacgccgaagagctccagacgccctatcagcatcatgaacgacaacagccacttcgccaggtcaggaagcgcactccatgaaaatgctggtccaaaggcacccagtcccggccccacgttaccgatactcgacacagacaatccgaaagcctcttccagcccgatacccatacacatcagcgccagccagcataaaaagatacagacaaaataaaagaacacaaacgtcatcaccgtggcaagcgtacgctgtgacaccgccatccggttcatctttaccggcaataccgctctgggatgcatcagccggtggaactcatttttcacgttgcgcaacaaaagcagcagacgcacattcttgacaccacctgccgtagaaccggcacagccccctgccaccatcgtataaataagcagcagccacgtgaaaggaggccacatattataatcgtccgtagcaaagccgcacgacgtatgaatggacgccacctggaaaagcgatttccggaaagcttcctccaatccataattattataccagtacaaggccccggtaattatcagtgtcaccgctccgatggaaatgagatacagccggagctctccatccttaaacaactgtccgcaacgccccttcatgcacatgaaatacagcgagaagttgatacccgacagaatcataaagatagcaatcacatattctataaaaggagaattccagtaagccacactggcctgcttggtagaataccctccggtagccgtcgtagaaaaagcatgacatgcggcatcaaacaaatccatgccaccaatcagcagcagtacgatttccgccacagtcagcacgagatacaccgtccacagacattgtgccatgacgctgattttcggatgaatcttgtcgtgcgtcacccccgtagcctccgccgagaaaagcacctgattgcccactccaaagataggcagtacggcaatcgtaaagaatacgattcccaatcctccaatccactgcgagaagctgcgccagaacagcataccgtgcgaaagagcttcaatatcatccagaatagtggctcccgtagtagtaaagcccgacatggtttcaaaaaaagcatcagttaccgaggggatactcccacttatgtaaaaaggcagcataccgaaacctgtgaaaagcagccacgtgaacgccacaatgcaatacccgtcgcgtcgtgtcacccggttttcggctcctcttcccaacagaatcagtccgcttcccacggccatattaatcaatgtcgtgtaaataaaataaatatagtcttcctccccatagcacaaggaaacacctgcacataccagaaacatcattgcctccataaagagcaggatacccaagatgcgaagaatcatctttctgttaatcaaactgttgcctcggttggcagttacattgaccgccgtcgataaaaaatcttccatgtagctttatgtgtttatcctgcaaacttacaaaaattctcatgaatcacatcgagaaacacaagaaatgacaccatagaaatgatgccagacagaaaaacgcaaatctacatggctgtatcctcccccacaggaacgggttccgaaaccgtgacacttccgggccgccgcttgacgggttgtcggggttggcaccggtttttcaaactttctatatacaggtgtggaataactcttaagacttgttccacaccccgcgtatatatactttataaaaatgcctgccaaccccgacaactcgtcaagatttcttccctcacccctctccggaagcctccgaaaacgcccttgcgtttcaactaaaacgcccttgcgtttcaactaaaacgtacttgcgtttgattcaaaacgtacttgtgttttaagtaaaacgcacttgcgtttgggtccgaacgcaaaggcgtttttcaagaggtgtaaaaaattgatgagaaaacaagaaaatgcgatgcagtatttgtcaattctgttcatttgtttactaaaactggctagaaactcattttgtcgggatttctttttgacttttcggtgaaatggggtatttttgtaagataaataaacgttgacgcttaccttgcatacctatttttgtctgtttgggctgagtgggtgtgggacaggtaacggcgaagcgtacctaaaaagaagcactatggtactaaagcaagtgaaagttattaaacttcctaaatttttagataaaagaggaaatctgtcatttatagaagaagaaaatcatattccttttaaaatacagaggacttattggatatatgatgttcctggaggagaagcaagagggggacatgcctacaaagaaaatgaggaattcatcgttgccttatccggaagctttgatgtcattctagatgacggaaaagaaaaaaaaacattttccttgaaccgatcatattacggattgtatgtacccaaaggcctttggagacaaatggaaaatttctccacaaattctcttgcattaatactagcctctaccccctataatccgtcggattatatctatgattacagtacctttaaaaatatgaagttatgaaaaaaagtagcgtatatgactgtaccatcatagaattagacaaacatcatcatgaaaaagggaatataagtgttgtagagaatgataaaaccatcccttttgaaataaaacgtacatattatttatatgatgtccctggtggagaaagtagaggaggacatgcacataaagaattaagccaactaattattgctgcaagtggaagttttactgtgaccttagacgatggaaatgtaaaacggaccttccaattaaatcgtccataccaagggttatatgtggttcctggaatatggcgaactttagatgatttttcatcaggctctgtgtgcctggtacttgcttcacacaaatacgatgaagcagattatatcagagattataatgatttcatcaattacaaaaaagagaaaaatgtataaagtagaattatatacccctgagagaaaaaaggaatggaatatttttattgagaatgccaaaaattccactttcctatttgatcgaaactacatggactaccatgcagatagattccaagacttttcattaatgatttatcggaaaaataaattatatgcactactccctgctaataagaaaaacgatgtattatattcacaccaaggacttacctacggtggacttattatgtcaaagaaatccacaacgctagaagtcattgaaacattccaagctattaactcttttttgaaagaacaaaatataaataaagtcatttataaacctatcccttacatctatcatcaagttccatcgcaagaagacttatatgcgttattcaaaacaacagatgcacgaataatcggtaggaacatttcatcaacaatttatcaagaaaataaaatcaaattcatcgaatcaagaaaatctggtatacgaaaagcattatcaaacggaataacaattcaagaaagcaatgactatgcagctttttgggaaattctcaatacaaaccttaaaaacaaatatggtgtagcccctgtacacagtttatcagaaataacattattacaatccagattccccaaaaacatcaaattatatcttgcctgcaaagacaacaaggcattgggaggtacagtattgtacttaaccccccgtgttacacacacacaatatatttctgcaaatatagaaggaaaagaactgggagtattagacctcttgtttgatttcctaattaatcatgaatataccagtttcccaatctttgactttggacaatcaacagaaaatatgggtaatgtattgaatgagtccctcatctttcagaaagaaggatttggaggaagaggtgtaatttatgatatttatgagtataatctaaaataaatctatatttacatacaaaataaagttattatgatcaaatttttagacttacaacaagttacagccaaatataaagatgaaatacatgaagccgtaaatcgagtaattgattcaggctggtacttgcaaggaaaagaaaacgaaaaatttgaagcagactattctgcatatatcgggacaaaatatacagtcggatgtgccaatggactggatgctttaatctggattttccgtgcatacgtagaaatgggaatcatgaaagctggggatgaagtgattgttccagctaatacatatattgcatctatcttagctatctctgaaaacggtttaagacctattttagtcgagccatcaattgaaacataccaaatagatgacagcaaaatagaagaatttattaccgaacgtacaaaagcaatattaattgttcacctctatggacaatgtgcttataccgaaaagattggagaactttgtaaaaaatacaatctgaaactgatagaagacaatgcacaagcccatggttgcttgttcaaagggaaaaaaacaggttcattaggagatgccgcagggcatagtttttatccagggaaaaatcttggagcattaggtgacgcaggtgcggtaacaacgaatgacaaagagttagcagaaattgtgagatccgtagctaactatggatctacccgtaagtatgtattcaaatacataggacgtaacagcagattagatgaaattcaggcagcagttcttgatgttaaattaaaacatttagatgaggatattgctattagaaaagaaattgcaaaatattacattaaccacattactaatcctaatattattactccaattataaaagactgggacgcacacgtttttcatatatttacgattagatgtaagtaccgtaatgagcttcaaaaatatcttacagaaaatggagttcaaactatcattcattaccctattccacctcacaaacaagaatgttataaagaatggaataatctttctttccccatcacagagcagattcacaacgaagaactaagcttgcctatgagccctgtcatgacaaaagaagaagtaaataatgtcgttgatatacttaaccactgggaaataacatcatgggaaaaataaggacatttgtaggaaaaacaattccaaccccgctaaaaaatatattaaaagaatggtattggcgaaataaggtacattatataaaattgccgtatgaaaaaaaggcaatttgtgcattaaaaggaaaaaagaaaatacgtgttgtttttctagctttatataaatctgtatggaaatatgattcattataccaattaatgaaggctgatgaaagatttgaccccattgtgttagtatgtcccatagtcaactacggggtaaaacatatgcttgaacaaatggaaatctcttttaagcattataaaagtctaggttataatgtcatctccagttataacaaagactccgacacatacatagatctagaaaaagacttacaacctgacattttattttataccaacccatataaaggcttaattgacaatcgatattatattgatcgattcccccatattttaacctgttatgttccatatggctttaatcccgtaaaatttgaatggacatataatctaaacttccataatttgctttggcgttttttctgtgaaactcagataaccaaagaaatgattgacaaaggaagtttcacgcatggaattaattgtgtagtagtaggatatccgctttatgagaaattttgtaaagagcctattaaaaactttgggctatggaaagagcaggagcaaaaaaagaagaagattatttgggcgcctcatcattctttggaagactgtggaggattacaactttcaacctttttaagctactataaatttttctttgaactagctcaaaaatattttaatgacattcaaatagtattcaagccacaccctcttttaaaggagaaattatatcagcaccctgattggggaaaagaaaaaacggacacatactataaagaatgggacagccacccgaatacacaactcttcgaagatgattatattgatttatttaaaacatcggatgctattattcacgattgtggctcattcactaccgaatatttatatacacaaaagccgtgcatgtatttaactaacggccacaatctagagcaatataatgaactaggtaaacaagcttttaattgctattatcatggcaataatgcatctgacataatatctttcattgaaaaggttgtaatcaaaggagaagatacccaaattgatgcaagaaaagacttttttatcaggaatctattacctcctaatggactgactgctgcagaaaatattattaatgaaattaaaaaacaaatacaataatcatgaatatagcattaattattgccggtggacaaggaaacagaatgggacaagacattccaaaacagtttatgtatgtagaagataaacctattattatacacacactgcaagcctttgaaaaacatccagatattgacatcatagcagttgtctgcctagaaggatgggaaactgttttgcaagcatacgccaaccaatataagattaccaaattacaccatatctatatgggaggaagcaacgggcaagaatcaatacggaacggagtatatggattaatggaaaaatataataaagaagaccttattctcatccatgatgcagtcagacccatgatttcacaagaaatcatttcaggcaatattgctacatgcaaacggtgtggttctgccattacagctattcaatgtacagaagcaattcttgaaagtgaaaatcataaatcctcaaccacttccatccctagagataaactgatgcgtactcagactccccaaacattctttttaggagatatttataacttacatcaagaggctttagccaaaggtattaccaattctgttgcatcctgtacgcttatggtagaactaggatacaaactctatttaactccaggttccgagaaaaacctaaaaataacgaccgtagatgacttggaaattttcaaggcactattaactagcaataaagaatcatggatcaagtaacaatagaaaatactttttataggcaagatgtcgaacgtgttgcctcatattttccatgggaaaaactcaaaaattgcaatatactagtaactggagcacgcgggttaataggatctttcctcatagatgttttaatgacagctaataaaaaagaatttacagtctatggaatggggagagatgcaaaaagtgcaaaccaacggttcaaaaattataaagaaaatttccattttatacaacacgatatcagctttccacttgataaccttaacataaatttcgattatatcatacatgctgcaagcaatgctactccatgcgcatttatagccgatcctgttggaacaataaaaggcaatgtatggggatgtgacaatctgctaagctatggcatcgcacatgggctcaaacgttttttatatgtatcttctggtgaagtttatggtgagtgtaatgattctgtctatacagaaatcagccatggttatatagacaatgtcaattggaggtcgtgctacccaaattcaaaaattttatcagaaactttatgcgtaagctatgcacaacaatataatattgataccgttatagctcgtccgtcacatgtttacggaccatgttatacaagttcagacaatcgtgcatttgctcaatttctcaacaatgcattacaaaaacaagacataatattaaaaagtagcggactgatacaacgttcatactgctatattgcagactgcatttctgggattttagcaattttattttatggaaaacctgaaaacgcttataatattgccccagaagaagccacttcaataaaagagcttgcagaaacaatagcccaattaagctctgtccaatgcaaaatagttcttcctagccaaatcgaacagcagcagcagtctccaatctcacatgctgtcttatcttccatcaaattgaaagaactaggatggaaatcgattttcaatttaaaagaaggaattgaacgcactcttaccatattaaataaccaatgcccaaatcaataaaaaaaagactagtagaaagtgtcctatggagcagtattgaaaaaatcttggtaaaaggctccgctttcatcattggaataatcctagcccgtttattatccccttccgattacggattaatcggaatgttatcgatatttatttctctctccaccattttcatagaaagtggatttgctaaggctttaatacaaaaacaaaacaggactgaaattgatttttcaactacttttttatttaacctagggagtgcaatcataatttattggctattttatttgattgctccctggattgctttattttatgaagctcctcaattatccccccttttaagagtcttatcactaaatattatcataggttccctgaatatcgtgcaaagagcaaaattaatgatttccatggactttaagactcttgctaaagtcaatttttggggaaccatcataggaggaattgtaggcatatatatggcatacaaaaattataatgtatgggctctcgtaggacagaatatttcctccacaggaacaatggccatcttatttttttattacacaaaatggaaaccaacattttttttctcaatacaatcatttaaaacactatttggattcggttctaaattactaattacaggtactgttgccactatatttaacaatatcacaactattgcaattggtaaattatataaatctaatgaattaggtttttacacacgagcaagtcaatttacagaaatgatagcatggacaatcaatgatgttctaggtaatgtaacctttccagtattaagcgaactacaaaatgaaaaagatagaatgttatctgtatacaaaaaatcattattctatagttcattaataactttccctataatgattttacttgccatattggctaaaccgttagttattgtattattaacagacaaatggttaccttgtgtcccacttatacaaattttatgtcttgcaagaatgctaaccccattatccgcaataaatatgaatctattaaatgctattgggcgatctgatttatacatgaaagtagatttatcaaaacttccattagaatgtattattttggcaataacaatacctttaggaattaaagcaatcgtcatcggaaatttaattgcaactattatctgtttttttatcaatggatattacccaaaaaaattttttaattatggcggatgggagcaattgaaagactccgcaaaaatcttcctagctcttatctttatgggaggaacaacatattttagtctatccttttttcaaaatcattttgcccaattattaataggaagtttaataggaggtattatatatcttctttgctgctatatgttgcgaatcatcgactttaaaatcatataccaaaaatttaacaattaaattatggatccttttttagtatcaatagtcgttgtaacatacaactcggctactaccattatagaaacattggaaagtattcgacaacaaacatattcaaccttagaattaattataacagatgactgctcaacagataatactttagaaatatgtaatacgtggttgacaaaaaatggaaatagattcaccaaatataaaataatttcttcagaaaaaaatactggagtagtagccaattgtaatagaggatattatgcagcttcaggtacatggataaaagatgtcgcaggagatgatgccatatatccaaatgcaatagagaatttagttggcttcgcacaattatatccagatgcgaaaattattcattctaaaatgaaattcttccataatgatctatctgaagataatatcataaagaaaggaaaacgaataccaagaattttaaaaacaaataagaatcccaatcctcataaacaatacagtttactatgtataattaacgaaataggagctcctacaacttttatacaaaaaaacttattcactcaattaggtggatacgatgaatccatccccatgtgtgaggactggcctatgtggcttaaaaccaccattaacggctatcccttgtatttccttaatgaatatactgcaaaataccgagtttctacatcctcaataatgggaaaagaaaacaagaactacttttttaaaagattttatcaaatggaaaatttaatatatcaaaaatatattaaaccatacgcacgctatgatatcagattttttaatcggtatgattatcatgtcagattactattagagaaatgtaatttaaacaaaccaaacctactggcaaaaatcatatattatacaactatatctccatataaattatattataaactattgtcactataaatatgcaagaaaaaattataactttcatactaccacgcacaggagaaaccccaattggcggattcaaagtcgtatatgaatatgcaaatagattggtagaagatggatatacagtaaatatagtttatggcataacatcacgtcccgtaaaaaacctcataataagatatggatattatttctgtcggtggttcagatggttaaaatatagaatatcaaaaaattacacacctgaaaaatggttcaaaataaataaaaaggtcaatcacctgttaagatacagacttactcaatcttctataccagaaacatcctacctatttgcaacatcatggtctacagcttattgggttaactcatataaaaaaatatctccagaaaaaaaatactacttaattcaatcatttgaagactgggatggtgataaaaatgcagttatcaaaacatggaaaatgaaattaaataaaatagttatagccccatggttagcagatatcgctcaaaagcttaatgaaaaatggattttaatagaaaatggattcgatcaacaaaagttctatataacaacccctattgagaaaaaggacaaatattcaataacaatgctatggcatgaccacccattaaaagcatgtaatattggcctgaaagcgattatgcttgtaaaacaaaaatacccagaactaaaggcacgtttttttggtgtccctagtaggcctcaagatttaccatcttggatttattatacacaaacaccatcgcccacagaacatttacagatttataatttatctgggatttttttaggcccaagttcaaaagaaggattctgtttaactccacctgaagcgatgctatgcggatgtgcaattgtatgtacagatatcggagggtatacagttgtcgcaaagcatgaacaaaccgcattattatctccagttggtgactataatagtttagcaaagaatattatcagactaatagaagatgatgcactaagaataaaagttgcatacaacggattaaatctaataaaatcttacacatggaataattcatatcaaaaattaaaacatgcactccaaaatccaattataacagattgatgcaggaagaaatatgcacttaattatatctttaacagctatttttggttatctatttaccaaaatatacaataattttaatagagacttatccagtaaacaatatataatatttactatcattctcatactaatcgttggacttagaggagtaggagttgacaatgattatagcacatatgaaagttccatttataacaatctttctataggagaaccaacatttttactcataacatttattattagaactttaggtctacccaattatacattattcctagtttatgctgccattggaattagtttaaaaatgcgaataatatataagtactcatatcttcctattatttcatttataatttacttatcaaatataataatgttacaagatataaaccaaattagggcaggagttgcaacagcattatttctgacatcaatcccttatttggttcaaaataaaaaaaagatatttacatacattattctattagctactttatttcacttttctagcttgctactgcttgttctactttttatagacgcaactcctctctcaaaaaacaaatatatattttggggaatattaccgctattaggatacatcttttattttgcttttaattttataaatgtagagcatattcccattgcacccgttagagagaaacttattatgtataaaacattacaagaaatgggaagtgaaggtttttccaatataaatttatttaacccctattttgtttttaaattactcatctattatcttctattccatttttatgtaagtctcaggcataaagatgagcgcattaccttatacttaaaaatctttgcaatttctttatgcatttttccgacattaggcgcaataactccaattctaggatatcgttcttctgatttatttggaagtatcgagatattacttttcccatatctatttattctttttaaaggaaaaagaataaaaggactatgtacagcttgttattttattctgctattttctattaacctattttataaacacctcatatatttttaggtaagcttccaaaattggcgtattgactagcatatctctttcgcataccttcgtgctaaacttaaaactcgaaagattatgtttagcgaaaaagattttgaaagactgtggttcctctacaaaaccgagggtgagcccaatggagtttccatcaactcgttctgcattggcaacaatattccatacacggcattctatgactggttcaagaagacacagaagaaggttgtacctgtagaagtggaaggtattcctgaagagttgctccaaagcgacaatacacatgaggatgttactgaggacaagcccaaacgtacaactccccataaaggaagcattatggtgacgataagaactcgtgagggcttgtgcatacagaagaaaggcttagactatcaggggctgaaaacgctggtagagaaactggagggcttatgctgagcatcaacggtcttcacaacttctactaccttcctgagcttcacgatatgagatgcaaggctcagcgtatatgcgagataatccgaggtcgataccaccgtgatccattggatggtgatgtttacatgttcatgtctaaagaccagcgcaaggttcgtatgatacactatgagcgcaatgcctactaccttcatgagaagtctttcattaagggctataagttcatgaaaatagagcgcaaggacgatgtgacagt

SEQ ID NO: 748 - DNA, 14337 bp, unidentified
  source 1..14337: mol_type = unassigned DNA
  misc_difference 11820: note = a, c, g, or t
  misc_difference 11821: note = a, c, g, or t
  misc_difference 11822: note = a, c, g, or t
  misc_difference 11823: note = a, c, g, or t
  misc_difference 11824: note = a, c, g, or t
  misc_difference 11825: note = a, c, g, or t
  misc_difference 11826: note = a, c, g, or t
  misc_difference 11827: note = a, c, g, or t
  misc_difference 11828: note = a, c, g, or t
  misc_difference 11829: note = a, c, g, or t
  misc_difference 11830: note = a, c, g, or t
  misc_difference 11831: note = a, c, g, or t
  misc_difference 11832: note = a, c, g, or t
  misc_difference 11833: note = a, c, g, or t
  misc_difference 11834: note = a, c, g, or t
  misc_difference 11835: note = a, c, g, or t
  misc_difference 11836: note = a, c, g, or t
  misc_difference 11837: note = a, c, g, or t
  misc_difference 11838: note = a, c, g, or t
  misc_difference 11839: note = a, c, g, or t
  misc_difference 11840: note = a, c, g, or t
  misc_difference 11841: note = a, c, g, or t
  misc_difference 11842: note = a, c, g, or t
  misc_difference 11843: note = a, c, g, or t
  misc_difference 11844: note = a, c, g, or t
  misc_difference 11845: note = a, c, g, or t
  misc_difference 11846: note = a, c, g, or t
  misc_difference 11847: note = a, c, g, or t
  misc_difference 11848: note = a, c, g, or t
  misc_difference 11849: note = a, c, g, or t
  misc_difference 11850: note = a, c, g, or t
  misc_difference 11851: note = a, c, g, or t
  misc_difference 11852: note = a, c, g, or t
  misc_difference 11853: note = a, c, g, or t
  misc_difference 11854: note = a, c, g, or t
  misc_difference 11855: note = a, c, g, or t
  misc_difference 11856: note = a, c, g, or t
  misc_difference 11857: note = a, c, g, or t
  misc_difference 11858: note = a, c, g, or t
  misc_difference 11859: note = a, c, g, or t
  misc_difference 11860: note = a, c, g, or t
  misc_difference 11861: note = a, c, g, or t
  misc_difference 11862: note = a, c, g, or t
  misc_difference 11863: note = a, c, g, or t
  misc_difference 11864: note = a, c, g, or t
  misc_difference 11865: note = a, c, g, or t
  misc_difference 11866: note = a, c, g, or t
  misc_difference 11867: note = a, c, g, or t
  misc_difference 11868: note = a, c, g, or t
  misc_difference 11869: note = a, c, g, or t
  misc_difference 11870: note = a, c, g, or t
  misc_difference 11871: note = a, c, g, or t
  misc_difference 11872: note = a, c, g, or t
  misc_difference 11873: note = a, c, g, or t
  misc_difference 11874: note = a, c, g, or t
  misc_difference 11875: note = a, c, g, or t
  misc_difference 11876: note = a, c, g, or t
  misc_difference 11877: note = a, c, g, or t
  misc_difference 11878: note = a, c, g, or t
  misc_difference 11879: note = a, c, g, or t
  misc_difference 11880: note = a, c, g, or t
  misc_difference 11881: note = a, c, g, or t
  misc_difference 11882: note = a, c, g, or t
  misc_difference 11883: note = a, c, g, or t
  misc_difference 11884: note = a, c, g, or t
  misc_difference 11885: note = a, c, g, or t
  misc_difference 11886: note = a, c, g, or t
  misc_difference 11887: note = a, c, g, or t
  misc_difference 11888: note = a, c, g, or t
  misc_difference 11889: note = a, c, g, or t
  misc_difference 11890: note = a, c, g, or t
  misc_difference 11891: note = a, c, g, or t
  misc_difference 11892: note = a, c, g, or t
  misc_difference 11893: note = a, c, g, or t
  misc_difference 11894: note = a, c, g, or t
  misc_difference 11895: note = a, c, g, or t
  misc_difference 11896: note = a, c, g, or t
  misc_difference 11897: note = a, c, g, or t
  misc_difference 11898: note = a, c, g, or t
  misc_difference 11899: note = a, c, g, or t
  misc_difference 11900: note = a, c, g, or t
  misc_difference 11901: note = a, c, g, or t
  misc_difference 11902: note = a, c, g, or t
  misc_difference 11903: note = a, c, g, or t
  misc_difference 11904: note = a, c, g, or t
  misc_difference 11905: note = a, c, g, or t
  misc_difference 11906: note = a, c, g, or t
  misc_difference 11907: note = a, c, g, or t
  misc_difference 11908: note = a, c, g, or t
  misc_difference 11909: note = a, c, g, or t
  misc_difference 11910: note = a, c, g, or t
  misc_difference 11911: note = a, c, g, or t
  misc_difference 11912: note = a, c, g, or t
  misc_difference 11913: note = a, c, g, or t
  misc_difference 11914: note = a, c, g, or t
  misc_difference 11915: note = a, c, g, or t
  misc_difference 11916: note = a, c, g, or t
  misc_difference 11917: note = a, c, g, or t
  misc_difference 11918: note = a, c, g, or t
  misc_difference 11919: note = a, c, g, or t
atgaaagaagactggaaacccggaacaatgatttatccgctgcctgccgtattggtgagctgcggaagcactccggaggaatataacattctgactatcgcatggacggggacgatttgtacgaacccgcccatgtgctacatctccgtacgccccgaacgccactcctacgacatcatcaagcggaatatggaattcgtcatcaacctcaccacgaaagatatggcacgggccacggactggtgtggcgtacgctccggaaaggactacaacaaattcgaggaaatgcatctgacaccggggaaaagcaccgtagtcagcgcgcctctcatcgaggaatcaccgctttgcatagaatgccgggtaaaggagattatggctctcggttcgcacgacatgtttatagcggatgtggtaaatgtacgtgccgatacccgtaatctgaaccctgaaaccggcaaactggaactggcggaaacgaatccgctggtctatgtgcacggtggatattatgagctgggagaaaagataggcaaattcggatggtcagtagagaaaaagaagtaataatgcgataaaggttttaagagatggagttgcgacgaatcttgatgggcttatatctgttggccttccccgccatgatgtggggacagactccggttgtgcccggtactgccgacgaagagcattccggacaccgcaaggaaactccggtcaatttcggtttcaaaggcggtttcacctcttccttgttccttgtatcccagttcagcgtcaacggagtgcccatcgacgaagtgcagaacaattacaagataggatatttcggctcccttttcatgcggataaacttcgatcgccacttcctgcaaccggaaatatcctacaacatcaaccggtgcaacatcaccttcgagaaacctctgcccgaagacgccgcatcaggagcccggctggaggaagcctccatgacatcgtccatccacagtatagacatccccgtcatctacggatacaacttcatcaaggaggggccgtacagccttgccgtctttggaggacccaaagtgcgctatatatgggacaggaaaagtgacatcgacttcgagaatttcgaccaggtgaatatccgtgaaaggctgcgtccgctcaatctcagtttcaccgtcggcgtatccgtcaccatctcacgcgtctttttcgacttccgttacgacatggggctgcataacatctccaaaagcgtgacatacgatattccggccgacaacaacgctgcagacgaaaacacgaaaaacgaaatccgttttcaccgcagggacaatgtgctgagtttttctttcggagtgttcttttgacagtaaatttcttccttttctttcaatttattcatttatttcccgtaaatttgtgcgcttaataagagaacacagatttatcaaacttatctaataagcagaatgaaaagagatgatttaattttcgaacttatcgaaaaagaacaccaacgtcagctcaaaggcattgaactgattgcatcagagaactttgtaagtgaccaggttatgcaggcaatgggctcctgcctcaccaacaagtatgctgaaggataccccggcaagcgttactatggtggttgtgaggtagtggaccagagtgagcagattgccatcgaccgcttgaaacagatcttcggcgcagaatgggccaacgtacagccgcactccggtgcacaagccaatgcagccgtattcctcgccgtgctcaatccgggcgacaaattcatgggactgaaccttgcacacggcggtcacctctcccatggttcactggtcaacacttccggtattatctatactccctgcgaatacaatctgaaccaggaaaccggacgtgtggactatgaccagatggaagaagttgccctgcgcgagaaacccaaaatgattatcggcggcggttctgcttattcccgcgaatgggactacaagcgcatgcgcgaaatcgcggacaagataggtgccatcctaatgattgacatggctcatcctgccggactgattgcagccggtgaactggataaccccgtgaaatatgcccacatcgtgacctccactacccacaagactctgcgtggtcctcgcggtggcgttatcatgatgggtaaggacttccccaacccctggggcaagaaaactccgaagggagaaatcaagatgatgtcccagttgctggattcagccgtattccccggtatccaaggtggtccgctagaacatgtcatcgcagccaaagccgttgccttcggcgaaatcctgcaaccggaatggaaagaatatgccaagcaggtgaagaaaaacgccgctgtcctggcacaagccttgatagaccgtggcttcaccatcgtttccggcggtacggacaaccactccatgctggtagacctgcgcagcaaatatcccgatttgaccggtaaggttgccgagaaggcgttggtatctgccgacatcaccgtaaacaagaacatggttccgtttgacagccgctcggctttccagacttccggtatccgtctgggtactcctgccatcacaacccgtggtgccaaggaagacctgatgctcgaaattgccgagatgattgaaaccgttctgtccaacgtagacaacgaacaagtcatcgcagaggtacgtgcacgcgtcaatgcgaagatgaaagaatacccgctgtttgcttattaataagcaaacagaattaaaaattaagaattaaaaattaaaggctgcgcaatgttcgctttgaactgcgcagcctttaatttttaattctaaacgcgctccgcgcgtttagctcagcccttctatatttccgtccacaatatcaatgtgttcggcttgtggtttcttgggtaatcccggcatacggagaatttcaccggcgatggctacaatcatttccgcaccgttattgaccacaatatccttgatgtggaactcaaagttgttgactgcaccgtatatcttcgggtcggcagagaaggagtactgcgtcttggcgatacagacggggtaatggctgatacccatctgctctatcagtttgataaccttgcgggagtggagactgtaagtcactacgcttgccccgtagaggttgcaggctaccttttctattttacgttccacgcaatcgctctcttcgtaggtgaaggtcagcggttcggatggtttgttctcgatagtatctactaccagattggcaaggtcaacggctccctctcctcctttggcaaaggcgttgttcacggcaaaacctacctcaagcttttcttcgcaatggcggcggatagcttccacctcctcgtccgtatcactggcaaaacggttgaatgccacgatgacctgctggccgaatgaacgcaaattgcgtacatgtttgtccagattgccgaagccctctttcagtccttccatattgggttccttgatgcggtccagactgacaccgccatgcatcttcagtccttgtgcggtagcaacgattatcgtcagcttgggctgtaggccgctcttgcggcacttgatgttgtagaacttctccgcacccaggtcagctccgaaaccggcttccgtcactacataatcgccgaatgtcatggccatttttgtggcaagaatggagttgcaaccatgggcaatatttgcgaacggtcctccatgaacaaaagcagcagagccttcggtagtctgtaccaagttggggttgatagcatctttcaacagtacggtaatggcaccggctactcctaactccttcactgtgaaaggagtaccatcgaaacggaatcccagaataatattttcaatacggcgacggaggtcgtcgaggtctgttgccagacagagaatagccataatttcggaagccggggtaatatcgaagcccgactcctcagtaatgccgttggtgctcggtcccaatccggtgacaatgctccgcaaggaacggtcattcacatcaagtacgcgccgccagatgatttctttcagtccgaagccgtctgcctgatgctggtacaagtaattgtcgagcaaagcggaaatcatgttgtgtgcggaggtaatggcgtgaaagtcgcccgtaaagtgcaggtttatcttctccatgggaagcacctgggcatatcctccaccggcagcaccgcctttcatgccgaagcaaggacccagcgagggttcgcgtaaagccacaatcgctttcttgccaatcttgttcagccccaatgccagcccgatggacacggttgttttaccgatacccgctttcgtagccgtgatagccgtcaccagtatcagattgctcttcttcactttctcttcatcaatcagatgcgtaggaatcttggctatgtaacggccatagttctctacttcgtcacgcgggatatccacactttcagccacctgctttatcttcttcagctctatgctgcgggctatttcaatgtccgatttcatacagagtcttttctttaaataacaactttaatgttttgaaagttgcaaaagtacgaaagatgtggcaaagtacaaaagaataccgtattttcacctgaccacctgcatcttctatctatttgaaccgcgacgtatccactgcctcccgttgcttctccttatatccaccgaatttataggtgaacgatacgccgaattcgcggaagcatgagtaatgattcgtcacattctgcgtcttgaaacggatgcggggagaaatctgtcccgtctcaaaaatatcgttgcaatagaggttgagaatggctttgttcttggcgaagccgtagcgcagggcaatattcacattgcccgacgtaggcaggtcgtagatgccctgaatggctttactatgcacaaatccggtcaccgtcagcttcaagtcgggtttggtggagagagtaaaagtattgttcatctgggcaatgccatagcattgctttctgtcgaaaggaatatcccagaaatcaccatccttttcgcgatgccacaagccgatgagggtaaggcgagaattcaaccaatccttcaccttaaacgggatagaggcttgtattcctgcttgttgctgataatcaaaattgagtgtcttgtagatttcaaccagacgttcggaggattggtagagtgtctgtacagagtagtccttggtatggttgaaccaagcgctgaagatgtatttgctcttcaaaatataggtcattttaagctcatactcttgcgccggtttcagcaacggattaccatgcagctcagagtatccgccaccgatgtaagagacggcatcctgcaccgcccagtagtcgggatagtccttgtcgctgctcagagagagctgaaggatatgtcccggtgccggcatatagttcaagttgacgatgggataccagtcccactggttccagacgggagtcttgtaatgctccacagccagagaagcgtccaaagcaagtttgtcgccgaaactcttgctgaaacctgcatagatattccaggtctgctcgcggcggcgggacttcatattgctcaaggcatccgatgaggtcagttgtccaccggtttcggggtcataataatattggtagctgttgtcgatgctggtagtatagatggctccgtaattcaaatcccaaccttttcccagactgtgctcctgggccagaaagaatttccatcggttgatgcgttggcaatcttcggtgtagaagtcgagttcctcgtcctgcatgcggctatgcagcaactggtcggacggggaacggtagtaggtcagttcggcaccggctttgaggccaaaaggggtacgatagtccagacggccgttgtgcagccagtcggtgctattgccatgagttgtggacacctgcgtgcccgtcacgcccttccagttgtgggaggtggaatagccaccgttatagacgaaactcagctgatggttcttggcgatattatagtccgcccctacccggaagctatgggtatggctacggccacggcccacctcatctgttgtcatggggtgaaccgagccgtctgccagagtgtgcacagcctctttgtcggtagtagagtagccctggccatggctgtgcgagtaaagaaaatctgctgagaatttatttttgctgaagagcaggctggcgcgttcctcaaagccttcgttatgcttctggcgatacttggcatagagttcgccttgccaggagccggggccgcctgccgattgtttcagggtgatattgataagtgcgccacgcacctggtagcgtgcaggggcgttgtacatcacttccgccttctctatgcggctggcagggatgctgcgcagcaaggaatagagctgctctgtgctgagggtggttactttgccgtccaggataacggtgactccctgacctgccaactgcagccctccattcatctcgatgacgccgggaagctctttcacggcatcgtaggcattatctacggggaggttccggataaggcggggcaggtcgtacaccagcttgccttgcgctgcctttacgatggggcgttcaccggtaatcatcacttccggcaaggtctgataaaggctgtccagacgggcatcggtcgtaataaggctgtcggcgctgaggatgcggttgtcgtccgcaccggaggtggttgcagtgccgttgttctcttgtgccgaaaggctgatgctcaaagcacagcatacaatagggagtaaatagaatcgtttcatgttcttctttttatttatgtttatattcttcttctgcaaatcttcgtctgcaaagtacggcagaatcagcagaaacttgtgttatcagcggcttaccaagtgttatccagtgttatcgggagtgttatttagtcttatcggatgatagggttcacaatattaatcttacctttgtatgtataaaagtaaccggaaacaaacatgaaactgccattcaaatatattgccatacttgtcatcgtctccctggccggcatcttcgcctaccaagcctactggctgacggggctctaccataccatgcacagtgaaatggaaagggacatcaccgaagccatgcgcatgagcgactataacgaaatgatgatacgcgtggataaaatgaagcaggacgacataaaccacggtgaagtcagcgtatcagccggatacagcgatgacggaaaatcatttgtccgtagcagtaccaccatctcccgtgaagattctttggacaacaccaccctgcacgaaaccttcatgcccaaaggagacagtgtttacgtgacccacccgaacgattcaacccgcgtggaagtcagtgtcaggaagaacgttcctttgctcaccaaagaggacagtgtgcttttcatcgaccagcacagagaaacggataaagtccgttggatgtctgccgattctgcccgagagcgtctggaagaagcagtcaaggactcagacagctctccccaatccgcattgagtgccaaagagggactggatgtgattttgcgcgaccaaaacagtatgctggaactcgccacctacttccagcgcggactgcattcgggactggacatcatttccgaccccgacgtactgctttatgacagcctgctgacttcattcctgcatgaccgtaacatcaatcttccccataggctgctacatcttcacaaaggcagcaaatgggactctaccattctctatatagatacattggtaaacatcggtacccccggctatgtgcctacctcaaaagccgtggaatataattattctttcgacatcaatacaagtcaaagctaccgtctcatcatggaaccggccggcacgttggtcttgcgacagatgtcgggcattctcaccacatcattcgttattctgatcgtactcgctttctccttctggttcctgatacgcaccatcctgaaacagaagacactggaagagatgaagagcgatttcaccaacaacatcacccacgaactgaaaacccccatcgccgtagcatatgccgccaacgacgctctgctcaacttcaaccaagcggaggaaaaggcccaacgcgacaaatacctgcgtatctgccaggaacagcttcagcgcctcagtggactggttgaacagatactttccatgagtatggaacgccgcaggactttccgcctgcacccggaggaatttgcaatacgtgatattctggaaacgctcatcgaacaacacaagctgaaagcggaaagctccgtccacatatcggtggacatcgaaccggaagatttgagcgtacttgccgaccgtacgcatttcagcaacatcatcagcaacctgatagacaacgccatcaaatattcgcacggagaagccgaagtgaccatccattgccgcaagatggccgtcgaagggcagaatgaacagaccgaaatctctgtcagcgaccacggtatcggtattgctcccgagaagcagaagcacatcttcgacaaattctaccgcgtacccacgggtaatctgcacgatgtgaaaggctatgggctgggattgttctatgtgaagaccatgatagagaagcatggtggcagcgtatcggtaaagagtgagttgggaaaaggaagtacctttacgataaggatatgataacattatttgttagggtactttacattacttgttaaggagctttacattacttgtaacaaaagcgacaattatggaaaagataaccgtacttctggttgaggacgaacagaccctcgccatgattatcaaggacacattggaagggcagaacttcatcatccacaccgcagcagacggtgaagagggattgcgcaagttcttcgacctccgtcccgacgtgctggtggcagacgtgatgatgccccgcatggacggctttgagatggtgcgccgcatccggcagaccgacaaacagaccccggtactgttccttaccgcccgttccgccatcaacgatgtggtggaagggtttgagctgggtgccaacgactacctgaaaaagcctttcggaatgcaggaactcattatccgcataaaggccctggtaggcaaagctttctcctttacagaggaaaagcccaaggaaaccaccgtttttgaaatcggtgactaccgtttcaattccgtcactcaacgacttgcttttgcaggcagcaccccgacttcacctaacgcggatacggaagtggaactctcccaccgcgagtccgagatactgaaacgcctttgcgagaaccgcaaccaggtggtcaacacccagaacgtattgctcgacctctggggagacgacagcttcttcaactcccgcagcctgcatgtgttcatcaccaaactgcggcataaactggccggagacgagcgcatccgtatcgtcaatgtgcggggaataggatataaactaatagtgaactaaactaaaactaaactactatttatgagaaagttattattcattacttttatctgttcctcactctgcgcctatgcacagagcgagattccggaagacacaataaagaaccggcctcccgtaaagaaagagcagattcccttttctccaaaagagaacaagcgtacgggccttgatgaaagccagccccaacaaagtctgcagggcgaacagcaggaagagataaatctccatctccctccctccgactatgtggagcccctgccctggacggacatgaagaagatacactttcagaaaaacatctttgaatgggacttccagcgtttcgccgatttcctgctctcgccggaagtcgtactgacgatgtacggcagccataacacctatcctgcaatgggctccatcatgcaggctggcgcaggagttacttattacagtcccgacggacattgggaattgagcggaggggtatatgccgcccattattccatctcccaaccttcatccattaccggtgcccagtatgccaaaagggatgccccccgaggtactcaatgggacataggctacaatgcctccgtatcctaccgcatcaatccctacatgcgcctgcatgccttcggccagtattcgggctacgggagaagtaactcctttcatggatatatgaacccgatgtatccgcaaagcggttatggcatggtactggaactgaaagtgacggactggctcgacctcaacggagggatggaacgaagatacgaccccaccaaaatgaaatgggtaaattcgcccattttcgcccctaccattcgtataaagaaatagaaataatacaaagatatttccggaaatagagggaaacgagtatctttgttcagtctgcccctatgcggcagacagcaactgaaattgtgaacaaagaacaatgaaacgaatcttcttctgcatcatcattttacttgcaggcatgtcatccgtcagcgcacagagcgagatgcctgccgatacggtacgtactgcagtacgtggcaaagcgtctcccgaaggcatgtctccgtctgaaaaggagcttctgccgggcgtgaagaattacgacggcttcctgctggatatggggctgatgaatctgtccacccccactcttcccaaattcactttggagataccggatgccagcaaagactatagccgcatcttccagttgaacccgaacgtgacttattcacaaggtctttcgaacatattctcactcagcaactcccggtatttcagttcgaatcccttcggactgacgggcttctggggctctaccgacaacctgcaaatgggaagtttcactttgaagaacggcatgcgcatccatacgtacggcgaatatgacaaggacggctggaaagtacccaacccttccgcactgccttgggaaaagaacaatttcaaaggggcgttcgagctgaaatcagccaacggagcctttggcatacgcatcgaggtacagcagggcagacacgtgccctattgatgcccatcacttaacaacagaatcaatgacaagaaagaaaatactggtgataggcgccaacggttttaccggcagacgcatcctggatgatttgtcccacaacgtgttttatcagacaacgggctgttccctgcacgacgacatctgtccccattcgggcaactatcgctttatccgcacggatatatgcaaccgccaggcggtggaaaaacttttccaggaagtacagccggatgttgtaatcaatacctccgccctctccgtccccgattattgcgaaacgcaccatgcagaagcggatgccgtcaacattactgccgtggagcatctggcagaatgctgtgaggcgggaggcagccgttttatccatctttccaccgacttcgttttcggtggtgatacggaccgaccctatacggaggaggatattcccgctcccgttaattattacggctacaccaaactggaaggtgagaaacgtatcgctgccgtttgcagggattatgccatcgtgcgcgtagtggtggtgtacggtgccgccctgcccggacagcatggaaatgtgctccaactggtggcaaacagattaaggaacaatgaggaagtgttcgtcgtatccgaccaatggcgtacgcccaccttcgtgggagacgtgtcgcaaggagtggagaagctgataaatcacccacaaaacggcatctaccacctctgtggcagcgagtgcctgaccattgcagacatcgcttatcgggtagcggacgtattggggctgaatcgctcgctcatccgtcccgtcaccacgaaggagatgaannnnnnnnnnnnnnnnnnnnnnnnnnnnnnnnnnnnnnnnnnnnnnnnnnnnnnnnnnnnnnnnnnnnnnnnnnnnnnnnnnnnnnnnnnnnnnnnnnnnacgtattggggctgaatcgctcgctcatccgtcccgtcaccacgaaggagatgaatgaaaagacgccacgtccccgtttcagcgggctgagtatagaaaaggcaagccgggaactggggtatcagccgcgcacgctggaagaaggaataaagcagatgttcggatggtaaataatgcaggtgcggatggcagcagattcgactacagcaactccggctctgccagtcctttctctttgcgatacacacgtaccatctccagaatcacatctccatatttctccacccctttttttccgaaatacggaatgcgtacaagcatggccttatccgaaggaagcagattgctgatgcctagaattgccttctgctgaatgacggtgtatacgggcagccctaatgcggaagcttctgcattgcgccatgctaccaagcggttgtaaagttccggatgcagcacatccgtgggtacttcaacagccgcagcatcgcgtttccgctcacgcggacgtttctctttatcagcttgcttactgcttccctgcccttctttggcagaagcacttctccctttgcctttacccttctgcgaagccgaatcatcaatggaaagcagtgctttctgcttcaagtatcctgccatatggaaaccattctccagcacataatccagcaaatcagtcttcatgtcaaacacttcctccagctcctccatggcatcccggagcttcttcttcaactctttattatcagaagttaccgtactcgccatcaccgcatccagcggttgcaactgctcttgaaaataagtggcggcagagtgtatgcgcccctgcaaagtcgggtcggctgcatagtcctgcgcagtatcaatcaggcgggtatactggatactgaacttctgggctactttcgtcactttgtcgtgaaaacgttccatttcctccttgcaggctgcgagttgcttgggaaagagcttgtacaagtgttcgtctatcagccgcacataccgccgcaaagcctgctccatgggctggaaatcgaacaagcccgacagcagttccaggaaataggtctgctgcaaggaacggaagcgtttctcgtccggctcgtttctccgtgcctccatcgtgaaggtatctactgcatggtcactgataacggcctttgcagaaagcggggcactgagcaccactccctccaatgtcttgcagcggctcagagccacataggtctgcccatgcgcaaaggaggcactggcatcaatcacggcacgttcaaacgtcagtccctggcttttgtgaatggtaatcgcccacgccagcttcagcggatattgccggaatgttccttcaatatcttctgtaatctccttggtttcctcatcaagcacgtatttggcattcgtccactcttcctcctgaagtaagaaggtagcgtcgcttcccttactgcgcacttcaattacatctgccgacacggctgtcacctctccaatcatgccattgtagtaacggtgctcaccggaggtgtcgttcttcacaaacattacctgggcaccgcgtttcagttccagtacttcatccgtgggataggaatattcgggaaactttccgtcaatcttggcacgaaaggcatacgagcgtcccggaagttgttccagctcatggtcattaatccgttgggcctgataattgtgggtcaccaggcggatgtatccttcttctttatctggtacgaaattgggaatataccggcggttcaaggcttccagcacttgcccgtcacaacggttttcgcgaatgcggttcagtaattcaagaaaagtcccatcgttctgccgatagactttctttagttctatggtgcaatattccgtctgcttcaaggcctggctggagaagaaataaggcgtgtcatagtatttgcgcagcatctgccactcatcgtctttcactacgggagacagctgctgtaagtcgccaatcatcagcagttgcacgccgccaaagggtttgttccggtcgcggaaccgcctcaagacggcatccaccgaatcgagcaagtcggcacggaccatactgatttcatcgatgaccaataaatctatgctgcgtataatgttaattttctctttcccgtaacgaaaacggtaggttgccttgccatctgcgctgaatgagctttcgggcacataaggagcgaaaggtacttggaaaaaggagtggatggtgacaccgcctgcattgatagcggcaattcccgtcggtgcaagtacaatcatccgtttcggactctctgccctcagttttcgcaggaaagttgtcttaccggtacctgccttgccggtcaaaaaaagatgagtgcctgtgttttcaatgaattgccatgcaagcgctatttcgggattattctccat

SEQ ID NO: 749 - DNA, 19255 bp, unidentified
  source 1..19255: mol_type = unassigned DNA
tatgtaagataccacataatcttccacatagattctgcagtgcttgtccgcctctccgatctgcgttatgttcttcggtaattccatacaaaaaacacctcccatgccgtttctatcagttatcactaactatagcatccgcacaggaggtattttagcgttctttgtcgcacctcttcaaaaacagttcgacaaagtttgcaccatattctatgtattcttagctatgcttcaaacttatatacggtaacagaatcgtattctctgccgttctccccgccaaatacataggaggggaaattctcatgatgaatggtatccgggaaatactgggtctccaatgcaaaaccgcagcggttgccgtaggtcaccccatcttttccgggctgtacatcaataaaattgcctgcataaaactgcactcctggcagggtggtgtatgccttcattactctgccgctcttcgggccttttactgtggcaatatgccgtaatgtaccgtcatcgttccatccatcgatcacgaaattatggtcatagcctccggtcaggagtaactgctcataatcttcccggatgtctctgccgatcttcttgggctgtgtaaaatccatgggtgtgcctgctaccgcacgaatctcaccggtagggatcgatcctgctgccaccggagtaaagtgagaggctctcagccacagttcatgctcttcaatgctgcctgcaccgtgaccatccagattgaaataggaatggttggtcaggttgataatggtcttcttgtcactggaagcatggtaatgcagagtcagctcattctcttcactcagagagtaggttacggataccttcttattgccggggaatcccagatgtccatcctcatcctccagagaaaatgtcacgctgttctctcccatctccgcatcccagagtctcttatggaagcccagctgcttatgagtatgtaaattgttggcaccgtcatttttgtccagctgataagtaacgccatccagcgtatattctgcaccgccggtacggttcgcacaggggccgatcaccgtgccgaaaaagctgtcgttgccgtaatagctctcaccgttttcaaatcccagcaccagatcgtccaccctgcctgctgcatccggcaccagtaccctcaccagagttgcgcccagatccgttatctctgctttcatcccttgatcattactcagggtatacagagaaatctctttgccttccggacttttcccaaataaactttttgttactgccattgtctttccctcccacttttatccatttttatttcatgcatactgtctataattccactctgccctctaaagcgcggagtaatgttacctcatcaatatattccagatctcctcctacagggacaccactggcaattctggtcaccttgattcctgtgggcttgataagcttgctgatatacattgccgtggtctcaccttccaggctggaattggttgcgataatgacctcctccacatcaccctgcagacgttccatcagttccttcagcttgatgtcaccgggtcccacacccagcatcggggaaatggcaccatgcagtacatggtacacgccctcatatttgccggtcttctcataagccgccagatctctggtgttctccaccaccataatggtacgatgatcccgtctgggattcgcacacaccgggcagagttccttatccgtcagagtatagcattccttgcaatagcggacattggctctggcttcgatcatgacgtttgccagtctgtccacacggtccttcggcatattgatcaggtgaaaagccagtcgttgtgcggacttactgccaatccccggaagggctgccagttcttctattaatttattgatctgtccgctgtagagttccattagaaaggaaatcctcctaatcctccggtcattttgcccataagttctgcattggcttcatccgccttgcgcagtgcttcgttggctgctgccacgatagcatcctgcagagtctcgatatcctcgggatccacgatctcctctgccagcttgatggatgtgatttcttttttaccgttgatggtcacttccacagctccgccacctgcggatgcggagaactccttggtctccagttccttctgtccttcttccatctgacgctgcattctctgtgcctgcttcatcagattattcatatttccgggcattgcgcctccgggaaatccacctctttttgccatgttgctgtttcctccatattatttataattgagttattattctatcttaccttatctgcaagtctgccgcaatcccaaattcacgcaggatcactcttcctcatcgatctccatgttgatgaccttactgagatccacatagttgtcttcgaattctctgctgctttccaccgtctggatcgtcacttcaatctctttgctggaaaaatcggacaacagcatttccagctgctgcttgttctgctcgtgagcttctcctttgaaataatcggaagccagtccgtcctccaacaccaccatgagcttgttgtctccacccagacttaatcgggcgtttttcagatacatcttcatgggattctcggcatttcccacgatggccggccatttccgtacgatctcctggatatcctcggggaccgccttcggcaactgtggcttcggctttgccacaccggcctgcggcactccctgtgctccgggagctccggcaggcatctgggccgccgtgactacaataccgttctcgaccttttcctccacctggcggattctatccaggaccgcctcctgatccgtctccatctccggcttgcacagcttgatcagcgcgatctctaccagaatacgtttctgtgccgcatagcggatctggccggacagttcggagaaaatatgaatatagcggatgatctggtccatggacagcatggaagcttcttccttcagattcgccagattgtccgtagacatgtctatgacatcctccagattatccgctgtctgtaccaacatcagattccgcagataccaggtaaagtccgtgacaaactgtaccagctccctgccctgcatgacgatctcttccaacagttcaatgcagcctaacacattccggtccataacgaagcgcagcaacctgctgaacacttccgtatccactgcccccagcacatccagggtcatatcgtaggtcagttctttgcccagatggaaggcaatacactgatccaacaggctcaaggcatcacgcatggagccgtctgccaccttggcaatgtagcgcagagctctgtcctccacctgtacctgctccgtgtccatcagttccttcatgcgatccgtgatggtatcaatggagattcgtttaaaatcatatctctggcagcgggacaggatcgtaatggggatcttgtgcacctctgtggtcgccagaataaaaataacataagagggcggctcttccagcgtttttaacaatgcgttgaaagctccgggggagagcatatgcacctcgtcgatgatgtagaccttgtattttccctccgcgggagaataggatacctcgtcgatgatctcacggatattgtccacaccgttattggaagccgcatcgatctcgatgacattcatgctggctcctgctgcgattgccttacaaatacggcattccccacaggggccgtcctctgtggggtgttcgcagttcactgttttcgcaaaaatcttggccaccgtggtcttaccggtacctcttgttccggtaaacaggtacgcatggccgatccggttcgcccgcagctgattcttcaatgtcgtcacgatatgatcctgacccttgacatcggaaaaagcgtccgggcggaatttccggtatagtgctgtatatgacatgttttttctctcttccttgtaactattcagagccatcaaatattagcagatgcttgtcgaaaatagttactcattaattttctgtcttaatcgccgaagcagatgcccagcagcttcgcttcctgtacgatggtagcatcgggatccacggtctttaacttgcccgctacatcctctaacggaactcttacgatctcacggttcttatagcctaccatgaagccgtactggttgtccaggatcagcttacctgcctcggagcccagacggctggcgaatactctgtcataagggcaggggcttccgcctctctgcatatggccgggtacggtgacacgtacttctctgccggtcttctcctggatctgtgcagccacttcgtaagatacggaagggaacggatatttttccatctttttcttgtaatcttttttggtcagggcagcatcttccttggaaatcgcaccctcagccacagcgataatggtaaaacggcagccctttttgtccctgtcttcgatcttctcgatcaccttatcgatatcataagggatctccgggagcaggatgatgtccgcaccgcctgccattccggcattcagggtcagccaccctactttatgtcccataacttccacgataaatactctgccgtgagaagctgctgtggtatggatgcagtcgatggcatccgtagcaatatctactgcgctctggaaaccgaaggtcatatcagtaccccacaggtcattgtcgatggtcttgggcagggtcacgatattcagtccttccttgcgcagcaggttcgcagtcttgtgggtgccgttaccaccgagaattacaaggcagtccaactgcagcttgtaatagttctgcttcatggcttccactttgttcagcccgttgggatccggatcctggatcgtcttgaacggggtccgggaggttcccaggatcgtgccgcccttggtaaggatgccggagaaatccttgtctgtcagcatgcggaaattaccgtaaatcagtcctctgtaaccgtccagaaaaccatagatttcaacctcttccttgccgttcgccagggtcttcaccacgcctctcatggctgcgttcaatgcctgacagtcaccaccgctcgtcaacattccgattctcttcatcgtaggatcctccgtttctatatttcattattttctcttgcgtttgctgtaactatgcaaaactgtcttcgttctgccaatacttatttctattttaatacatttattttcatctgaaaatagtttgttgtaatttccggcagatttctcccctatggcaaaacaaacctcagaagcaccgggcctctgaggttcgcttatcatcttatcatacgttatttgaatttaaactttcctttgatcatggtcacgtagacagctgcgccgccaccgccgaccactacggctccggctgctgccgctgccgccacgcggcctgcgttcgttcccttaccggaggtctccgttatctgctctgtgccggattcctgagagccggaagtctgggcggtcatggaatctatccgctcctcctgcggcgcttctccactcgattcctgcgtgtcctgtgcctccccggagggctttgccgcatcttccttacggttttcgtccgcagcgggtgttgtcgggggcacgggaattacagaaggctttaccacaccgggtgtggcaggcgttgccgtggctgcgggaggtgttgccgcgtccgtggccttctggtccgtattggacgcctgactgctgtcatcgtcgtcatcatcgtcatcgtcgttactggcagcaggcttcttcggtgcgatctcataaccgcagatcgtacagatttccgcccgttctgtggtggccgcgccaccggatgcatgcttttccgtattgctggtgattccacagacaccacacttatgccagtgtccggtcatatcggacagatatccttctgcccagctatgatccgtcttcggaagaacgatctctgtcgctgttatgctcttgcttccgtctgcggatgcaaaatacagtccgcagacgtcgcaggtccagtattcgatgctgccctctgcctgacaggtgggttccacccggtcgtggcggttcagcgggccgtgaccggagttccatgtcttcgatacggcggggcttgcgttataatcatcagtttccgcatagcggatccgtgcagtcaccttctcgttgtgaccgactccggcggatttggtctgcccccagtccgttccatcgaagctgaactccacgtcagtgcggtctgtggtgatctgcgccgccagatcgttgccgctgacggtaaaggtcatgtcaaaggcatccggatccggggtatcctcgcggtctgcttttgcggtacgaaggatgtgcacaccaacatagaaattctcataattctgtgactgtaattcaaccgataatgtggcagtcttgccgatatcttccacagtattttctcccagggtaaatatcagctttccttccgaatattcaacctcggaatctgctgccaaaatgttctctgaatcctctctcgttataacagtcattactgtttttcccagatcttcgggcaaccccggtatttgcacagccctctcttccttggctgcccagctgtattgcagtttcagatcttcaaggttccaggctgatgccggttgaatcctcaatttcaccgatgcggtcaacgtctgatagtattccggatgttccggaacaaatgtcgccgtataggtctcgctgtcactgacataaggaatctcatctccgtcgatcttccagcttccgtcaataacattattccccagcttcgctgtcaatccgttcactgtaaggccactcagtttcgtgccataggttccgctggcaatgccatcaccctctgccgtaagtgctgtcggggcgatattcacagtcagatccttcgttgtctgctccgggaagaaggaagagtttgtcccggtgtaaacgagagtgaaagtggtctcgcccacggtctgcgccttgtaagttgcgatgccgttcttgaaatccgctgcgcttaccaccggggtatccccgatccggatctcgaagctgccgtccgtatcttccgcagagatgagctgttcgtctgtcacaaagtttaccagtgcctttgcgttaaaagtaatatcttgtccataggtgggagtgttggtatctgctctctcaaactgcagaccggtggtgtaatttacaccaactgcattattttccccaagcgaaggatagtaggctatgccattctctttgtcgttggctttcttcgtccagatggcctgatcaaagccattgtctttgagtcctttgaaaaagctggaagaggtcagttgttgagtagaacgtcccaattgatatttatcttctacgttacaaatatcgttattgaaatagcaattcgttacaccataatcttgactatttgttattccagcaagataggcatcattctcggcagtatcaatcgtagctatactaatgcaatgattaataatatctactacagctccactcctaccgcagattcctgccgcagaacttccctgcacgtctcctgcaaaaaagcactgggaaatcttagtatcttgtccggcattgccacagattccacctgctgtatacccttttaccgttccggtaaaggagcagccataaatttcgcccgcagacaaatttccacaaattcctcctgtttcactataactcgaaacaatgtctccgttggcagccaacaacagtattactttaccgcttttgccggatgagttgcctatttgtgcgaacaggccagaactataaacaccatcttcttttgtcatatccacatggcttatcgtatgtccgtctccactgaattttcctatgtatggaatttcaggatctccaatggagctgagttccactccgctcaaatcaatatcgttccccaggacatagtttacactccattttgtcgtatcctgtccgatggctgcgaattcctccgccgtggtgatcagggtataggtagcccagtcgtcaccattcgttgtaacatagttgtataccggtacggaagcagtcttcgtctctccgattgccgccacgctttgcaaattaatataagtccctgtggctgtaccgaatctacttcctgtacttgtagccactgcattgctggtatcgacactgccctctttccagtttgcagaatcgaagccctccggaagtgcaccgcaaagctgccctgccgttagtgctgttccagcgtcaaagcctccggtaattgcatccatattgtaatagcaatttgaaatatgccccgtactttcagaatcagtgctacctacaattccgccaaaagattctcctccactgactttccccagatttacacatgcagtaatagtcgcagacgtagtggtatcatcaaagatgccaaatattccaccacaggcactttgataagctttatttataatcattatctcaccggtattcaggcaattctcggcaataccacccatcccggcaataccaccaactctccctcgccctgttaccttactactattgtaacattgcgagactttaccaaccgaatatcctccaatcttaccgcaaataccgccaacatctgttttgccgtttattgtatttccaatactccgacagttctcaatatttatttcttctgcgtatcccacgatggccccaacaaagtttattccacaaataacagaatctttaaccgtaatattttttatggcactattaacattatgttttgtgcattctccaaacaagccgacacgatctaattcaccacttatctgcattcccgtcacagtatgattcctgccgtcaaagttccctcgaaaagaattactatggtttcctattggtgtccattcctgattattaagattaatattatttttcagtataatatattctccatcgtaccattttccgtcattcacactttttgcaaaatacgcaagttccgccgcagtattgatctgatagggatcattttccgtaccggtgcctacggcaaacccacttgcaatcgtaccgttccacacatctgtctccgctcttgcgctcaccggcacggcgatccacaccagtgccgccagggccagcagggccagtctcatcttcatgctccatgcttttgtacttttcttcataaccctcatgcctttctatatcctgcaaaatttcaaatatttcccaaccctttgcagatgtaaaatccaattttgtttttatactacccgtatcatttattataccgaaaaatcaatagtaacgtcaatattttccatacgattcgtctcatatttttataaaattttgtcaaacaagtgcgcccaccgcaaaatcgagcaggctggctcatcgtaagcacaaaaaaggagccaccggatctctccggtcactcctcgttgccttctctgaaaaatatatccagttttcccagacatttgatcaatgtcttcatttcttcctcgtccagatcccgtatgatggtgtggatcattttcctgtggaaatctctgtgatggaaaaaagctttcctccccttctctgtcagggtcaccagcactacacgtttatctctggtgctgcggttgcgggtgagatatccttttctctccagactgttcatattcgtggtcagggttcccacggtgacatgcagttccccggcaatcctggacatgctcttgggttcctcgatgccgatagcctccagaatgtgtatgtcattatttgtaatatccttgaattcgtctgttatgaccgcctttgcctctgcgtccatcacgttatggaacagattcaccagcaattcgttcagcatccggttgttgctttttcccatagttacctctacgatatctggaatttttctttcgtatgtccgcaatcctccgaagccgccttctctgacgcatatccgcagtcttcctgcgctccggatcattttcagtataccgtctaccaggtcatcacgcaagccccaatcgtaagcccggctccgaatcccgccagaacgatacgatcgccgcggtgcagctttccctgcctgtgcagttcgtccagaagcaccggaatggaggcagaggacagattgcctaccctctccagatttgtaggaaacttttcacgatccgcatgaaggcgtttcgccactgcatcgataatacgtgcgttggcctgatgcaatacgaacatatcaatatccggcacagcaagtccggcatctgacagtgcttcctcgatgcactgcggcacccgtctggtggcgaaccggtacacttcctgtccatccatctgaatataatgttctctgtcatccgtctgctgtttttgatccgtttttgccgctgaagtccttgcatatggggttgtcagttctctcgctccgcattgcaggactccgccaccggtgccgtcggagtgcagtgcccggcccagaatgcctgctgccggtatccgtttctcctccgccgtctcctgcatccctttctctgtctccggcaaagcgttactgtattccaccgcccgagactccgtcctgcatcgctccacaactaccgccccggcgccgtctccgaacagaatacagctgccccggtccttccaatccaccagtttagacagtacctcactgccgatgaccagcgcattttccgcaagtcccgtccgcagataggcatccgcggtattcagtgcaaacaaaaatccggaacaggccgcattcacatcaaaagccagtgcattcactgcgccgatgtccgcctgcacctgacaggcgcaacagggcagatactgctccggagagcaggttgccaccaaaatcaggtcgatctcttccgctctttttcctgcctgttcgagtgctttacgggcagcttctgacgcaagtgtcacaaccgtttcgcccacagacacatgacgctcaccgataccggttctctcccggatccattcatccgaggtttctaccatctgctccaattctttatttgtaacgatcctccccggaagcgcacttccggttccggtgattcttatggtcctcacgccatttcctccatgatatccactgttctttctattttctgcgcccgccaggcattgctgccacagaacaacagtccgttatccacatctcccgttgccgcattgatcaacgctcgggtgatgcaatacggtgctgtcttcggatcgcaggtcttaatgcaatgtctgcatccggtcataaaccgttccccggccgccaccttttccagaaaagcattctgtatagctctgccgggcattcccaccgggcttttcacaataacaatatcttctttctgcgcccggagatactcctgcttgtacgcctccgccgcatcacattcctctgtggtcacgaaccgggttcccagctgtacccccgcagccccgagggacaggcagtgctccagatctctccggtcataaatacctcctgctgcaatcagtggaattcccagttctgctgcctgccggatcattgccgtaagttctctctcatagttctccggtgtgtaagcatccagttcttcccgtttaaatcccagatgacctcctgccaacggtccctctgccacgataaagtccggctttctgtcgtattttttcatccagtatttcgtgacgaccgacagggcacgggggctcgacacgatcggcgctaacatcgtccggtggctgcgcccgggcattccgttttccgtctctgccacaactccgggcagatccagcggcaagcccgcaccggagataatgcagtctgtaccagcctgcactgctgccctgacataatcctcgtagtgttgcgttgccaccatgatattgacaccgacgataccgccttttgcgatctgccttgctttttctatttcttttccgatagtgcgcagattacaggcgatgggatctctgtcaaaatccggctcccggaaaccgatctgggcagtagaaatgatgccgatcccaccggcagctgccactgctcccgccagcccggacagactgattcccacacccatgcctccctggatcacgggaatatctgcatgtaattcccccaggatcatttttccgtgcttcatcccacatcacctctcgttaccgctttaatacttgcggaacctttcataacgttcctctgcgatttgttcaccggtcatgccggtatatttttgcagaaattccttgatatgttccttgagatacccgcctatggcttccacggtactttggtctgccccgccgtattccggtacgatccgctcgatcacaccgaggcgtttcagatcctcggatgtaatattcatgacctcactggcttctctggcacggtcagcatccttccataatatagaagcaaagccttcgggagacaggatcgagtatgtggcattttccatcatccatacctcattgcctaccgctgtagccagtgccccgccgctgcctccttctccgataaggatgcacaataccggtacttttaaggctgacatctccagcagattccgggcaatggcctcgccctggcctctctcctccgcctccacgccgcagaaggctcccggcgtgtttacaaagctgataatgggtctgttgaatttctccgcctgcttcatcagacgcagtgccttacgatacccctccggcatgggcataccgtaattgcgtctggcacactccgcaaaatccttgcccttcacatctgccagcactgtcaccggctgcccgtccaggaatgccaccgcacctaccagtgctttatcatccccataataacggtctccgtgagcctccactacataatcgaaaatgtagggaatatagtcggttgctgccggtctgtccactctccggacggtcttgaccttttcccatgccgttctggggagtgtcagtattgaccgttccttcacgatctccgtaggttcaaaatggaagtcaaaatttttcttaaaatccgcataattcccctcactgcaccgatgcgtcgtgatcaggaaatataaggtcttcttaaggttctcccggcggacgataccgtccacaaaaccatgctcctgcaaaaattccgctgtctggaagccatcagggaggcgctgtcccagagtctgcttaataactctcggtcctgcgaagccgatcaaggctcccggttccgccatgatcacatctcccagcatggcaaaactggccgttacaccacctgtggtgggatctgtcaaaatagtcgcatagagaagtcctgcttctccatgccgtttgatcgctgcggaggtctttgccatctgcatcagtgacacgattccctcctgcattctcgcaccgccggaacagcagaacaaaaatacaggcagccgcaattctgtcgccttttcaattgcctgggtgactttctcgccgaccacatgccccatactgcccatcataaatttggattcgcagatgccgatcacagccttttccccgtagatctcgcattcacctacggtcacagcttcttttacgccggatttttccctggcctccgacagcttttcttcatagccctcatatttcagtggattgctctcttctatctcctcgaaccagggctgaaagcttttccggtctgccaccatacggatccggttgtgggtcttcacccggaaataataaccacactcatagcagacatatttatttttcgctgcccggtctctgtttatcattttcttacatttcgggcatttgatctctgtttctgtatctacacttcccatacctgcacctcttattctgcgtcactcttatctctctgtcccacccataagaaatcacttccgcagactatttttatttcaacgcaaaggtaagctctgcctttgccgccagttttccgtttaccgtggcgatcgcttccccgacacccaccggtcccttactgcggataatggtggtctccagctccaaggtgtctccggggcgcaccatctgcttgaattttgccttatcgatcccggcaaaataagcggtcttgccacgatgctccggcagagacagaattgcaaccgcacctgtctgtgccagtgcttccatgatcaacacgcccggcatcaccgggttccccggaaaatgcccggcaaaatacggttcgttaaaggtcacattttttcgtcccactgcccgcacaccgggctccagctcctcgatagtatcgatcagcagaaatggatgtctgtggggcagaatctccatgatttcctgggtgttataaactgacattgttcctccgttctgcgaatgctgtcgtatcaactacttcctcgcattctgcaatcgtcctcgttgatgctctgccttctatcctgtgtcttgaacatctgctgcagttattctgtgtacttcttcaacagcagactcgcattatgtccgccgaagcccaacgaattggtcaatgcataaggcacctcttctttgtagctgtcccggcaataattcaggtcaagttcctcctccgtctcacgcagtcccacggtgcggtggatatagccttcctgaatttcttttacgcaggtgacaaactccactgcacctgctgctcctaaaagatgtcccaccatggatttggtggaattgatcttcaggtcatacgcatgttctccaaatgccagcttgatcgctctggtctcgaacaggtcattatgatgggtgctggttccatgggcattgatataggtaagctcttccggtgccaccccgccgtcttttaaggcattcagcatggcggtggctgctccgctgccatcctccgcaggggatgtaatatgataagcatccgaagaacagccgtagccggtcagttccgcatagatcttcgccccgcgcctctttgcatgctccagctcttccagtaccacgatagcggaaccctctcccatgacgaagccgtttctctccttgtcaaaaggaatggatgcccgttccggatcctcactaaatgacagcgctgtcagtgctgaaaatccggcaattccgatgggggtaatggagctttccgttcctcccgctatcattacatccgcatcaccgtactggatcgtacggtatgcttctccgatggaatgtgtaccggttgcgcaggcagtaaccacattcaggctcttgcccttcagcccataggcaatgctgacattgcctgctgccatattagagatcatcagaggcaccagcatggggcctacccggccggggcctttttccttcaggcggtcatattcccgctccatggcctgtaagcttccgatgccgcttcccacactgcagcccaccatataaggatcttcctgttccatagtaagaccagcatccgagatggcctgtccggcagccgccacagcaaactggcagaactgctccattctgcgggcggattttttgtccatatattgtgcgggatcaaaatccttcacttccgccgccagcttacaacggtaatccgcagtatcaaaataagtgataggaccgaatccggtcttgccctctttgataccattccagaattcctctacgctgtttccaatcggagtgatagctcccatgcctgttactacaactcttctatttttacccatacgtgatatactccctcgcgtcctgacttattttctatcctgctgtactgttagcggacatattttctattctgctttactgttgccggaggtattttttacattgccataccgccgtccacgcacagcacctggccggtaatatagtccgaggcatctcctgccaggaacagaaccgcctgtgcgacatcctccggtcttcccattttcttaagcgggatctgtccaaccgcattatcctgtaccgcctccggaagcttatctgtcatatctgtccggataaatccaggtgccacggcattcacacagatattccgggatgccagttctctcgctacacttttcgtcagaccgatcagtcccgccttggaggcggaataattagcctgccctgcattcccgacgatgccactgacagaagagatattgatgattttcccatatctctgcttcataaaggtcttcgtcagatgccggatcatgtgaaatgcgcctttcaggttcgtatccaggactgcattgaattcttcttccgtcatccgcacgatcagattgtcccgtgtgatcccggcgttattgacaaggatgtcaactctgccgtatttctctgttactgcctttacaaaggcttcactctctgcaaaatctgcaacattgcatttcacagactccgccatgccgccttggcttcggatgtccgccgccactgcttccgctgcttctgcagagccgttataattaatgatcaccgtggctccttctgctgccagtgcctgtgccactgcttttccgatgccccgtgatgcccctgtgacaatagcaacttgtcctgtcagactttttcctgtcaacatgccagttcctccatcacccggtccagatcctccggtttctcgatattgtatactttgacatttctgtcaattttccgtacgaagctgccgagtgtcttccccgggccgatctctatgaaagtgtccacgccatctgcgatcatccgctctacgctctgggtgaaatgaacgggactggatacctgttgtttcagcagttccgcaacatgtgacgcatctgtcacataatccgctgttacgttggacacgtaaggaatccaaggggttgacagcttgacgcttttcaattcttctgccagctgttctcccgcagttttcagcaaagctgaatggaatggtccgctgacctttaagggtacacagcgttttgcacctgcttctttcagcgcttccgatgctgctgctactgcatctgcctctccggtgatcacgatctgccccgggcagttataatttgccactgagacgactttgccggtttcttttgctgtctgtccgcagatttttgccacggtatctccgtccagtcctaatattgctgccatggctccgccttccggataggcctcctgcatatagataccacgcatccggatgatccggaacagatccggcagctccatcacaccagcggcagccagcgccccatattctcccaggcttaagcctgctgccatctccgctttcagtccttttgcctccaatactttcagaattgccacttccatggtcagcatggcgatctgtgtgtattccgtaatgttgatataaggattttcttcaaaggtcagctgttccatggagtacggatgtccgctttccgcctgtacttcccgcttatcctgccaatacagattctggagcaccttgtctgccagcttccataccgcctgtgcttccgggtaagtatcatagaactccttgcccattcctatgtactgggagccctgtcccgggaataaatatgcgatcctgctcattttgtcctctcctaattactatgtgatgctattgttctcctcggttacagcacattttttataatgcgccgttttccatataactacgccgcctgtcgctgttcgaaatctgttgtcagcggttacctgtcgctatattttatttatgctgtccttgtgccgctatgcactcctgcgcctgctgcactgtttcttcaataatctcacggcaggtctgttctctgcggatcaagcctgcaatctgtcccgccatcagtgttccgtttacggtatctccgtcctgcactgccttcctgagagatcccagcgtcagcttttccagttccatgaaatcggcattctctttttccagcttcagatactccctggtcatctgattacgtaaagaacgcaccggatgtccggtagacattcccgtcactacagaatcaatatcctttgccttgatgatctgattcttataattttcatggacgatggattcctttgatgcgacgaaccgggtgcccatctggataccttccgctcccagcataaaagccgccgccattcctctgccatcggcgatacctccggctgcgatcaccgggatagataccgcatccactacctgcggaaccagcgccatggtcgtggtggaaccgatatgtccaccgctttccatgccttccgccaccacagcgtccgctccggcacgctccatcatcttcgccatagccacactggctaccaccggaatgactttcactccggcattcttccacagttccatgaattttcccgggtttccagcaccagtcgttaccgcttttactccttcttccacgacgatcttcgctacatcctccgcattgggattgagcagcatgatattcacgccgaagggtttgtcagtcagttctttgcatttacggatttcctcccggacaacctcaggcggagcagaagcggcaccgatgatgcctaagcctccggcatttgataccgctgctgccagcttatgttctgccacccaggccataccgccctggaaaacgggatattctatttgtagaagttccgtgatctttgttttcattgtctttctgatccttctcgtcattctgcgttatattacatattctgatgataccaaggtcaaaaggtctaagcccacatgagggcagatatgcagtccttatgcctgctcctgaatatatctgataacgtcacctactgttgccatattttccaattcctcggaaggaatggatacaccatattcctcttcaaacgccattaccagttcaaacagatccagggagtccacttccagatcctccttgaaacgggtcgcctccgtgatttctacattctcctggtttaactgttctctgatgatagctgctactttctctaacatgtttttgctctccttatgcattcttttttaatattctgtctttgccgctttgttctcttcggcacaattgctttggcttcgctatatcgtacagcattgccctgcgaatactttgattatcaaagtatttatttgcaatatactacttagatgttgttctgtcaacatctttttttataactaccgctttcaaccttattatcacgtaggcagtaacaatctcattacaaaaggttttttcgtttctccccttgccaaaccggcatttttcagataaaataatctacgttgtaatcttttggagacgtatcgaagtggtcataacggggcgcactcgaaat

SEQ ID NO: 750 - DNA, 10239 bp, unidentified
  source 1..10239: mol_type = unassigned DNA
ttattttgcctcttctactccgccgtcttttttcttgttgaatacgaacagcttactgaagacataattgccgatgatgaccagaactgcggagatcacagttgcaatcaacagatttacacccactgcggtcagtacctgcatcactaccatatccaggatcagtgtggatactctggacagtacgaacttcggtgcttcggacagcatcggtgcatgactcttgaatacatatttccgattggtaaaatatgcgaaaatgacacccgccgtccagttgataatacttaatacaatgttctggaaaggtgtgggaaacatcgtgttatcaaataacaggaagtttgccaggaattttgctgcccaggatacgaccgtggtcagtccgcctacgatcaggtatgcgatgatctcttcatacttgacccacagcgcctttattttttctaccatattgttcctcatttctctgtgttaaggttaacaaaactattcagaaccccattcgcaaaatcgcctctgcgtggctttctttttgctcatgtggttacttcgccctataaatagttaactacaaataacaaatatacacaaatatccccttaaatgcaagcattccaaagacatttgtgtatatcttaatcactgtttatgaaattctataccaccgtatggcttataaatttaccacgttacggttctcaccacgcataaatgccttaatgttctcgtagacgccctgtacgcaacgggtacgtgcctccacgctggcccatgccaggtgcggtgtgatgatcagcttgttactgtcttttaactggcttaaaggattagataactccaaaggctccttttccaggacatccagacctgctgcctgaatctctccggccaccagtgcttcatacagatctgcattatttaccacgggaccacgtgccacattgatgagaattgcggtcttcttcatcttgcgaagtgcttctttatcaatgaagttgcgggacagatcactcaacggacaatgcagggacaggaaatcactctcttttaacagggtatccttgtccacctgcggatattcggtacaggtactcttaccagtgatagaatagaaaattactttacaaccgaaagctgttgcgattgctgcggctctcttaccaatattgcccattcctacgataccccaggtcttgccttccagttcataaaaaggctgggcaaaattggaaaaacgatcctgcgcgctgtaggcaccggacttgacatatctgtcataatacggcagtttctggctcaaagccagtgccagcgtaaaggtatgctgggctaccatggcggtggaataatcgaccacatttgccaccttgattcctctggacctgcaatatgccagatcacagttgtcgtatccggtagcaagctcacagatcagcttcacattggggcaatccttcagggattcctctttcatgggagccttgttgcagacaatgacatccgcatcgcccacacgctctgccacttcctgtgcagtaacggtattcgggtaactggtcacttctcccaattcattaaagcagtccaccggcacatccgtgccggcgctgtttctctccagtaaaacaatcttcatctcttgcaatttctcctgtcttttgttttcttttcgtaatagcataataacatagtagaataaacgatttctccgggctatcgccctacttacttattccatcatacagcaacagcgtaatgaaatcaattcattacgctgtccttttcttcttttgaaacatattactgccggagtgatcccgcctctgtggcttacaatctcttcagcagttcttctctctgtgcctcataaccgggcttgccaagcagagcgaacatgttcttcttgtagctctctacaccgggctggttgaaaggatttacacccagcagatagccgctgacaccacatgcgaactcaaagaaatagaacagttcaccaaggtagaactcatttacttcaggaacggtcaccatgaagttaggtacctggccatcggtatgtgccagaatagtaccgttcatagcgctcttattgacgaaatcaacggtcttgcctgccagatagttcagaccatccagatctacaggctcctcgccgatggtaagctcctctctcggagtgtcgatattgatcacggtctcgaacattacacgggaaccgtcctgaatgaactgacccatggaatgcagatcggtggtcagatccacgcttgcggggaacagacccttgttgtccttaccttcgctctcaccgaacagctgcttccaccactcacttacatagtgaacagcgggctcataattcgccaggatctcaacactcttacccttgcgcagtaaaatgttacgcagagccgcatactgtaaagcatcgttctcttcaaaagcattctccagggcacgctttcttccgctggctgcaccttccatcagcttgtcgatatccgcaccgctgacagcgatcggtaacagacctacagcggtcagtacggagaaacgtcctcctacatcatcgggtactacgaaggtctcgtaaccttcctcatcggacagatgctttaagcttcccttcgccttatcggtggtagcataaattctctctgccgcacccttcttgccatatttagcttccagcttctccttgaatacacggaaagcaatagcgggctctgtggtggtaccggacttggagatcatgttgatggagaaatctctgtcgcctactacatccatcaggtgcttcagataggtggagctgatggagttaccacagaagtagatctccggagtcttacgtacactcttatccagtacattgtagaagctgtggcttaagaactcgatagctgctctggctcccagataggaaccgccgataccgatgactaacagtacgtcggaatcgctctggatcttctttgctgctgccttgatgcgggcaaactcttccttgtcgtaatcaacgggaaggtcgatccagcccagaaaatcattgcctgcaccggtcttggacaccagggtctccttcgcatccagggtaagcttcttcatgtaaccgatctcttcttcagaaataaaagagccggccttggaataatcaaatgtaacttgtctgctcataatgctcctccttatatcttgcagatatatcacgcattcttgcgttacttacttaaaaaatccgtttttattttaacaaagttacatctcattttcaagacatatctatagatccggggaatgttttctgaattctttcggacgtctgacattttccgctatactgtaagtaattcctgaagcaatgcctgtaattcttcctccgtgactctggcgggatcctccggtctctgcggcagcactttttctcccggcttttcatgtgcggcattttctacggaaaatacttctctgtccagacgatctcccgtttcttccggctgcgccattctgctgctgatcggcatcagttccaccgtccgcctgccggaagctctctgctgtcgtcctctcgttcttccggccgcactgatctcctcccccaggcttcccggtccgtagagtctttcataatcctgttccgtgacagagatccggcccgacagatgattttccagataatctatgagattcgtcttcagaaccctgcgtttccccttgatatccatcatggccgacagagaaaaatacagatacatccctaaaaaacttactatgtaaaaaggcaggatttcccccagcatccttccgcccatgatccccttgcagatcccgataccggcaaacacaatggaaaacagcatgcactggccggacagatgataccaggcatcaaaggataggtgtccaaacgccagccggttgaggaacttgtccacaaacaccggaatgtttgatactccaccatttaactggtaacaatttgcaaattttactttacactgtttcaacaggcggttattcgtcgttgccatattatctgtctcttttatcatcgtatggtaaaatcctgccagaagcagacgcaccagaatactaagtcccagaaataccagaattccggttgtgatcactttttcttctttgaaaatcgtaaacataacctgcgctcctttctatcgcttccttagagtataacgtattagaggcttgttttgtacgttttttcatcgtcattcttctacgttgccgaacagaaaaagtatttcttttacatttttcgtgaaaagaaaaccttgtacatattgttgtataaatgccgaaaatctgctataatcactccttagaaattcagtttgaaaaggatggttttacatatgatatacaagacaaaaggtacctgttccacttcgatcgatgtagaattaaaggatggtgttattgattccgtaaaattcaccggtggatgcaacggtaatctgcagggaatcagtgctctggtaaaaggaatgaagccggaagaagcaatcagccgtctcaaggggatccgctgcggtttcaagcctacctcctgtcctgaccagctggctcatgccctggaagaaatgatcgcacagtaatctcaccgacaagaaggattttattatgaaaaaaatcgtattgaccggcggcggaactgccggacatgtaacccccaatattgctttattaccggcgttgcaggcggccggctatgaaattgcctatgtgggatcttatgaaggcattgagaaaaagctgattgcggatttcaacattccttacacaggcatttctacgggcaaattccgcagatacctggatccgaagaacttctccgatccgttccgtgtcatgaagggatttgtggaagcgagaaattacctgaaaaattaccagccggatgtagtcttctccaaggggggcttcgtaagcgtcccggtcgtccgcgctgcagcttccttacatattccctgtatcatccacgaatcggatatgacaccgggactggccaataagctgtgcattcccgtggcagaaaaggtatgctgcaatttcccggagactatgaaaaatatccctgccgacaaagctgtcctgaccggttctcccattcgtgcggagctggcacagggcagccggctggccggactgaacatgtgcggctttactgccaataaacctgtcatcatggtcattggcggaagtctgggtgcagctaacgtgaacaaggctgtccgcgatgcattgccgaagcttctggaggatttccaggtagtacatctctgcggtaaggacaaaatcgacaacctgttgttaaatacacccggatataaacagtttgaatatatcaaggcggaactaaaggatattttcgccatggcagacgtggtgatttcccgtgccggagccaatgccatctgtgaacttctggcgctgaaaaagcccaacattctgatccccctgcctgccgccagcagccgcggagaccagctgttgaatgccgcttccttcgaagcgcagggttattccattgtgctgaatgaggatgatattacgacgaatctgctggtggataaggtgcatgagctgtacttcaaccgccagaattatgtagaagccatgagccgcagccaccagatagatgcgatcaacacaatcatgttgctgatcaatgaagccgcaaacaagagtcatacgcaataatgtcatgtattgattgaggggattattttgaaaggattattggaaatctgctgcggcagcttcgaagatgtgaaaaccgcctggcaaaatggtgccgacagggtggagcttaacagtgcactgtatctgggtggtctcacaccttctaccgccaatctgatctgtgcaaaagagcagtgcagcatccctattgtaacaatggtccgcccaagaggaggcggcttctgctattcccaggatgaatacgagaccatgctcttagatgcccgcatacttttagagcacggagctgacggtattgctttcggcttcctgacagaggaccatgccatccataggaaccggacgcaggaaatgatcgacctcatccatagtgccggaaaagaagctgtatttcaccgggcgtttgattgtattgcacaacaggaacgtgcggtggaagcattgatcttacttggcgcggaccggatcctcaccagtggtggtgcacccgatgtatggtcgggcagaacgcaattgcaaaagctgcaaagccagtatggtaaggatatcacatttttagccggaagcggtgtgaatgcacaaaacgtaaaagctctgatggaatatacgagcatagagcaggttcatacatcctgcagaagctggcagccggatgcgaccgcctccctgcaggacgtggacttctcttatgatagaaaccgaaagaatgcatatgaagcagtggatgccggaaaggtgaaggaaatgcgggcagcaatgcctatattgtaatcagcccatgttctaagcaaaaatcgtagactccgtcttcttccaccgatctgcacgtgcaggtggcgtgggctttgatctcatccttcgcattccccatggccacaccggtgccgactgcttccagcatctcgatatcattgacgccatctccaaaagcgatggcttcctcctttgtaaagccaaaatgctgaagtaccgcgcgcacagcgtttcccttcccacattccagaggaatgatatcagccgctctatcccaccacgctgtaatctgtgtatggtgcgtaccatagagaatcctctcatactcttcttcccggcaggcacacatcatctgatagatatcctcacgaacccgttcatcgaattgtttatcgattttcagcatctcattaccgaatctgaaatactgctccagatccggatctgtaccgttggtgatgataaaatgttcgttacttatcgctactgccctatgcatgcctttcagattctgaaggatctgaagcttgtccatccaatcaagcgggcacttaaaaataatctcgtctcctactgttacataagaaccgttaaaggtcagaagagcatcgaaatcaattcccggaaaacgcggtgccgacagatatcctcttccggtcgccatacacagcttcaccccgttctgacgaagagaaattaatgcatgcagcgtccgctcacttaattctttatgccccatcttcagaagtgtcccatcgacatcaaaaaatgcaattttaatcatgcctgccacctccgtccggctcacaggatatattccatctgccgttcttttgtcttcattcccatcttttcataaaagtgctccgccgaagtgttgcctgcccagacgttcagggttacttcatagcagcccagttcttttgcctgctgtttcacatattcaaacaggctttccccgatatgctgcccccgtgtctgcttgtcaacgcaaaggtcatcgataaacaatgatttgaagggcaccatattagtggaaaagggctgctccctgagttggcagaatgcatagcccatgcacagatcgtcctcgtctacggcaacatagatagggtgatcctcctgttccaatagctctgccagctcgcagggggtgtatttcgtagtacccggtataaaaatatccggacggatctctgcatgtatctgtaatacctgccccagcagcgcaagaattcttggaatgtcctttttctctgccttgcgaatcttcatttctatttcgctcctttattcgacaaatcccgttttattacttctcccagtgttataacccttccatgtctagatccacgattaactttccaattttccgttcttttaaaagatagcacatatagataggaagatataccacggatccctcctgttccatatttgctaccgataaaacatatgctttctcaatatgataatcagaaattttcataaagttatccaaggatttgtgtgccttgtaagctttcccggatttcacctcaatgggaaccactttcccatccatttcgaccaaaacatccagttcccctatatttttctttttacagaaataaggttccaaaccattggctgttaattgctgtgccacagcattttcaaagtgagcaccgttatttacttcgctgtttttattgatcagttccagtttggtttccgccggatatgcactggtaagcaaaccggtgtcattggaaaaaagtcggaacacattactgctcttgctcgctttgagaggaataacaggagcttccacgttatacaccggtaacgcaactccggcatctttcagccataaaaagctgttttcatatctgtcaaactttaactctttattcagcattgtaaatacaaattttttattctgtttgttcaattctgccggaatgatatcataaatagatatcaatttcagttttttatcttcactctcatattgagagaaatcctctttatatagcgcaacgatatcccgttgtaccttatccacttcccggatatcttttgtagcaatatagatttttaccgcatccggcatgcctccgacaattagatagataaaaaacagagacaatagcttctgatgtatgaattcatccacgggctgacatgtttcaaatttcgctttcaacatttccaaagttgtttttgacacattatttgctatcatgaattcttcaaaatccatcggatacattctcaaaacagttaaatatccaaccggaaccgacgttattcccttaagctctactcctaataaggatccgctcattacatatttgaagctgccttcttctacaaggaattttatttttgtcactatttccggacatttctgtatctcatcaaaaaagacgaccgtttcctgcggcttacaatcctccggcataatcatttttaatttcaccagaaactcattcgcactcatttttacattgagataatccaccaaatccggctgatctataaaattaacttcaaacttacgatatccgcttttggcaatttcctctcttatcagccaggtctttccaatctgtctggcgcctgttaccaataatgctttatccgatcttttcaaccattcttctatgataatagagtcttttctatacataaattccctcctccctttttaacagtatctcttttgccccgttttttcaatatgatttgtaatattttgccccgttttattcaatttaccattccaaaggtatttttttctttctcgtcgaattcttttttccatgcaaaaataattgttgtatcatccctataaactggaatttacttgcttttcttctctttgctgcgtctcactaatgcgataaatagttcaataactccgccacatagccatatgatacctaacgcaatattttctgcccagaaccaaaacggtgacataacaatccatgtaatcgctaaaataaaaattcccctactgctcatgattttcctcctgaaacttcgattgttgcttacattatacttcgtccatctctctaaggacagtgggatgttgtgatgaaagtgagagagatcgcttacctgtcagacaatttatcttactatattttttgcacgataaatttactgatttaatatctctgcaatcgtgtttggtgcatatttattgagttcatgtcctgcatttggaacgatgtgcaaagtagcttggggtagcaattcttttagccttttagaagcctttagattggcagtatcctttttgccacacaaaattgttactggacaacgaatattatttaattgcaaagtaaaatccaatgaccgcatagagtgagccaattttatggtgctgctttttgatagtcccatactttcaaaaaccttgtttggcatacaacggaagataagattttgaaaatctatcagtaaacttggaactttatattgtgcgccaatcaaaaccagcgaatccactttttcctcatgtcgaatagcaaaatcaatcgcaagaagcgcacctaacgaaagaccgcagatacgaagcggctcttttacttctgaataccgctgttctaaatcacccaaaatctgcgaataggatatttcatcttctgttgaagaaaaaagttctgggcaatcgacatcagaaattgatagttgttggactacttctttccagtcctgtgcagtttgtcccaacccatgtaaaaaaacagttttcat

SEQ ID NO: 751 - DNA, 24841 bp, unidentified
  source 1..24841: mol_type = unassigned DNA
cacagtttgcgtattcgcgcccgcctttcttttgggaatgggcttgtgtgccatgctatgttctttcctcttggtaaaaatcatccatctcatcggcggagatcccgatgcggcagatgaggaatcgcacgatgaagagcgctgatcttgccaccctgcgctctctgcatgggcgcaaaagatgggaacacatttgggcatactacaaactccccatcataggaattttaatcgttttatacattttcggatatgccgcttatcggcatttcaccaaaaaagaagcggtactgtacgttagccttgtgaacatttcagccggttctgatttgaccgggcagcttacggacggctttgcccaagatgcgcatctgacaaaaaagcagcaggtcaatctgctgaccgggctgattataaatgaaactgccaatgcagatgaacaatatgtctatgcctctgagctgaagctgctggctgctgtcagcgcacagcaattagatgttattctaatggacaccgctgcgcgagagcaactgcaaggcgaagaatattttcttgacctgcgtacattggatgcagatttcagcagcttggatgaattgtctgccgatggcgtaacgctggatatttccgacacgcccctcatagcacaagccggcttcgaggaatccgtttacctcggtgtcattgcaaatgcaccgcacccggagcgcgcagctgcctatattcgttatcttttgaagtagtaaagctgcttcttttttgttcgatacattcagcaaggagagatacacatggatattgtaacgattggtgaagttttgatcgacctgacccagaccggcagggatgaacgcggcattccgcagtttgcggcaaaccccggcggcgcccccgccaatctggcagttgcagctgcccggctgggcgcacagactacctttatcggcaaggtgggcgaggatgcctttggtcgctatctgaccgaagttttgcaggaaaacaaggtagacacccgctatatggtcaccgatgccgaccaccctaccaccatggcagtcgtgtcggtggatgcctccggtgagcgggatttcagcttctaccgcagtgccaacgctgatgtgatgctgcgcaaagaggatatcccggaggaagccctgaatgcagccaaaatcgtgcatttcggctcggtcagtctgaccgccgaccccgcccgcaccgctacgttggacgccgccgcccgtgccaaaaagctgggggcaatcatcacctacgatcccaactaccgcgccaacctttggcacagcgaggaagaagcaatcgcacaaatgaaagctcccctgccgctggtggatatcctgaaggtttcggacgaggagctgcccctgctgaccggcaccgccgactgcgaaaacggcacggcgcagctggcacaaaacggcattcggctgatttttgtcaccttgggtgcaaacggtgtgttctaccgctttggagagaaaaccggtcatgtagccggtgttccctgcaaggtgggcgacaccaacggtgcaggcgacaccttctttggggcagcgctgtccaagctgtgcaaggaggatttgaacaccctgacggcggaccaactggaaagtattctggcttttgccaacaaggcggccagcatcaccaccagccgccgcggtgccatccccgccatgcccaccctgacagaagtggagggctgacccatggcgcaggaattttccgcacgatttgcccgccataaggacgagctggaatggctgttcatggagctgtacaacaaccgggatggcttggaggttcttgaacgggagatggcagacgcctacgacgcccgcagcgccgagctgaaggcgctggacaaagcccgtgccgccgacccgaactggtacaagcggggcaatatgttcggcatgacgatgtacaccgacctgtttgccggaaatttgaaagaattggcaaagaagctgccctatttcaaggagcaaaagctgacctatctgcacctgatgcccctgctgcagatgccccacccgcacaacgatggcggctatgcggtggaggatttcgataccgtagacccggctctcggcacgaataaagacctcgaaaatctgacccgcgaactgcgcaaggccggcatcagcctgtgtctggattttgttatgaaccacaccgccagcacccatcgctgggcaatggcggccaaggcgggcgacccgtggtttcaagcctactaccacctgtttgatgaccgcaccatcccggaccagtacgagcagaccgtgccgcaggtatttcccaacaccgcgcccggcaactttacctggtgcgaggagatgcacaagtgggtgctgaccaccttccacgactaccagtgggatctgaactacgcaaacccggcggtgttcgtggacatgaccaaaagtattctgcatctggcaaatctgggtgtggaggtgttccgcattgacgctgtgccttacatttggaagcagcttggcacgacctgccgcaatttaccgcaggtacataccattgtgcggatgctgcgcatggtgctggaatgtgtctgcccggcggtcatcctcaagggcgaagtggtcatggcgcccaaggagctggcggcgtactttggcacacccgaaaagccggaatgccacatgctttacaatgtgtccaccatggtcaacctgtgggctgccttggcaagccgtgacacccgcctgctgaaggcacagctggacgccctgcacgccctgccgggcaactgctggtttgtaaactatctgcgctgccatgatgatatcggctggggtctggatgaagcggcagagaaccgttttgatattgacccccaaaagcacaaggagtatctctaccatttttatgcgggcgatttccccggaagctgggcaaagggcgagctgtacaactacgaccctgctaccggcgacgcccgcagctgcggcaccaccgccagcctgtgcggcgtggagcaggcgctggaatcgggcgatacgatcgcgctggactacgcggtccgccgcgacctgctgctgcatagcgtcatggcatttttgcagggatttccgatgctgaactccggcgacgagattgcccagctcaacggctgggattacaaatctgaccccaatcgggcagacgacagccgcaacctgcaccgcagtgcgtttaactgggaaaaagcaaaacagcgcacccaaaagggtacgctgccgaacaagctgtggcagggcatggaagaactgcgcaaaatgcgagcagacgagtgctttgccccggatgcgtgggtaaccacctgggacacccacaaccccggcgtcctggcattggtacgcaagcacggcgaggaaacgctggtggggctgttcaactttaccgagtacccggcaggggccggtcttgacgctttgggcggcagctaccgttccgcagacggtcagcccgtctggctggccgatgtcgaactggaaccgtatcaggcactgctcgtgaagaatgtataagtcttgaggcatacatatatccccgttcggctgcaccatccatgcaggtggttatgaaatgattgtcaggcattttacgtttatgccttcagaattggtctaatcataagttttcttcctttccgtgttgtatcgttattctgtgtaacccatttgcatgcactttccggcgagaaaaaagagcctggagaaccttaccgatttggtaaggccctccgggctctttttattccagttagtatcagtcggtcaatagtaagcgcaaattgcttacgagacgtgcacaattcacggcgacaatccaactatgacggatttcatcagcagggcttgctcatcatccaaaactgcaatccgttgtctgcggcgctcgtaaagagatattctctccctcacttcccgctttcagggaagatgattttgttgacaaagaagaaaatgaccatagacacgccgccgttcaaaaccgtcgtgccgatgttataaataaagtccggcaccagcagcccggctacggcaacccatacgcagttgatggagttgacaatgcaggtgatgacgcagaaagccagcacataccacgcaatctgcttgcctaaattgcccttgctgcggaacacgaaattgcgctggatcgggaagttgatgcactcaccaatcaccatagcaatcatgtaagcgcaaaagtacggcagaccgccgtgggcggcatcgtagccaaggatgttccacttgaaggtttcgccaaacagggtcacatccacgccgggccagccgaaatccaccaccggcagactgctgaacgcagcgggcagaaattgcagcagcagatacttgaacacggtaatcagattcgagacgatgacgaacagaccgccctcgcgcacccacttggctgcggcggggtgtttagccgcaaaattattccaaaactgcataatgcaacctccatcaagcgccgcgcagacgcttttccatctgcgcattcagcaccacattcttaattgcttcataaatcacccgcacaagacccaggatccagaagccctgcaattccatgacaatgccgtccaccatgcccatgctgatggcgccgttcgtcatctttgccaaggcgcgaaggggcatattgtactggaacaagatgttcaggtccggcttgccgcgtttatagctgacatccagcaggatcgtcagcacaagccagacaagccagcccagcgggctgcgtgcgtggttcagttcgcccaaggtcagattgcggtcaattttggttttgcctttcgggatgggatgccccaacagcttttcaaagtctgcatcggaaacgtgcagcacatcgcccttataatagcaatccaagtccctatcctcatacggatgcacggcagccgttccatgcacggagattttctcgcacagccggatgtcctccacgcttgcgccgacaagtagctcgtactcgccgccctcgatttcccagcggttagccttgacattccagaaacggaacgccttatcgtccagcatgatggtgatgcgctgtttctcaccgggggcgagtgttacgcgggcaaagcctttcagttcctttacagggcggaaaagctcactgtcctttttggcaacatatagctgcacgatttccgtacctgccacactgccggtgttcgttacggtaaggctgaccccctgttcatcggcagccatatcgctgtacgcaaacgtcgtgtagctcataccatagccaaacgggaagcgcacagctttttccgccgtggtaaagtagcggtagccgatgtacagcccctcgcggtactccacagtcttgcggcgggtggcaaagtcggcggcgctgggtacgtcggcgtaggccaacggccatgtttctgccagcttgccacaggggttgaccttgccggtcagtgcatccgcaacggcgcccgcccccgcctgaccgcctaaggcggcgtacaacagggcttggcagttgtccagccacggcgtttcgactacactgccgctgtacaataccacgacaattttcgggttgacagccgccacagcctgcagcagatccacctgattttgcgcaaggcgcagattgctgcggtcaagaccctcactctcggcgatttcatccagacccatgcacaaaacaactgtatccgcctgtgtcgccagttcgcaggcggatttctgcaaagcagcatccggcttaccgtggcggtcaaagccctgctgatacccgatgacgttcaactcggagttgatcagcttatccagcagcacatccacctgtgtcgagtttaccatgctggagcctgcgccctggtagcgcggattcttggcaaagtcgccgatgacagccactttggcacccgcagccaacggcagcaaagagccctcgtttttcagcagcacaaggctttcctcggcggcgcggcgggcaagcgcatgatgggctgccgcatcaaactcgcgcggggcagcgtccagcgcagccttggtatcaaacaccagcggcagcaactctgacaagcgggcgtcgatgtcggattcagagattttcccgctttccaccgccgccagcagttcgcgcacactgtccccgccgggcgcgggcatttccagcgtggagccgtttttcacacccagcgcgtggtcgttgcttccgccccagtcggtgatgaccgcgccgtcaaagccccactcaccgcgcaaaatctccatgagcaggtgcttattctcgttggcatacgtaccgttcacaagattgtaggacgacataatgctgcggggatgcccctctttgacggcaatttcaaacccggtcaggtaaatttcccgcagggtgcgctcgtccacgatggaatccgaagccatacgccgcgtttcctgactgttgacggcaaagtgcttcgggcaggcggctacgcccttggactggatgccgcgaatatatcccgccgccagcttgcccgcgagatacgggtcctcggagaaatactcaaagctgcgcccgcacagcgggttgcgcttcatgttaagccccggtcccaacaccaccgacacttcctgcgcagcggcttcctcgcccaaggctgcgccgatttcctcgcccagcgcggcatcccagctgttcgcaaccgccgacgccgtggggaagcaggtggcgggcacgctgggattcagccccaagtggtcgctctcccccgcctgcttgcgcaagccgtggggaccgtccgacagccagatctgcgggatgccgtgttcgggcataccccgcgttttgaaggtttccgcgccggaaagcagcgcgcatttttcttccaaggtcaattttttcagcaaaagttctgtattttgcatatagctttcccttctcataagaaaagccgcatccaacgcctgcaagcagacatcagacgcggctttcattcagcaagtaccgttatgttttatcaggggcaatagacgcttactctgccgccagcgtgaccacagcctcgttgatggagtaggtggtgctggagccccagccggaaacgatttcgtcgtgggcggggatggtcagctgcttgctgccgtcctcaccctcggtgatgggcaccgtcagggcatcgctgccgttcagggtcatggtaagggcatcgtcctgcgcatccaccagcgtgccggtgatggaggcagagccgtcggcggcagtcagcgtgcagaccttgtgggagtaatccaccagcagcacggcatccgttgcggtgggcgtctcaccctgcaccagctcatagctgcccgtgtactgctcggtgaccagatcctcgacctgcacttcaaacgtagcggtcgcacccaggaaggaggccgtcacggtcttggtgcctgtggtgtcgctgtcgtaaccggtgaaggtcaagcgaccgccccagatggactcctccgcaccgttggcgcgggtagccgtcacaaccagctcagccgggttgaaggtgtcgcccgtgtagaaggtgcgcaggttggaggcatcaatcgtcaggctcttggcaggggcatagggctgaccgtagatgttgatgttacgggtgaacgcaccgccataaacgccatactcttccgccagattgggactctggtcgaaatggaaaaccatgtcgatctcgcctgatttcagcgcatcaagttccgctttttggctgtcataaccgaccatctggaattccagctcctgatttcccagacaatccttggcaaaccgaatatagtccgtaatggtcccggtaagttccccggtggaagggtcatagacgctgacgccgctgtcacccgtcagaaagcccatccggatcgcgccgtgctttttgagccacgccttttcctctcccgtaaggatcggggtataatccatcgagaaataccttttatagagatccgccgtataaaaaggatcggcgtcctccagcgcgcgcatcgcattgtccagttcttccttgatatccgcacggtctttgttgattgcatagtagatgtcggagcttcccacgcgggttatggtcgagatgccaagctccgtccagaaggattcttccatcgaaacaaagcagtcgatctcatggtttgccagcttttgcttggcatcctcattgttggagatgttgacgtgctgcgttttcaggtcgtatttttcttcccattcggtcagcataacctccggctcggttcccatcagaacgccgatctttttgccgttcagcgtcttgaagtcggaagcggtgatgtcctcgcgcgagagatcggcgtagaggtaatctttttcctcccccatcggctcgtccgaaaacagcatctcctcggtgcggtcctccgtataggaaatatcgcccataatgtcgatttcgccgtttttgagtttttcaaagcagtctgaccagtcgcaggtcacatactcgagctgccagcctgtatagccggataaggtctgcagcaattcgtagccgtagccctttcttatgcccttctcgttgacatagttgaaggtgtcctcaaacgagccgacacggacgacctttgcagggacggtttctgcggcagccttcacgggaaacagagccggcagcaacagcagcaggcacagcatcgcacagatgcttctccatgtcggggtctgcatggctttgcgcgttccggagtttttcattctttcccatctttctccgccccaggcggctgcattttgatttcatttccgcaccgccgatttcaggaaggtcatggcagcctccatcgtatcgggttgtcagcagctttcttgaacagtatataccaacatatacagtatgtattatagcattgtcgcgaaatcgtttcaagattctttcgttgggtagcgtaaacaaatataaggcaataccgcataattcgcgggaattatgcggtattgccttaggtcgtcatcgcagacgattttagaatcggtataattattcaggcagttgaatctccggcatcagctcatcggagacgacttgcagcatttcctccaatttagccaggtcatcgggaccgaagcgctgtttagcgcgctccatgacaaggtgcaagtaggaataactgatgttatagtaatcaatgtacttttgggtcgggcgcaggcggtattcccgcttgtcgatggtggactggatgcgctctacatagccttttttgaccagtgagttgatcttataggcggcgttgggggtagaaagattcatcatgtggctgaactgcgcaatcgtaggttcgcccaatgccatgatgacttccatgcagaaagattctaccgtcgtcagcgtggcttcgcgatcctcgaatcgactgaagatctgcttatagaagtgcagtttgaatttggtatatacccgtccgaatgtctggtccagcatagcgagaatccccctgtaggttagtggatttattatagcacattccgccatgtaaaaccagccctcaggcatccgtgataacaaacgtcagctcggcgttggccgcgcgcacgccgtccacccatgcggtggccttgccgatgcctaccgggccatgctgttctatcagctcacattccagtatcaacacatcgccgggtatgacctgccggcggaaacgggcgttttttacaccgccgaacagggcgagctttccacggttttccggcaggcttaacgcggctaccgccccggtctgggccagcgcttccagaatcagcacaccgggcataacggggtgtcccggaaagtgcccctcaaaaaacggctccgtgcgggtcacgcatttgacgccccgcgcccattggccgggggtgtagtccaggatcttatccaccaaagcaaacgggtaacggtgcggcaggatctcttcgatctctgccgcgctcatggctcggggcggctcatttggcgtatagttcatcctcatccctcccagcgtttgaataccacgcaggcgttatggccgccaaagcccagactatcgctcatggcatactccacctgcgccgcgcgcccatggttggggatatagtccagatccagctccgggtccggctcctgcaaattgacggtggcgggcaaaaaggcatcgtgcagagccagcgcggtaaatacgccctctaccccgcctgcaccgcccagcagatggccggtcatcgacttggtagaagacacggccagcttgtacgcatggccgccgaacaccgttttgatggcagttgtctcgcagctgtcattcaggtgggtggacgtcccgtgggcgttgatgtagccgatctgttcaggcactaccccgccgtcggccagcgccagccgcatacaggccgcaccgcctgcgccgtccggtgccggggcggtaaagtggtaggcgtcgcagttagcgccatagcccacgacctcggcataaattttggcaccgcgcgctttggcggcctcgagttcttccagcagcagtacgccgctgccctcgcccatcacaaagccgctgcggcgggtatcaaaagggatcgaggcccgggccgggtcgtccgccgtgcaaagggctttcatgctggcaaagccgcccacgcccagcgggctgatgcagctttcgctgccgccgcagagcatgcgatcctcgtatccatcgcggatacggtggaacgcatcgccgattgcattggtgccgcctgcacaggcggtggtggggcagctgcacatgccctgcaagccaaaacggatggcgatctgccccgccgccatattgccaatggacatggggacaaaatagggactgaccttttcaaagccgcgctgctgaccgcgggtgtgttcttcctcgatggtgggcaggccgccgatgccgctggaaagaatcacgccaaaccgcgtatggtcgatttcttccagcgcaaggccgctgtcgcggacggcttcgtcggcggcggccacggcaaactgggtaaagcgtgccattttgcgggcttcgcgcttgtcgatgcgcgcggcggggtcaaagtccttgacctctgcggccagctttactttaaaatcagccgtatcaaaagccgtgatcggtcctactgcgcagcggccagccttaatgttcgcccagctttctgccaccgtattgccggtaggatttaccgtgccaaggccggtaataacgacccggcgtctcttttttgtgtccattgcacacctcacattcccattccgccgtcaacgcaaaggacctgcccggtaatatacccggcctgctcccctgccagaaaagccaccgccgccgcaacatcctcggcatggccgattttgcctgccgggatggccgcttgtgctgcggcacgggccggttctgacagcacggcggtcatatctgttgcaataaaaccgggagccacaacgttggcggtgatattgcgggccgcatactctttggcagcgcttttcgtcaggccgatcagccccgccttgctggctgcgtagttggcctgacccgcgttgccgtgcagaccgacaacactgctgacgctgatgatgcgcccataccgctggtgcatcataaagcggcaggccgctttggtgcagaaaaacgcccccttcaggttggtggcaagcacattgtcaaaatcagcttcggtcatccgcagaagcaatttgtcggcggtaatgcccgcgttgttgaccagcacatcgattcgcccaaaagcggcaacggtatcttctaccagtttctgacatgcttcggggctgcgcacgtccgcctgcagcgtgacagcctgcacgccaagggcgcggcaggctgcggctgtttcctcggcagcggcagcgctgccggcatagttgacggcaatgttcatgccgttttcggccaaagcccggcaaatggcacggccaatgcctttggccccgcccgtaaccagagcggcacggcgcaagttttcggtttgcggcatggtcaggctcctttcatggtgcgcagcagctgttgcagctgcgcggcagtttccaccggatagcacgagatagcacttcccacagtctttttgacaaacccggtcaacgccctgccgggaccgatctcaatggcggcgtccacgcccaattctgccagacggcggacggtcacctcccaacgcacgccggactgcacctgtttttccagcagcgcggcaatggtgtcggtttcctccatctcgtgtcccaggcagttgaacagcacagggaactgcatcggcgcaaagcggacagccttacatttttcccgcagtgcatcccctgccgggtgcatcaatgaggtatggaacgggccgctgacattcagcggcaggcagcgtcgtgccccggcagcaagcgccaactcggcagctttatcgacagcggccttgtcgccgccaatgaccagctggccggggcagttgtagttgcagatctgcacaacaccttcgtcggcggctgcattgcagcatgcctgcaagggggcttcgtccagccccaaaacggctgtcatcccgcaggtgcgccccgccgcagccgcagccattgccttaccgcggaaagccgttaaagcgactgcggtctgcacatcgaacacccccgcacaggccagggcagaatactcccccagcgacagccccgccgcataatccggtgtgacgcctgcctcccgcagtacggcagtaaggccagcggcaaacgccgtcatgcagggctgggtgtattgggtctcgctcaatacaccggctgcgtcggtaaagcaaacttctttcaaatcaaaatccaccgccgcgtcggcttcgtcaaaagcagcgcggaaagccgggaaagtctcgtaaagatcccggcccataccggcgtgctggctgccctgcccggcgtataaaaatgctagtttcataaggtgatctccttgtacaccccggcgatgcagtctttggcttcgcttaccatcgcggcaaaaatttcttccaccgggcggacttcgtgcagcagccctgcggcctgtccggccatcaggctgccattctcggtgtcaccgtcaaacacagccttgcgcagactgcctaaagtaaagcgttccagcgccattttatcagccccggccttttcctggcggacatactcgcggctcatgcggtttttcagtacacgcacaggggtgccgccgatgcgcccggtcacgatagtatcactgtcgcgggcttttaacagggcggctttatagttttcatggatggggcactcggtgctcgccagcagacaggtaccgacctgcacaccgcacgcccccaatgccagcgcagcagccagccctcgtccatcggcaatgccacccgcagcgatgaccggcacatggacggcatcgacgacctgcgggacaagtgccatcgtggtcatctcgcccacatggccgccgctctcggtaccttcggcaataacggcgtcaatgccgagcggttccagatgtttggccaaaatggctgccgccaccacggggatgaccgtgataccggctgctttccacgcggccatgtactttcccggatttcccgccccggtggtgacgagctttacgccctcctccaccacgattttggcaaattcatccgcctgcgggtgcatcagcatgatgttcacgccaaagggcttgtcggtcagtgcgcggcagcggcggatgttttcccgcagggagtccgcgtccatgccgccggagccgatcagccccagcgacccggcgttggaacaggcggcggcaaactcgcccgtggcgatattggccatgccgccctgtataatgggatattttgtacctaaaatttcattgagcagcttcattttctaccctcatacgtcagcagcatcccgccccatgtcagcccgccgccaaagccgatgcaggccagcgtctggccgggtcgcagcagatcactttccgccatttcgtgcagggcaatcgggatgctggcagcactggtgttgccgtgacggcttatgtttttgtaaaactttgacggttctgcgtgtaaacttttgacgcaatggtcaattatgcggctgttggcctggtggcagactacccagtccagatcagacaatgtcttttggctgcggtccagcacagcttgcagacagcgcggcatagcctccacggcaaagcggaaaaccgccctgccgtccatcgtaataggcgcggtatcgcaggccgcagggccgcccgcgcaaattgcttcattgccccgtgcgcctaacgttacggcgaacggtgcattttcggccaactcaaaaacagccgcacccgcgccgtcgccaaacaatacacaggtcgtgcggtcagtcgggtccaccatgcgggagagtgcctcgcagccaatgaccagcgcataccgcccgcccagcgtgcgcaggagcccgtgggccgcggcggcggcataaataaagccggaacaggccgcatttacatcaaaggcaggccggttttccggcagacccaaggcagcctgtacgcggcaggcaatgcttggggtagccgtcggggccgagagcgttgccacaacacagcaggcaatgtcgcttgccgccagaccgctgcgggtcagggcctgacgggcggcggtgatagccagcgtggcggcatcctcgttttcggtgcagtaatagcgctggcagatgccggtgcgtgtcgtgatccattcgtcgctggtgtccacctgtcggcgcaagtcctcgttcgtcactacacggccgggcaatgccccgccggtagccagcagctgtaagcctttcatgcgcccctcatttctccgatgcgacggtattttttgtagcgctggtctgccaacgctttgccgctcatcttgcataaggcggcaaggtgcaccgcaatggcagtgtccaaccggctgaaaagcagctgccgtccccgctgtgcgccgcccagcggttcggggatgatctcttccacaatgccatctgcgtacaggtcttgtgccgtcagcttcatcatggtgcaggcctcgccgctgcgggaagcatctttccacaaaatgctggcaaacccctcggggctgagcactgagtacacggcattttccagcatcagaatgtggttggcaacgcccagacccagcgcgccgccgctggacccctcacctgtgacaatggccaacaccgggacggtcaggccgctcatctccatcaggttgcgggcaatggcttccccttggccgcgttcttccgcatccttgccggggtaagcaccgggagtgtcaataaaagtgatgatggggcggtgaaatttttctgcctgtttcatcacgcgcagggccttgcggtagccctccggtcccggcatgccaaagttgcagcgcaggttttcttccagcgtagtccctttgcggtgccccaaaacggtaacgggcatcccgtggaaccgtgcgatcccgcataaaatggccgcatcctctttgcattgtcggtcaccgcactgctcaaaaaagtcggtaaacaaattgtcgatcagttcggttatatgcgggcggtcagggcggcgggccagaaaaacgcggtccgccggcgtcagcgaggtgcagcgctgtaaaagcgtgttttcctctgcggaaagctcagccagttcagccgcatgggtggtcgtgctcgccatttcggcgtcatcggcacggctgcacagcgcgtcgatctgcgcgtccagcggttccaactgctgcaaaacttctttgatcatctgcgcttcctcccctgcgtgtggagctgcaagatccgcgttaagacctctttcaactcggtgcgcggtacgacctgatccacaaaaccgtgttccagctggaactcgctgcgctggaacccgtcgggcagtttttcaccgatggtctgttcaatgacgcgcggcccggcaaagccgatgagtgcccccggttcggcgagcgtaatatcacccagactggcaaagctggccgtgactccgcctgtggtggggtgggtcagcacgctgatgtacaacccgccgctgcggttgaaccgttccagcgcggcgctggttttggccatctgcatcaggctgaaaatgccctcctgcatccgtgcgccgccactggcagaaaaaataatgagcggcaggtgcttgtcggcagcatactcaatcgcacgtgtgattttttcaccaacagcggtgctcatgctgcccataaaaaaacggctgtccagcacagcgaccaccgcctgcacgccgccgatcctgccgattgctgtaacggcggcttctttcaggccggtcttgaccgaagcagcggccagcttttcctgataatcgggaaaatgcagcacatcgttgggcgcaatgtccgggttcagctctttaaaagttccgtggtccagaaccgtgctgagccgataataggcgccgattgccaaatgcaccccgcagttggggcagacatactggctcttgacccaaacctgccgcgtggcacggcggccgcattttttgcactcgacaaattgcggcggcacccagttgggcgcagccgtaccggcatcgcggcgggctttcatctgaaagctgcgctcctgcgggctggtcgggaacagcttttcaatggcactcattctgcaataccctttaggctgcccgcgcagccagatagttgaagatgtcgcccacggttttgagcgtccccaggtcctcatcggcaatcgtaacgccgaacttgtcctcaaacgccatattcagctctaccgcatccaggctgtccgcctgcagatcgtcggtcaggctggcatccatggtgaccttatcagcatcgcagttcagggtgtcaacaaaaacttcttttacttcttcaaagctcatattacgtacctcacataatttaactaaataaattgacgtaattgtcaatgaggtcattataccacgtttgtttcgaatgtcaatattattaggtaaaaatatttatctaattgaatcgccgtttttctcatcgtccggtattataaaaggggaagcacacaaattatccccctgctggggcagcccttgctgactgcgatttgaccgctgctgcatatcttccctgtgaaatatccaatcgcctttaaatggttttatttacttcctttttttactctcccagattattttctattctgcaacatatttcgctctaatgtgctatactaataatatccgataatgatggaggatcttctatgaaacgcagcagcatccgactccagtacaatgcccccgtcacactgacctttttctttttgtccctcgcctctctggtattgggctacttaacaaacaactggacaacctcgcacctgtttagtgtgtatcgctcgtcgatgacggatccgctattctatgtccggttgttcggccatgtccttggccacggcggttggaatcactttataaacaatatgctcctcttccttgttgtcgctccacctttggaagaacgatacggaagccgaacacttctaagcggtatccttatgaccgcgctggtatccggcatattgcagtgtgtgttgttccccacttctgcattgcttggtgcatccggtatcgtattcatgctcatcatgctctccagtttggccggcagtaagaatggaggtatccctatcaccttcatcttggttggcgtgctgtacttaagccagcagatatacagtatcctctttatacaagataatgtagctaactttatgcacattgtcggtggtatttgcggtacagcttttggttttgccgtccggaagagataacgaatgatcgggaagaggatcttatttatgatgagtaagcacatttttcagaaagaacctgtcctgagcattgccacttgtttggcgatcatttccgctttctttgtccccccggacgcagaatacctcggatatatcgatttccgtactcttgcaatcctgttttcgctaatgacagttatggccggactgagagggcaaggtgtatttgatagactcggccatgccctcctatctcatacccgcaccactttgcagctaacagctgttctcgttggcctatgcttcttcagcagtatgctgataacaaacgatgtatcgctgctaacattcgtgccatttacgtttgtcgttctgaatagtttgaacgcatctgttcgcagcaaactgctcctccctatcgtctgtatgcagacgatagctgccaaccttggcagtatgctcacaccactgggcaatccccaaaacctgtatttgtatggcaagagcgggatggatataagctcttttgttctgttgatgctcccctattccatcatatcattagtgcttattgctatatgggcagtatggctatgccgtgaagattccgacattgttgtaactcattctgcggtaaactcagaaccagacaggaaactcattgcgttgtacggtattctgtttgtcgcctgtttattggttgtattacgtgttctcccatacggtgttgcattcgtcgctatcttggtgtgcaccttctttgccgaccgccccactcttggccgcgtagactattctttgattcttacctttgtagcactgttcattttcatcgggaacttaggtcggattgaagcgttctctggatggttgcagaatattctggccggccatgaggttttagtatcagttctggcctctcaagtgaccagtaatgtgcctgctgccatcctgctttctggatttaccgataatttccgtgcgctgattattggcacaaaccttggtggccttggcacattaattgcatccatggcaagcctaatttcttatcgccagattgcaaatgaagtacctgctgaaaaagggcactattttgcgatgtttactatttccaatgtagtgtttctggccattctgatgggcgcttgggccctgacctgatattttcgtaattctattgccatttaacgtctttaaatgaaaatccacattcgtaaatggtcgcgcaggcaagcaaaagcgagcgcattatgaaaaattacgtcagcagttacagaaagctcaaacaccatcttcacgcagaaggctgaaagctatagggaaacaaaaaagcggaggaggcaaaaacgccttctccgcgccaaaattttcggttgtagggaaacaccgggggtagaaagtgtattactgccatcctcttgccgcagggtcgagcatctcggcggcggaatacaccagcgcgttgcagatggcggcagccacgttgctgccgcccttgcggcccatggcggcgatggcgggcacgccgtactgcgtgcaaaccgcaaacagccgttccttgctttccaccacgttcacaaaaccgacgggcacggcgatgaccagcgcggggcgcagaccgctttcgatctcgtccgcaatcgtcagcagcgccgtgggggcgttgccgacggccagcaccgcgccggggtactcccgcgcggccctgtgcatggcggcggcggcccgggtcgagcccgccgccttcgcagcagcggcgacagcagggtcggccataaagcagagtgcctgcccgcccaatttggccagaccgggctttgtgatgcccgccagcgccatgttagtgtcggtgatgaccactgccccggcacgcatggccgcgacgcccgccgccgccgcgccgggtgtgaagcgcaggttctcggcgtagtcaaaatccgctgtcgtgtgaataacgcgcttgaccacggcggcgttttcgggcggaaccgcaagcccgcgcgcggccagctccgccgtgataatgcccatgctcgtgcgctcaatatcggcgggcagatgatgctgcggtgtcattttttccctcctctggggttgtgcagacccatggcagcgtagacggcgtccatgtccagcgcactgcgcacgccgtcggccagcaggtccagctgctgtgtgcggtagtcggccatcgcaagcggcgcggcggtctccggcgcgattcccttgcggcggcagaggtacgcggccagctgctccgtcaattcgccgctgtcaaacaggccgtgcaggtaggtgccgaacacggcgttttgcacgcagccctccggtgtgccgtcggcatagcggcagaacggtgcgccgttcaccgcggtgcggcccgtgtgaatttcatatccggtcagcgcagccccggcaaagggcgcggcagccgtcgccgtgacctgtgcgcggcgcttttcggcggtaaagaccgtccgcgtcggcagcaggcccagcccgcgcagcgtctgcggatggccgctctcggtgccctgactgtcgtcgagcgtctcgcccagcagctgatagccgccgcagacgcccagcaccggcgtgccgcctgctgccagcttgagcacagcggtctccagcccggactggcgcagccacagcaggtcgttcaccgtgtttttggtgccgggcagaatgaccaggtccggcgcgcccagctcccgcacggactgcacgtaccgcacacccaaaagcgggtgctgttccagcggcataaaatcggtaaaattggaaatatgcggcaatctcaaaacagctgcgtccagcggcttgaccgcgcttttgttttgcagccgcggcgcaagcgaatcctcgtcctcgatgtccacccgcaggtacggcacgacgcccaacaccggcagctgtgttttttcctccagcattgccagcccggggcgcaaaatttctacgtcgccgcggaatttattgatgataagcccgcatatacgcgcgcgctcgtccggctccagcagcgccaccgtgccgtacagctgcgcaaagacgccgccgcggtcaatgtcgcccgccagcagaaccggcgcgtccacgagctttgccagccccatgttgacaatgtcgtctgccttcaggttgatctcggcgggactgcccgcgccctcgatgacgatgatgtcaaattcatcggcaaggctgtcgtaggcacgcagaatatcgggaatcagcgactttttgcggcggaagtattcctttgcgggcatgtcgccgcggacctcgccattcacgatgacctggctgcccacatcgctgctcggcttgagcaggatcgggttcatccgcacatcgggctcgacgcccgcggcctgcgcctgcacgacctgtgcgcggcccatttcgaggccgtcccgggtcacaaagctgttcagcgccatgttctggcttttgaacggcgcggttttgtagccgtcctgcgcaaaaatgcggcagagcgccgcgcacagcaggcttttgcccgcgccgctcatcgtgccctgcaccatgatgcaccctgcccggctcatgccagcacctcccgcataattttcaacagctgttcgttttctttttgggtgcgcacagcggtgcggtaccacgtctcgtccagccccgggtagttgccgcagccgcgcaccaccgcaccgtgacggcgcagctttgccccaaagtccgccggtgcgcggaacagcaggtagttggcctgcccgtccacgacccgcagccccagtgcccgcagtcccgcggccagccttgggcgctggtcggcaatgagtgtgcgcacgctgtcggcataggcggtctcctccagtgcggccagccctgcggcctgcgccagaccggacacggcccacggctgacccgccgcgcgcattttgtccagcagccccgcgtcactgcacagcgcataccccagccgcaccccagccatggcgtagagcttggtgaatgcctttaagattataaggttcggtgcatcgcgcaaaactgtcttagctgtcagggcatcccgcgcggcgaggaagtcgaggaagcactcatccacgaccagcaccgcgccgcagtcggcacagcggcgcagcagcttttgcaccataacgagcggcgtgacctgcccggtggggttgttgggctggcagaggaacactgcatcggtgctgtcgtcgatggcgtctacaaagccgtccgtcacggcaaagtcgttttcctcccgcaaaagaaaccgctgtacgtcacactccaccgtttccagcgcagcagcgtactcggcaaaggtcggcgcgggcagcaatgcgcgccgcgggcgcagggccagtgccaggcggtagatcagatccgccgcaccgttgccgcacaaaatttgcgcagtatccacaccctctgccgcggccagcttagtgcgcagtgcccggcagagcgggtccgggtagcgatccgccatgggcagtgccgctgtgatggccgccgccacgcccgcgggcagccccagcgggctgacgttggccgaaaaatccagcgcgtcccggccaaactcggcccgatagcccgcccagtcgccgccgtgtaccagttccattccgcatcccctcacaagacaagcatcagccgcacggccagccccagcacaagggccagcaggctctcggcgtacatcatgcggttggcacgcaggatgtcccgcggctcgatctcccgcagcgggtcgccaattgtcggcttatcgtaatattctccaaagtaataggccgggcccgccagctgcacgcccagtgccccggcgcaggcgctctcggtctgggcgctgttggggctggcgtggcggcggcggtcccgccgccagatgcgccacgccccgcgggcgctgttgcccgtcagcgccgccgcagccacccagagcagcgcggccaggcggctgggcagccagttggcggcatcgtccaatttggcggcacagcgcccgaaataaagatatttttcgtttttgtagccgagcatgctgtccattgtgttgatggccttgtaggtcagcgccagtggtgccccgccaaggagcatatacaaaagcggcgcaatgacgccgtcgctggcgttctcggccacggtctccacggcggctctggtcacgcccgcggcggtcaggttttgcgtgtcacggcccacgatgcgggccacggccctgcgggccgcgggcaggtcgccccttgccagttccttgtacacattgcggctctcctgtgcaagacccttggcagccagcgcctggccgcaccagagcatttgcagcgccagccccagcgccggatggagccttgccgcggcccagcaggcaagcccggtaacggccagcgtgcccagcggcagcaccgcggccaccgcggccccgccgaccagctcgccccgcggcgttttgggcagtgcggtgcgcagacgcttttccagcgccgagatgcaccggcccatgagcaccaccggatgcggcagccacaccgggtcgccaaacagagcgtccagcaaaaagccgcccagcaccgcccaaaagatcagcatgtgctctccttcgtgtactgcacggtcttgaccaaacgcagctcatgccgcgacgcccagtcgcgggcgtccagcacatagccgcccgcgttggggccgcaccaccggtaatagctgcggcgcggcacgccgtagcgctccaacgcggccatctgggtgccgccgtgggccaggatcaccagcatttcctcgccgtcggccagtgccttgtccaccagcgccgcaaacgtgcggcatacgcggtcactgaaatcatccttgcgctcaccgtcggggcagctgctctcgcagttggcggcgacccacgcctgatagtcggggtcgtgctccatctcaatataattgcggccttcaaagctgccgaagcacatctccttcagcccgtccacgggcacgagctccgcgtccgggaacagcacctccgccgtctgccttgtacgctgcagcgtggaaatatagacaacctttgggtcaatatcagcccggcgcagctgggccagcccctcgggtgagagcgggatgtcccgctgaccctgatagcgcttctgggcgttgtactcggtcaggccgtggcgcagtaaataaatcagcatttcggaagttctcctttcaaaatcgtcggcagaccgcaaaacatctgcacaacgcagtccgcgcgcgcggccagcagacaggccagacggcctgccgcctcccgcgcggcacgcgcggcggggtcaatcggcacaacgccgccgccgacctccgccgcggtcacaacatcataatctgccagctcgtcggccagccggttcaaatcggcggcgtcggcggccaaatcctgcacgtcatacacctgccgcccgccgagcttttgcgcaaaggtgcgcttgccgctgcagagcggccctgtcacaaacaccatttacagcacccccagccattggcaggcggccagcgccgccagcatccagatctcgcatttttgcaggaaccacccggccagatcaccggtcacaccgccaaactgtttttttgaaacaacgtagtaccgcgcaaaaacgcaacctgcggccagcaccagcgcccagccgcccagtgcagtcagccccacggccagcatggcgcagagcgcggccagcacctgccgcacgcggacgcgatccgccgccgtggcaaaggtgtgggcaaggccggtgtttttcgccagcgggaacgccgccacggccagcccggacagcgcccgctcccccaccagcgccagcgtccagagcacaccgacccgcggggtgaacgccacacagccgcacagcgcaaaatacgccgcaaagtagctgcacagccgaatgaccgcgaacgcgccgcagtgggggtcctttaaaatttccagcttcttcgcggtatcgccgtagcttgaaagcgcgtcgcaggtgt

SEQ ID NO: 752 - DNA, 12341 bp, unidentified
  source 1..12341: mol_type = unassigned DNA
ggaaagctttctctcttcgccagaggctcccctcggtaggggcaacaacgacgactgccgccagtggtggaaacagggagtcgttgttggggccgcggccagcaagacgcaagtgtaaaacacgaagcggatgctgggtgccgcaacccggccttgtcgagcggtagcgagactgagaggttacacattaaaataaaaggagcacaccatgctggcgagtatcttttcgctcaacgtcatccagaccgcgctcgagctgggctgcatctacgccctcgttgcgctggctctgtttctgagctattccatcctgaatatcgcggatctatccaccgacggctgtttcacccttggctgcgctgtcgcctgtcaggtggcgctgaccggccaccccttcctcgccctgctggcggcgatggcggccggtgtgtgctccggttttgtaacagcctttttgcagacccgcctcggcgtcgagagcatcatggccggcatcatcgtcaacaccggcctctacaccatcaacctcgccgtgatgggcttctcgtccaccatgtcgctggtcaagaccgataccgtcttctccatcgccaagagcgccctgagctttacgggcggcgggtataagctggtgctggcggcggtagtcatcgcgctggccggtgccgccatggtgggcttcctcggcacccgcctcggtctctcgattcgtgccaccggcgataacgctgccatggtgcgtgcttccagcatcaaccccgccttcaccatcacggtgggcctctgcatctcgggcgcactgaccgccctttccggcggcctgctggctcagtaccagaagagctgcgacatcaacgtaggcaccggcatggtgaccatcgcgctggcttccctcatcatcggcgaaacgctggtgggcaagcggacgatggtgcgccgtgtgctgggcgtagtgttcggcagctgcctctaccgttttatcgtggcggtggccctccgtttcaacgtcccggctgctgccatgaagctggtcagcgccatcatcgtggcggtggccatctcgatgcccgccatccgggagaagatcgcctttgagaagcgccgcaatgcggcccgtcaggcacggaaggagcgtgtgtaaaatggagatgctcgaacttcgtgacctgcacaagaccttcaaccccggcaccgtcaacgagaaagtggccctgaacggcgtcagcctgaccatggaagcgggagacttcgccaccatcgtcggctccaacggcgcgggcaaatccaccctcttcaacgccatcaccggcggcttcatcgccgacgagggcagcatcacgctgggcggcgaggacatcaccttcgcgccggaatatcagcgcagccgggtcatcggccacctgttccaggacccgctcaagggtacggcccccaacatgaccatcgaggagaatctggcgctggcctaccttcgcgccgggaccgcccccaacgccatcttctcccgcatctcccgcaaggataaggagatcttctgtgagaagctggccctgctggatatgggcctcgaagacaggatgaagcagccggtgggcctgctgtcgggcggtcagcgtcaggcgctgaccctgctgatggccaccctcgtcaccccgaagctcctgcttctggacgagcacaccgccgctctcgaccctgccaccgccgaaaaggtgctggacctcaccaagagcatcgtggccgaaaagaagatcacctgcctgatggtcacccacaatatgcatcaggcattggagctgggcaaccgcaccctcatgatggacgcgggccgcatcgtcttcgatgtcaagggcgaggcccgcagcaagatgaccgtggacgacctgctcgagaagttccgcgagaacgccggcaaggctctcgacaatgaccgcatcctcctgagcaaggtggaagccaacaactgagcataagcagaaagactgctgcaaaacagctttctgaaaaaaacaatgaacaaaacccggaaccctttcagagccaggacggcttgaaaagagttccgggttttgtattgtttctttctatcttacagcatcttggagaggaatgccttcaggcgcggatgcttggggttggtgaacagctcctgcggcggctcatcctcctgaatgcggccctcgtcaatgaagatgacgcggttggagacttcgcgggcaaagcccatctcatgggtgaccaccagcatggtgatgccggtgtgagccagctccttcatcagctcaagcacttcgccgaccatctcggggtcgagggcgctggtaggttcatcgaagaggatgacgtccgggtccattgccagtgcgcgtgcgatggcgatgcgctgctgctggccgcccgaaaggctcttggggtagacgttggccttgtcggccagacctacgcgggccagaagttcgtcggcgcgcttggagatggcctctttatccttgagcttgagcaggctgggggccagctcaaggtttttcttgacggtcaggtgggggaagaggttgaagtgctggaacaccatgcccatcttctggcggacagagtcgatgtggtcgtcgtccacctccacgccctcaaatttgatgctgccgccggtgggaatctccagccggttcaggcagcgcaggaaggtggatttgccgcagcccgaggggccgataaggcagactacgtctccccggtagatgtcgatgtcgatgccccgcagcacgtccagagtgggggcagcctgctttgcgcccttccgcttttcgccgccgtaggtcttggtcaggccccggacttccaggatcttatcggtcactttgtgccagcctcctctcaaattttgcaagcagccaggtaaagatcatcaccagcaccagatagatcagtgccacgccaaacagggggaacatggcctcgtaggtgcggttcatgatgccctgggccgcatacagcagctccttgccgccgatgacggtgataagggaggtatccttcagcagcatgatgaactcgttgcccagggcaggcagcaccgcccggatggcctgggggatgatgatgaccaccatggtggtgatgtagttcaggcccaggctgcggccggcctccatctggcccgggtccacagccatcaggccgccccggatgatctcggagacgtaagcgccggagttgatgcccagcgccagagcgcctaccatggtaaagttgcggctgttgttgaagatgaccatgctcatgatcagcagctgcaccatcatgggggtgccccggatcacggtggtgtacacctggcacacggcgttaaagacccccagcaccgggttgcggcggccggggcgctgctggtcgtgggccacacgcaccagcgccaccacgctgcccagcaggacgcccatggccagagcaatggcagtgaccagcagggtggtgcctacgcccccgatgtactggagccagcggtccttcaggacaaaggcctgataaaatttgtagaacagctcctgccccatgtccagccggccgccgcttttcagcagctggctcaacagttcgtattgtgcggccattcgcatcctcactttcttttcgtctgttgtgatcttgtcagaattttgtaacctatatcccttaaaaaaggggaggtgcccggtgggccgcctccccttgaggggtctgtttactcagccttgatgtacttgtccacgatggcctgcagggtgccgtcggccttcagctcctccagagcggcgttcacagcctccagcagagcggtgttgctcttgttcatgccaatggcgtagtcctcctcggcgtagctggtgtccaggatcttcaggccggggttggactccacataggccttggcgggctcgttgtcgatgaccacagcgtccacctggccgttgttcagggcctgtacagcggtcaggccgttgtcgtaggccaccacggcgtcctcgccaaagtcgtcggagcagtacaggtagccggtggtgccgcgctgggtgccgatcttcttgccggccagatcgtccacagaggcaatgtcggagccctcgggcacgatgacggactggatgccggtggcgtagctgtcggagaaggacatcacagccatccgctcgtcggtgacagtgatgcctgccatggcgatgtcggccttgccctgctgcacgctgagcagagcggcgtcaaaatccatgtcgtcgatctgcagctccaggcccagcttctcggcaatggcctgtgcggtgtccacatcgatgccctcaatggtgccggcgtcggtggtcatctcatagggagggaaggtggcgttggtggccatggtcagcttgccagcctcaacggtggtcagctcagcagcggcagcgctggtggaagcagcctcagaagaagcagcaacagagcttgcagcagcggaagaagcggtggaggcagagccgccgcaggcggtcagagccagagcagcagcggaaacagcggcggcagcaagaaagctgcggcgagagatctttttcatattcaaacactcctctttatgtgcatatcgtttgcatctctctgctgcgatgcgattcatcgaaaaatcagagagcgtgtttagtataggttgtacaatttgaaaagtcaagtgttgtgcaaaaattccatcaaattgaaaccgaattgcaaacaattatgcagaataaagcttgagagcgatgtatatatgcagaacctctcagtctgcttcacagacagctcccctatcaggggagcccttggcatgtcggtcaggcttacgctggacgagcaaggcttgatttatcgggagctgtagtgccctgctgcctggattcacggcagcttgacaaaatccgctcatccagaagctgcaacgaggcccggctcgccagagctgacggagaggttaaaccgtccgcgccagctcttccacgctccgcttcggcacgcagtagtcaccgttctcatcgaggtaatacttgatgccggtcttctccgtcatcggtacgactctggcggcgtgagtggggtagccaagagctaccatgaacgccagcttgtccggcgcggcgatgcccagcagctcgctcagggcgggcttgttgatggcgcccatgatgcagctgcccacgcccttggcccatgcggcgagggtgatgttcgccagcgcgatgccggtgtcggtgttcaggtcgccgggaatggagctgtcctgcacgacggccagatacatcacaggctgctcgtcggctttgggagtaccctgctccggcggcagataggcggcccacttgaccagcggatggacctttttcaccatctcagggctctgcacaaccaccagcttcacggcctgacggttcgcgccgcaggacgacaggcgcagggcctccaccatatcgtccaccacatcctgtgacaccggcttctgggcgaagcggcggtaggtgcggcgggtgttgagcgtttccataatagacatcggcagacactcctttatattaagtatgatttgattatagcaccggcaaaagagccgcacaaggaaggcaggaatctatttccgcttccaggcgtggccgctgggcatgggcagacccagcaccagcgcgatgcccacagccagcgtcacggccaccttgaaggtggagatgccgttggccagcgaaagggcattctcgccctggatgaaatagtaggcggtgtagtagatgcccgcgccggggaccagcgggaagatgccggtcagcaaaaagaccgtcaccggcgtcttgagcagcacggcgcagatacgcgccgccagcgacagtgggatgaccgcgatgagggaggctgccgccgcgtcggccccgtataagacagctagctcgtagacgaaccagcccaccgcgcccaccagcgcacagcaggggagcgtgcgcttagggcaggcgaagaggacggcgaaactcagtgttcccgccccggccagaaagaactgtgccaccagctggccgatctgtgtgcttgtcaaggtcatcataccaccgtcacccccgtcagcagagaagtaaggctcagaacaaggccggtgccgatggcgatgctggccgcgatgagcagggcgtctatcatccggatggtgccggagaggtagtcgccctgcacgaaatcccggatgcccatggtgaaggcgatgccgggggtcaatatcatcagggtgccaatgatggcgtggctggcctcagtgtccagcagatggcaccccagaatgcagactaatgtaatgagcgctgccgccgagatcttgcggaagccgttggaaagattcttcttttcgcacagcagcagatagccgctgacgatgaaacccgccgccgctgccgccagcgccgagcgtatcgtgccgccgaagatgagcgcaaaacaggctgtgccgctcatcccggcgaggagctgggtcttccccttggggaaggggatgcgccgggcctcggccaggcggtgttcagcctcgtccagtgtgacgcccccggctgctatctcgcgggaaagggcgttcaccgcgaccacccggcctaagtgagtcgtccgcaccggcacgttccgcacttcggcgatctctgccgtgccggcgctggcgaagatgccgttggtcagcacgtagacatggaactcccgcagatggaagctgcgggccatgatctccatcgtctgctccacccggaagacctctgctccgttttccagcagcgtctcgcccgccgccatgataaagtccatgatgcggcgccgctgctcgtcgctgggatataactctctgctgtccattccggccctccttgtcatgcccgccaaagggggcatatcatctcatgctatactgtatcataattccggcagcttgcaaaggcgtcttttcacatttttgcacaacttccgtccttgccgtcgggggcgcagtgtgttacactgataacaactatgaaaagatccagaaaccacaggaggaaatgaccgtgaagcagagtctgagtttcgcgcgccgtctggcggcgctggtgctggcagctgtgatgctgtgtgtggctgtcccggcggcgttcgccgaggatgccgcacccgatgccaccaccattggcggtgcaaacaccacccttatccctgaggaagaggaaaattgtctgagctggctcttcggctccaaagataaaattacactgccctatctgaacatcaagggcaagggcctgcgccggaacgtgtcgctggacctcgtggactgcctggtgggcatcacctacaccgagcttggctccatcggcagctatgtcagcgccagcgccgcgcaggaggcgtggaaggcccaggccgtggccatccactcctacctcgagtaccataagcagtacggctcctcggccaacgccctcatctacacccccgtggaggacatcccgtcctcggcccggtcggccatccgcaaggcggtggagtcggtgaaggatgaggtgctgacctacaacggcagcgtcattgacgccgtctggtcggccagcgcaggctacaacacccagaccggcgtctacggcacctgttccagcctcgacgcctggggctcggacgtgccgtatctcaagagcgtggaaagcccctatgagcgccagtaccacgagaagatgcgccgcatcatcggcaaggattatgactatgtcgagtacaacgacagccgtaccggtgagccctaccagagcgccgacaccacccacaaagacctcggcggcttcgtccagtacaacacgctggtgtccaatggccgcagctaccgctatatcggccagttcgtgtcctcccgctactgcttcgatttcagcacggatgcaacgggtgtaccctgtatgtactactacggcttcggccacggcgtgggcatgagccagtgcggcgccgtgggctacgccgccgaggaggggatgggctaccgcgacatcctgaagcactactactccggcgtttccatccggacggtgggcagcggcacgagctccggcggcggtctgttcggctggctgcgccgcctgctgggcatgtaaaaaatcaaaaggaattgcgcaaaatacttctcaaatgagacgtgatttggtatactgtacacgcttgtacacaagagacagactatttcgcgtttcacgctccagagcgggagcgatacgataaagaacaacaggtggagagaacggaatgcagttggagaaggaaaagaaagaaaagcgggagcgggagcgctgccgcgcactggcgcagcgcatcgcggaggaggcaaaccccgcctcggcggccctgctgggagagcagatgcccctgctggccaaggccctgcacagtgcaggtgtggaggcagaagagtggacagagagctctgaggcagagcttctggtggtggcagaccccgcgtgggaaacgctgcccgagaccctgcccgcccgggtgctgctggtgagcgatgagagcaccgttatggcgggctgggccgagcagctggctcagcggggatacttccgcgattttggctggcgcagcaagggccgcgctcagccgtcggcgctgttctgcaccagccagcccacccagctgaagatggtgcggggctacgagatggaaatggacatcctgcgtgaccggatggtgcgcgccgagcgcacctgcggcgaggaagccgagctcatcgcccggctgcgcaccgacctttcgctcagccgcagccatgagcagcagctggaaaagacgctcggcgaggtgaccggctcgaagttctggaagatgacctggcccatgcgctatgtcgtcagcaagagccgccagctctggcacactctgcccctcttcgtgttcctgcgagaactgcgcagcggcggcatcgagggtgtgcgggaacaggcccgcgcccgccgcgagtacgccgccctcttcccgggcaaagtcatgcgcgccgaccggttcgcaccggtggaactgctggtgcggcaggtagacgaccagcccgcaggccccaaaatcagcatcgtggtgccgctctacaacaccccgctggacttcctcgaagagctgctggattccgttgtgaaccagacctaccgcaactgggagctctgctgtgtggatgccggcactgccccgggtgtgggcgagatggtgcagcagcgcgccgctgtggaccctcgtatccgctacaggaagctggagaagaatgagctcatccccggcaacaccaacaaaggcatcgagatggccaccggcgacttcatcgccctgctggaccacgacgacatcctccatccctgcgccctctggtacgcggccaaggccatcgccgagcagggagccgacttcgtctataccgatgaggcgacctttgagggcaaggtggagaatgtggtgctctaccacttcaagcctgatttcatgctggacaacctccgctccaacaactatatctgccacctgaccctcttcagccgccggctgatggatgccgcaggcggcccggagcggatggagtacaacggcagtcaggattacgagctcttcctccgcctgaccgagacggcccggaagatcgtccacatcccccacgccctctattactggcgttccagccccggcagcacggccagcgacatctccgccaagacctactgcatcgacgcgggcattgccgccctcaaggctcattacgcccgctgcggcgtggccgtggacgatgtgtctctcatcccgggtacgccgggctactacaagaccgattatacgatcgaccatccgggccgggtgagcatcctcatccccacctgcgatcacatccgcgacttggagacctgcgtggagtccatctacgcccgcaccacctacccggattttgagatcatcctcatcgagaacaacagcaaggcccccgaaaccttccgcacctataagcggatgcagaaagagcaccccgataacctcaaggtcgtcacctgggagggcaagggcttcaactacagcgccctgaacaacttcggcgagaagttcgccaccggtgagtatctgcttctgctcaacaacgacaccgaggtcatcaccgccgcctggctggaagagatggtcatgtatgcccagcagaagcgggtgggctgcgtgggcgcaaagctgctctacccggacgataccatccagcacgccggtgtcggcttcggcatcggcggcgtggcgggccatctgcacaagtactatcccgccagctccgacggctatatgggccgcctgaactatgtgcaggacgtctacgctgacaccgccgcctgcctgctcatccgcaaggagatctacgacgaagtgggcggtctggacgagagctatgccgtggccttcaacgatgtggacttctgcgtccgcgtccgtcaggcaggctacaccaacgtcttcaccccgtttgcccagctctaccactacgagagcaagagccgcggcatggaggataaccccgaaaagcagaagcgttttcagggcgaggtgctgcgttttcaggcccgctggggcgacctgctggctgcgggcgacccctgcaccaaccccaacttcgacatccagcgcgaagatttcagcctgaagatattaccgctggaataaataaaagaggaacaacctctcagtctcgcttcgctcgccagctcccctgaaaaaggggagcccttggcatggcggaaaggtctgagctataaaaatgaggagcatgaaacttggaactctctgcctgtatcgttgtctataacggctgcgacgaagccctcaaggcggcgcagacggtgctgcaatacacccgccgccacccgctgaccctctatctggtggacaacgccagccccgacggcagcggcgcacgtctggaagccgccgtgaagggcggcactttgagcactcagcccggccagaaagtcgaggtgcgctgccgcaaggagaacggcggtttcggcaccggacacaacaccgtcctgccggagctgacgagcgactaccactttatcctgaacccggacatccagctcactgctgataccctcagcgacctggccgactggatggccgctcatccggatgctgtgatggcccggccggggctgcgcttcccggatggccgttcccagagcctgccgctgcggcgctgtgcgctgcggcctatggtctaccgccagctgccgtttttgaaattctgggagaaatataaccgtgcgtatttgatggagggggaggatctgtccgctcccgttgagatcgagttctgcaccggcagcttttccgccgtgcggacggcggagttcaaggccgtgggcggcttcgatgagcactacttcatgtatgtggaggatgccgacctgacccagaagatgcgaaccaccggcaaagcctacctcgtgccgcagtacaccgccatccatgcatggcatcgtgcagcccaccgcagcctcaagccctttttgtggcagaccgggagcctgctgcggtacttccataagtgggggttcaagttctgagggcttgctgatgaaacaaaagagcgccctccacaaaaatttttgtggagggcgctctttccttgcttttttttcgatttgatagtagaataaggtgtaatactatcgcaagcttgccagtagtgcacagcgagatcctgccagcgcgcgtggcgcgggaagcccggcggctggcggcgtattaccaccaacaatgtttacagcggacgcagctccgctttgaatccatacaggacccggcggatacgctgccaggccttgtacaagctgcacaacttttttatttcataatataaggagtgcacaaaatgaaaggtatcattctggccggcggtgccggcacccggctctatccgctgacgatggtcaccagcaaacagctgctgcccgtctatgacaagccgatgatctattatcctctgtccaccctcatgctggcgggcatccaggacatcctcatcatctcgacccccaccgacacgccccgcttcgaggcgctgctgggcgatggcagccagtacggcatccatctgcaatataaggtccagccgtccccggacggcctggctcaggctttcatcctcggtgaagagttcatcggcgacgactgctgcgcaatgatcctgggcgacaacatcttctacggcaacggcttctccaagattctgaagaatgctgtctccaatgccgagaacaagggccgctgcaccgtgttcggctactatgtgccggaccccgagcgct

SEQ ID NO: 753 - DNA, 6004 bp, unidentified
  source 1..6004: mol_type = unassigned DNA
tggagttcagacgtgtgctcttccgatctagttccatgtagtcaataaaatttaaaaatccgtcatacagatacggtgtttctcttctcgtccccagatgaacatctgcaatatgtgcaaatttcatagtatttctccttgtataacataactattgtaatttcatttcttgatccaatttaaaagtatagcatatttttttatattgctcgcagttattttatacattatttccacgacgcacactgtgcacattattccgatgtcttgcattgtattgaattgtattgaattacattttgtagtataatttatattgattacggaaatctgtatcacggattttcccatacgactacaatgagattataagaacacaaacaggacattagtatatggaaaaacatgccttattgattgcgaattccgcatcaatgatcgaccattttaataaagataatatccgcatcttacaggatatgggctacacgatctccgttgccgcgaattttcaagaaggaaattcaagcacggtggaacgcatccatgcgttcgcaagtgagcttgctgcacaggatatcgagatcatcgatctgccgattccgcggaagatcacagagcttgggaaagcgtttaagtccatccggattctgaaacgctatatgcggaaccacccttgccagatcgtgcatacacaaacaccatttggcggtgtcgtcggtcggcttgccgcgaagaaattccgtaaagatggcacaaaagtaatctactttgtccacggttttcacttcttccgtggtgcgggtatcaagaattatctgctttattacaatgttgaaaaatggctgtcccatgtaacagattgtctgattaccttaaatcaggaggattatcaggcggcgaaacgacggtttcatcacccaaatgtccattatgtaccaggcgttggcgtggatacggatacgattgcttccatctgtgttgataaagcggatgtatgcagacgattcgttctgccatccgacaagaagattatactgacggttgcggaattgattccacgtaagaacgtagagacttcaatccgcgcatttgccaagtccaaccgtgatgatgcaatccttgcgatctgcggcaaaggcattctcgaaccatcgttaaaggaactagcgcagaaactgcaggttggtgaccgtgtatttttcgcgggctatcatacggatgtgctggatctgtatcactgcgcggatttgtttttatttacaagctttcaggagggattatccgtcgctgtcatgcaggcgatggctgccggacttccaatcatcgcttcggatatccgcggaaaccgcgatctgcttgcctcagagccacatacacgcagcaagcattacctgcttccaacgaaggacgcagacgcatatgcagcaaaaatcaataaaattctcaatgatccggcacttgcacaggcacttggtgaagaaaaccagacaaactgcaggaaatattttgatatttcgcttgtacacaagcttatgactacgatttatacagagttgaccgattaacggtctacgacattgcatttataaaaggagactattatgtatacagttcaggttctgctatctacttacaatggcgaagcttacttgaaagaacaattagacagtatcttgaatcagaaaaatgttgccgtgaagctcttcgtccgcgacgacggttcttccgatggcaccgtggatatcctgcgcgcctatgccgcgctccacgataacatttgttacctatgtggcgaaaactgcggcgttgttgcttcctttttccgcctatttgaattatctgatccagacgtggatttctatgccctctccgatcaggacgatgtgtgggacgaagacaagctttccatcgcctgccagaagctcgaacagatgcgcaaagccaaatccccgaagaaaaaaaagaacgattcccagatccgtgtctttgcaactccacttctctactgttgtgatgcatggaatactgacgacgcattaaatccactttcagaatctatgcagaccgcaggcaaagaactgattccggactttcggaacgcattgattgagaacatcgcccgcggtgcaagcattgtatttaatcaggcacttatgtcttatatccgaatcagtatgccacaggatatctacatgcacgactggtggctctatctagttgcgtcctgtttcggcgaagtttactacgacagcgccgctcattataagtaccgccagcatgcaggaaatacgcttggtgcagcagctccttccggctgttccaaatttttccgccgcctgaagcagagccgtacaaatggcggtcacatctccagacaggcaaaatcctttgaacgaatctaccatgtgccagaggagaaacaacagtttttgaacattgtaacgaagtatcaggacgtgaaatcctaccgcaaaatgggaaaatccggcaaatatttgttccggcagaataaaaaggataaccgcgtctttcagcttatgttttattctaaccatttgtaattgacttcgttttccttttcgtttataatgatttttgaatttttctaaagcaaaaagaatgataatataaaaatcaaacggaaagaggaatgagctatggcagtaaagtacatttttgtcactggcggcgttgtatccggtctcggtaaaggaattaccgcggcatcacttggacgtctgttgaaagcgcgcggatacaaagtgatcagccagaaatttgatccatatgtcaatatggatccgggaaccatgaatccgattcagcatggcgaagtatttgtaacagatgacggtgcagaaaccgatctggatcttggacactacgagcgttttatcgatgagagtctgaacaagggttctaacgtgacaacaggaaaggtttactggagcatcctgaacaaggagcgccgtggcgatttcggcggtcatacggttcagatcatccctcatattacaaatgaaatcaaagatcgtttctatcgcaatccagatgcaaaagacgatgagattgcgatcatcgaagttggcggtactgtcggcgatatcgagagccagccgtacatggaagccattcgtcagtttcagttggatgtcggacatgagaattgcatcatgatccacgtcacactgattccttacttaaaatcatccggcgaactgaagacaaagccgacacaggcaagtgtaaaaacttgtcagtcacttggtatccagccggatatcctggtttgccgttccgaccttccgttagacaaagcaattaaagataagattgccagcttctgtaacgttcctagcgaatgtgtcatccagaatctggacgtggatgtattatatgaagtggtacttgctatggagcacgagaagcttgccgatgcggcctgcaaatgcctccatatcccatgtccaaagccagatcttgacgactggatcaccatggtggacaactggaagcatccgcaaaaaaaggtacgtgtcgctttagttggaaaatatgtcagcctgcacgacgcttacatctctgttgtagaatccctgaagcatgccggtgtcgcacatcgtgcggatgttgagatcaagtgggtagattccgaacttgtaacaaaggaaaatgttgcagagatcttaggagatgtatccggtatcttagttccaggtggtttcggcgaccgtggtatcgagggtatgatcgaggcaattacctatgcacgggagaacaagattccataccttggcttatgtcttggtatgcagcttaccatcgtggaattcgtaagaaatgttgtcggctatccggatgcgaacagctccgagttcaaccctagttccagccatcaggtcatccatatcatgcctgaccagaatggtgtcacagacttaggcggaacactaagacttggttcttatccttgtgtacttgataagagttcaaaagcataccagttatatggtacggaccacatcaacgaacgtcacagacatcgttatgaggtaaacaacgattatagaaaggttctgaccgatcacggcatgctcctgtctggtttatctccagatggtcatatcgtagaaatgatcgagcttccagatcacccttggtttatcggaacacaggcgcatccagagtttaagagtcgtcctaacaaagctcatccattattcttaggatttgttggcgctgcgattgcacattctgaggaagcatgatatactaactcctgtcggcaaacagatttgtgacacaaaagaaaaagaaaggttttcacacccccttatgaaggcaggaaaattcatcagaaaatataaccacatatggacactactctacatcgttttctacatgccatggtttatgtggctggaaaagacagtaactacggattttcatcttgtatcgatgccaatcgactacaagattccgttctgtgaatattttattattccgtattttatgtggtttttgttcgtcccggcgattgtcggctatgaatttttctattccaagaaagaatattatcaatgctgtgcgtatctgttcagcggcatgacgattttcctgatcatctgcaccatctggcacaatggtctggatctgcggcaggatatctcctacaacaataacctgtgtgcaaaactcgtcaagatgctgtataagacagacacaagcacgaacgtattcccaagtctgcacgtatttaacacacttggttgtctcgttgccctgtacaggagcaagggcatgaaagataaaacatggatcaaggtaatcgcaacaatcatcggcatcctgatcatcttatctaccatgtttttgaagcagcattccgtatgggatgtcatcggtgcatttgcgctggcagcaatcctctatccgattgtctatgtaatcccttggggcagaaagaaacaatgataaataaaaaattccgaagtctgatataaacaaacttcggaatttttttatttgtctaattaaatccaaacaacttctggaacagacgatatccggttcttgcaaaccatctgcccgttggtccgtgcagattgaatgtgattccaaacaacgttgttcgaagctccttgtataattctgcatccgtatccttcagatacttccacagctcttttttcttcttatacagctccttgtccttcgatacaacacagatactcgatgcaacacacatcatcatatctaagtactggaacaggaaacggtacatctgtggagggagttcttttcggttctcactgaaaaactggatcagcgtccgattgacaagcatctgctgatcgatccgcttcatcatcgtcttttcattgaccgactgtccttctctgccaatataatagtgatacaagtcgacatttaagtacatcagcttcttcacatggatcatcggttcaaagatatagagattatccacataaaatgtatgcttcggaagctgcagtccgcagtccttcagcagctgtgtccggtaaatcaccgaatgcatcaatacatactgaaacttgttgaaccgaatccggctgtcttcccagcttatgatccgtttctccggcaaagcaccatgataacgcatgacacgcttcttccggcgttccaccttatcatagatatagttggagagcaggacatctaaatccttctcatcttccacaagcttcttcaagaccttcaacacctgcttataggcttctttatcaagccagtcatcactgtcaacgaccttgaaatagactccggttgcatgagcgataccggtattcaccgcatcgccatgcccaccattttctttatgaattgcctttacgatcgtcggatatttctccgcataggcatctgcgatcttcgcggtgtcgtctgtagatccatcatccacaatcagtatttctaccagttcgccaccaagcaatgcgtgatccacgcacttctt

SEQ ID NO: 754 - DNA, 13277 bp, unidentified
  source 1..13277: mol_type = unassigned DNA
ttacttcttatcgttttcgcgaatctccacccggcggatcttaccgctgattgtcttaggaagctcttctacaaactcgatgacacgtggatatttataaggagcagtcactttctttacatgattctgcaattccttaatcagttcttctccggcacgtgctttatagtctttggatagaacaatcgtagcttttaccacctgaccacgaatctcgtcgggtactccggtaatggcacattccacaacagccggatgagtcattaatgcactttccacttcgaatggaccgatgcggtaaccggagctcttgataacgtcgtctgcacgaccgacgaaccaaaggtaaccgtcttcgtctttccaggcaacgtcaccggtataataaataccatcgtgccaagcttcgtgagtgcgttccgcatcccggtaatattctttgaaaagtccgagaggtttacctttgctggtacggatcacaatttgtccttgctccccggcttcaacggaacggccttcatggtcaatcaaatctacgtcatattgaggattcggaagtcccatgcttcccggtttcggttccatccaaggcatggtggcaatggtaagggttgtttctgtttgtccgaaaccttccatcagtttgatacctgtcagtttcttgaatgtttcaaatacggcagggtttaatgcttctccagcaatggtgcagtatttgagtgaagataaatcgaattttgtcaggtcttcgtgaatcaggaaccggaagatggtaggaggtgcacagagagaagtgacatgatattcctggattttttccagaatagctgccggggtaaatttctcatgatcgtaaacgaagatgttcgctccggcaatccattgtccgtaaagtttgccccatactgcttttccccagccggtatcggcaatggtgaggtgaagactgttctcgttcaggttgtgccaaaaactaccggtaacgatatgacctaacggataagtaaagtcatgtgccaccatcttaggttcgccggtagtgccggaagtaaaatacatcagagagatgtcgtcgttagtgttcgcatggcgtggacgtacaaacggagcggcattttcgatgccctgatggaaatcttcgaaaccttccggtatttccggtccgacactgaccaacttttctacagtgggacactcggggagagcatctttgatatgttgcaggatgattccttcaccggcagctacgatcattttgatatcggcagcgttgcagcgatagataatatcttttttggtcagcaagtgggtggccggaatgacggttgctcccagtttgtgaagggcgatggtgctataccagaactcataacggcgtttcagaatcagcatcaccatgtccccacgaccgatacccagactttggaagtaagatgcggtcatatctgtgtaacgcttcatttcggcaaatgaaaattggcggctttcacctttgtcatttgtccaaagtaaagccttcttgtcgggttgttcggctgcccaggcatctactacgtcataaccgaagttgaagttctccgggacgtttatttttaaattcttgttgaagtcctcttgtgagctgaaagaggtctgtgataaaaatctttctaccatgatattgttacataattactgccagaaaacgtaccgttttgccatcgagcgctttcatgccatgtggaagtttagagttaaaataaatactgtctccttgattgaggatgatttctttgccttcgatgttgataagcatacgtccttcgatgacaaggttgaattcctgtccattatgtttgttataatggatcggctcgtcgattgctttcggttcaacggtaacgatgaacggatcggcggtacggttcatgaatcctgaagccagtgactggtatttataagctttggtacgttcgatgctgatacctttgccggcacgagtcacaaagtagctgctcattttaggttcttcgccaaacatcagagcgtcgagggctacattatacgtacgggctattttttgtaacatgctgacagagatgtcgtaatctccagtttccgcaagccggtattcttcagcagaaatgtcactatcgcgggcgatatcctctgcggtcagttccaatacatcacgtaatccgcggaggcgttccgctatctgtttaatttgttcattcatacaaatggttagtattttatgattaataattctatggtgttatttggaagctttcatggctttgataatagcagaggtgaagccgttgtgttctaattcattgatacccttgatggtgattccgcccggagtggttactttgtcgatttctacgctggggtgggtgtcgttgttctgaatcagtgcggccgctccttttaaggattgggctatcatctgcatggcatctttagggcggagtcccatttcgattccggcttgcatggctgcctgaatgtatttcagtacgtaagcgataccgcaggatgccaatgcggtggctgccgctattttatcttcggggataagcatcactgttcccatctcgctaaataaccggaggatgaagttgtcttgttcatcattcgtgttacgcgcggcaacaagcgtcatgctttccagttcgctgatagcggtgttcggaatcagacggaacatgggcatttccggtgctacgacataatgagccagttcttcaaaactgatgccggcagctacggagatgagtatctgtttgctttttaatttcaactcgcgcatcaccgattccataaaccacggtttgacggcaaggatgacaatgtctgctcctgtggctgcttccagattattgttggtggtggagatacacggaaattcttttttcagtttctctagttttccggcactgggattggatacaatgatatccgaatcgtctatcagacttccttttgccaggccacgggctattgaaccgcccatgtttcctgcaccgataatggctattttcatatacgcttgtttttaatgagttgttacagacaaaggtaacagttaattacgaaaaaacaaaaagcagccagaataagaaataaatttctaataaaggctgcttttattgttggctgtttattaatcaaatgagcggttagagtacttttttgaaccgggcgaggaactctttcgcttcctccatgctgagacagagaggaggtaacaggcgaagtacattcgtgccgcttgctccggtaaatacatgctcgtcatagatgagacggctgcgtagttccttaatcggttcttcaaattcgaggccgatcattagtccgcgtccgcgcacttctttgatttgcgggaattttttcagctcttccagtaagtaatcacctattgccttagcattttctaccagattttcctgttcaatgacatccatcacagcgagagctgccgaacatgccaggtgatttcctccaaaagtagttcccaactggccatataccggtttaaacatcgggctgattaagacacctgccatcggaaagccgttaccgattcctttggctacagtgatgatatccggcttaatgtcattatattgatgagcgaagaatttaccgctacgtccgtatccgctctgaatttcatcgagaatcaggatcgttcctgtttcgctgcaagctttgcggagttcctgcataaattcggtggttggtatcttgataccgcctacaccttgtattccttcaatgataacagcgcatgtgtctcctttagacaattcctgtttcatcgcttccacatcgttgagtgggagataggtgacatgaccgttattgttgataggagcgataatagaaggattgtgagtcgcttctactgcaagagacgtccgtccgtggaatgctttattgaaagatacaatcttagtacgtccgttgtggaaagaagcaagtttcagagcattctcgtttgcttcggcaccactgttaatcagaaacaggctgtagtcttcgtaaccggaaatctttcctagtcgttcggctacctcttgttggagcttattgataacggagtttgagtagaaaccaagtttagccacctgattactgatcatcgctacatagtggggatgtgcatgtccgatggagataacggcatggcctccgtagaggtccagatattccgttccgtttttatcccatactttacagccatcacctttgacaatgttgatattgtataaaggatatacgtcgaataaattcataattcttctgtttttaaaaagctgaaggcttcaaacgtagtcctacggtttcttccagattgaacatcaggttcatattatgaacggcttgtccactggcgcctttcagcaaattgtcgatacaagagataatcaatagcttatcaccatgtttttccagatgtatcaggcacttattagtattaacgacttgtttcaagtcaatattcttgtctacgatgtgtacaaaggagtcttttgcataatattcctcatacatacgaacgatttcttccagcgctactttggtcttgactaccagcgtcgcgaagataccacgagcgaaatctccacggtacggaataaagtcgatgtccgaatcgaagctgttttgcaactgtttcagcgattgcttgatttccggaacgtgttggtggtcgaatgctttgtacacactcatattgttgtttctccaactgaaatgactggtagcacccggtttcactccggctcccgtacttcctgtaatagcatttaccattacatcatctgtcagcatcagattcttggcaagcggaagcaaaccaagctggatgcaggttgcaaaacagccggggttggctacgtgcttcgccgtacaagtggcgcgacggttcagttctggcagaccgtagataaagtcgtggtcgtcacttttgatacggtagtccatggagaggtcgataatcttcaggttttccggtatgttgtgactttccatgaatttctttgtatctccgtgggcggtacagaagaaaagaacgtcgatttcgtccagaggtaactggtcggtgaacgttaaatccgtttctccatacaagccttcgtgtacgtcggtaattctgtttccggcattactgctgctgttgataaatacgatttcagtttccggatggttgagcagcagacggattaactcgcctgctgtatatcctgcgccaccaatgattcctgctttaatcatatctcttcgtctttgtggttattatagtaaacacgtagcggagtagaagttactttgataaagccttttgcgtcttcagctgtccagcctttctgcatttcaccgtattctccgaatttagtcttcaccagatcatcttccgattctacacctaccgtagagaaggaaagagggcgaagctcgaggatagctgtaccgtttacgttgcgctggctttcctgcaacatggcttcgatgtcacgcatcaccggctccaggtattgactttcgtggaggaacataccgtaccagttagctacttgatccttccaatattgttgccatttgcttaatgtatatttctcaaggaaacggtgagcgccgataatcaacatcggggcagctgcttcgaatcctacacggcctttgataccgataattgtatcgcctacgtgcatatcacggccgataccgtatgctgcgccaatctcttccactttctggatggctttgatcgggtcgtcaaacttctcgtcgttgacagctttcagttcccctttttcgaaagtcaggcggagctgttcgctgccttctttttcaacgtgcttgaggtaagctgtttccgggagtccttgcgcggagtcgaggatttcgccaccacagatagaagtaccccataagcctacgttataagagtattttagtttggtgaagtctgcactgaaaccatgcttgttcagatagtcgatttcttcctgacggctcaatgccatatcacgggttaatgtgatgatttccacattgggagccagtacgaggaaagtcatatcgaaacgaatctggtcgttacctgcgccggtagaaccatgtgcaatggcgtctgcaccaatttcgttagcatagcgtgcgatagccaatgcctggaaaatacgttcggaactaaccgaaataggataagtaccgttacgcagcacatttccgaaaaccatgtatttcaggctcttttcgtagtattcctgggtaacgtctattgttacatatttcgtagctcccagtttataagcattttcttcgtttgttttcagttgttcttcactgaaaccacccgtattggcacaagctgcatatacttcgtaacctttttctttggcgaggtacatgacggtgaacgatgtgtccagtccgccgctgaatgccaccactacttttttcttcttttcttccatagtgctgtatcttttaaatgttatttctttcttgttcttttttgatgttccgcggctctgtcggatcgtatagcatggctgtacagatgcagaacttgcggtttttcgctaccaggatatcatggttgatacatccttcgcatcctttccagaaagcttcgtcgtctgtcagttcgttgaaggtgacaggcacataacccagttcggtgttcatcttcatgacagctgctccggaggtcagactgaatatttttgctttcggccatcggagacgtgccagttggaaagaagcctgtttgatgcgttttgccagtcctaacccacggaaatcgggatgaacgatcagaccggaagtagccacatattgcttgtttccccatgattcgatgtaggtgaatccggcaaaagtatcgccacaaagagcaataatcgccttaccttctttcatctttgtcgctacgtattcgtgtgtgcgttccgcaattcctgttcctcgtacggcggcagcatttctgatagtttccaaaatagtgtcaacgtaaacctcatgtgaggcgtcggctaccataacatctatttgttgagtgtccatttctttattatataataataggtataattattcgatattgggaatgatgagtgacaaaagctgacgtattttactggttgcaactccttcacgcaacaccaacatgatcgtatcgtcaccggcaatggttcccagaatttcactgaattcattgttgtcgatgtcataagccatgctgctggcataaccgggacgggtgcggataacggcgatgttaccggaaaactgcaaagagataaatccgttgttgcgtaacatttcaccggcactctggtcggtagaacgtttatacataatgttgttcggcagtacatatacgtactttccattcatactggcagccttggctactttcaattgtttcaagtcgcgggaaagggtggcctgtgtcagttcgaagccttcgcggttcagctcttgcagcagttcttcctgcgaaccgacctccttgcttgagataatcattttgatggcgtctaaccgatttgctttcttcttcattgtataattattctaagaatggcgcaaaagtatgcattattttggaaaaaagatgcataaaaccaaagtttttttgcataaaagtgaaaatactttagaaagggatagtgatataatcaggatatatgtgggtatatgtaacaaagttgtttctttattgcttcattttgtgctgactttttttattgtctattaaaaaagatgcaattgtttgtttagggatttttaaatatataaatttgtaaagtgaataaggagacaaatcgtatgatagatgaagatattgagctttattctctttttagaaaaggagatagaaaggcttttgatactttatttttgaagtattattccatactatgtgccttcgggaagtactatattcctatagaagatgctgaagaagttgttttggatatcatgacatggctatgggaaaacagagaattccagatcatagaaacttctttgcgaagttatttgtttatggcggtcagaaacagatgcttggatttaataagtaagaatcagacaaaaagacgttgttatgagcatatgtttgctaaagaaatgcagacaagttttgaagatcctgatttttatgtagtggaggaattgatggcgaaaatagaaaaggccgtgatgcgattgccggactcctatcgtataacttttgagatgagccgttatcaagataaaacatataaagagattgcgaaagaattaaacgtttccataaaattagtggagtatcgtatccagcaagcattgagacttttacgtgtagaactaaaagactatttaccgttgattacaatcatattcccttattttctctaaggatagccgattcgtttttgagtcttaaaataaaaatgcagcttttaattaaaaaagttgcatttttgtttaggggctaattgaagtattccgtcttcttaataaaatgaacataaaagatgatggaattacatgaaaatatagatgaggctcttttactcctttatttttccggtacactaggagagaaagaaaaagaagaggtagaaaattggatttccctctctgaagagaacagaaaaatagctaaacagatttgttacatacaccacgtaacagatataatagataccgtgaagcagatagatcctaaacaggcattggtgaagctggataagagattgtcaaaaaggaagaaaataaactggtgggaatgggggataagagcagcagctgtgttatttattcctttattcttatctttcttctattttgtatttaatcaagataaaaattatgatcgttatgtcgaaattcggtctaatccggggatgatgacaaaagtggagttaccggatggtacttgggtatggctgaattctgcttcttatctaaaatatccagtgtcttttgaaggagaatatcgaaaggttgaattgctcggagaagcttatttttcagtacaaaaggataatggacggaaattcttagtcgatgtaggaaaggggattgaattagaggttttaggtactgaatttaacgtggatgcttatccggatgataagtttgtagttgctactttggtgacaggtagagtaaaattccattgtcagcagaaaggcagggaggttacttatagtatgcaacccggacagaaggtgatttataatttattggatgagaaacttttgtgtacaactacttttgttgaatctgatattgcttggaaaagtggaaggatcatttatcgagatactcctcttgaagatgctttaagaactttgagcaagcgttttgacgtagagttccgtattgttaatccattattaaagaaatattgctttacaggtacttttattaatcaacgtctggataagatcttggaacacttcaaaatagcttcaggggtgagatacagatatcttgaatcggcattggacaacggtgttgtgaaagagaaaacaataatagaaatttattaaacaaaaaagaactatgaaaacactccctccttaaacaaaaaatatgggaaaaatatagcactattcttcccatataaaaaatcatttagccttacttgtttgccgacaagtgtagttaactttatttttaatttaaatcacaacaaatttatgcaaaaacattgtagtatccaaattcttgggattaaaaggctactgaaagcaactttaaaaggaattccattgcctatgagattattaattattatgctatgtgtttcgataggatgcattcgtgcgacaaatacttatgcgcaaaatgcgatccttgacttgaaagtcaataatcaaacgattgaaaccgtcttgaaaataatagaatcgcggactgactttgtattcttctttaacagtcagcaggttaatgtacataaacgtgtctctattaatgtcaataaacagaatatttttaaaattctagatgaggtttttaagggaagtgacgttgtttattcagtgcttgataaaagcataattttgtctagtaaaagatttgcgcctgatggaaatttgaagaagattacaggtaaggtcgttgatacgaacggtgaaccgttgattggtgttacaattgctctgaaaggaagcaatagaggaacggtgagtgatgtaaacggaaatttttctttaaacggagaagaaggaaagcttaatgtgttgaatatctcatatattggttataaagaccaacaggtaaaagttgaggatggtaaaactttgattattacattggaagaggataccaaggttttggaagaagtagttgttgtgggatatggtacacagaaaaaaatcaatttgacgggtgctgttgctgtggttgacgataaacaagtaatcggacgttcggccgataatttgtctaaactacttcaaggagctgttcctaatatgaatgttactgtttctaacggtcgtccgggacagggtggtagcataaatattcgtggtatcaattctatcagtagtagtgccacgcctttgatattagttgatggtgtagaaggtactatcgatgctgtgaatcccaatgatgtggagtctattagtgtattgaaagatgcttcttcggctgctgtatatggggctcgtgcagcttatggagtaattttggttacaacaaaatctggtaatgatggtaaaacacgtgtttcttataacggacgttatagctttggctcacctacagtttccagagattttgagactcgcggttattattcggcggctatcaatgatatgttttattctacctatcaaggttctaactatacgaattataatgatgaagattattatgaaatgtggatccggcgtaatgataaaacggaaaatccggaacgaccgtgggtggttatcaaagatggtgaatataaatattatggtaactttgattggtataactacttcatggatgagtctcgtcctacatgggaacacaatattagtgtcagtggtggcaataagaaagtgcactatttcctttccggtgcttattatgatcagaaaggagttattcggaaaaatatggatagtttcactaaatacaatttccgttccaaggtaagtattgagattgctccatggttgaagataagtaataatacgtcatacaaaaaggattcttatccatttccggggccaggtgctattaacaatctttttgatgcgataagtaagcatgccttagcttctattgttccaatcaatccggatggtacatatatggggaatgcaacagttattacaggaggatatcgccctgctaatgatcttagtgcaattcttgaatacggtaaacacaagaatgaggatactaattacttttttaataccacctttgaggcggtaatgacacctgttaagaatgtaacggtgacggctaattattcgtttgctcaacatgaatatacggcaatgaatcgtagtgctaattatccatattcacgtgtacccggagaagttctttggaaaacagatggttatggccttaatactctttatgaacgttctaatcatgattggtttcattcatacaatatttatggaaattatacaaatacatttgccgatgtgcaccatgtaagtgcaactgccggtgtcaattatgaaactaaattttttaaagacatcaaaatacaacgtaatgatttattgtccgaagatttaactgattttaatttagctaatggtgatgaaatgagtattgcgggtggtaaaaatagatatgctcttttcggtcttttttatcgtttgaattatgactataaaaatagatatttatttgaatttagcggacgctatgatggtagttcacggtttgcccggggacatcgctatggcttttttccttcagtttctgccgggtggagaattaatgaagaaaagttctttgcaccattacgtaaacaaattagtaatttgaaattacgcttttctttgggagcattaggaaaccaacaagtcggatattatgactatttgcagactatatcttctggtggtacaatttcttatgcttttggtgataaaaataaagcgtcaggtgctagtatctctgctccgaatgcttctgatttcacttgggaaacggttgttacaaaaaatatcggtttggatctcggactattgaataatcgtttgaatatgacggctgatatatatgtacgtgatacgaaagatatgttgatggcttccaaggatcttccgaatgtatatggtgcttcttctccaaaaacaaatgctgctaacttacgtacgaaaggttgggaagcatcgattagttggaatgattcttttaatctaaagggaaaagcgttccattattctgtcgtactaggcttggctgataatacgactaaagtgacaaagtataacaatgataacaaaacattgggcactccatatgaaggacaacaactgggagagatttggggatatgttgttgatggtctcttcaaaactgatgaagaagctgaaaactatccggtaaatcagagttacgtaaataatatattgaatatttctgtaaaatctcaaggtctccatgcgggggatgtgaaatatgtggacttggatggcgataatattatttctcctactttatcggcaaacgatgtgaaggatcagaaagtgattggaaattctttaccaagatatacatattctgtcagattagctgcagattggaatggaattgatttttctgctttgttgcaaggcgtcggtcgccaacattggtatcccaatggtgaaactagtctgttctggggtccctatgcccgtccttattgtacttttattccgaaggatttcttgacagatgtttggtcagaagataatccggatgcttatttcccacgtccgagaggctatgtggcattggatgttaatccacgtgagttgtctaaacctaatactcgctatttgcaaaatgtggcttattgccgtcttaaaaatgtaacagtcggttactctttgccacgtacttggctaaaggctttgcatatggaacgtgtcagggtttattttagtggagagaatctttttacattcagccctttacatagtaattatattgatccggaacatgctggggcttctacgagctggaaaagtggtcatacgaacgtgacttcttatccaatgagtaagacctattcatttggaattgatgtgactttttaa

SEQ ID NO: 755 - DNA, 28905 bp, unidentified
  source 1..28905: mol_type = unassigned DNA
  misc_difference 7809: note = a, c, g, or t
  misc_difference 7810: note = a, c, g, or t
  misc_difference 7811: note = a, c, g, or t
  misc_difference 7812: note = a, c, g, or t
  misc_difference 7813: note = a, c, g, or t
  misc_difference 7814: note = a, c, g, or t
  misc_difference 7815: note = a, c, g, or t
  misc_difference 7816: note = a, c, g, or t
  misc_difference 7817: note = a, c, g, or t
  misc_difference 7818: note = a, c, g, or t
  misc_difference 7819: note = a, c, g, or t
  misc_difference 7820: note = a, c, g, or t
  misc_difference 7821: note = a, c, g, or t
  misc_difference 7822: note = a, c, g, or t
  misc_difference 7823: note = a, c, g, or t
  misc_difference 7824: note = a, c, g, or t
  misc_difference 7825: note = a, c, g, or t
  misc_difference 7826: note = a, c, g, or t
  misc_difference 7827: note = a, c, g, or t
  misc_difference 7828: note = a, c, g, or t
  misc_difference 7829: note = a, c, g, or t
  misc_difference 7830: note = a, c, g, or t
  misc_difference 7831: note = a, c, g, or t
  misc_difference 7832: note = a, c, g, or t
  misc_difference 7833: note = a, c, g, or t
  misc_difference 7834: note = a, c, g, or t
  misc_difference 7835: note = a, c, g, or t
  misc_difference 7836: note = a, c, g, or t
  misc_difference 7837: note = a, c, g, or t
  misc_difference 7838: note = a, c, g, or t
  misc_difference 7839: note = a, c, g, or t
  misc_difference 7840: note = a, c, g, or t
  misc_difference 7841: note = a, c, g, or t
  misc_difference 7842: note = a, c, g, or t
  misc_difference 7843: note = a, c, g, or t
  misc_difference 7844: note = a, c, g, or t
  misc_difference 7845: note = a, c, g, or t
  misc_difference 7846: note = a, c, g, or t
  misc_difference 7847: note = a, c, g, or t
  misc_difference 7848: note = a, c, g, or t
  misc_difference 7849: note = a, c, g, or t
  misc_difference 7850: note = a, c, g, or t
  misc_difference 7851: note = a, c, g, or t
  misc_difference 7852: note = a, c, g, or t
  misc_difference 7853: note = a, c, g, or t
  misc_difference 7854: note = a, c, g, or t
  misc_difference 7855: note = a, c, g, or t
  misc_difference 7856: note = a, c, g, or t
  misc_difference 7857: note = a, c, g, or t
  misc_difference 7858: note = a, c, g, or t
  misc_difference 7859: note = a, c, g, or t
  misc_difference 7860: note = a, c, g, or t
  misc_difference 7861: note = a, c, g, or t
  misc_difference 7862: note = a, c, g, or t
  misc_difference 7863: note = a, c, g, or t
  misc_difference 7864: note = a, c, g, or t
  misc_difference 7865: note = a, c, g, or t
  misc_difference 7866: note = a, c, g, or t
  misc_difference 7867: note = a, c, g, or t
  misc_difference 7868: note = a, c, g, or t
  misc_difference 7869: note = a, c, g, or t
  misc_difference 7870: note = a, c, g, or t
  misc_difference 7871: note = a, c, g, or t
  misc_difference 7872: note = a, c, g, or t
  misc_difference 7873: note = a, c, g, or t
  misc_difference 7874: note = a, c, g, or t
  misc_difference 7875: note = a, c, g, or t
  misc_difference 7876: note = a, c, g, or t
  misc_difference 7877: note = a, c, g, or t
  misc_difference 7878: note = a, c, g, or t
  misc_difference 7879: note = a, c, g, or t
  misc_difference 7880: note = a, c, g, or t
  misc_difference 7881: note = a, c, g, or t
  misc_difference 7882: note = a, c, g, or t
  misc_difference 7883: note = a, c, g, or t
  misc_difference 7884: note = a, c, g, or t
  misc_difference 7885: note = a, c, g, or t
  misc_difference 7886: note = a, c, g, or t
  misc_difference 7887: note = a, c, g, or t
  misc_difference 7888: note = a, c, g, or t
  misc_difference 7889: note = a, c, g, or t
  misc_difference 7890: note = a, c, g, or t
  misc_difference 7891: note = a, c, g, or t
  misc_difference 7892: note = a, c, g, or t
  misc_difference 7893: note = a, c, g, or t
  misc_difference 7894: note = a, c, g, or t
  misc_difference 7895: note = a, c, g, or t
  misc_difference 7896: note = a, c, g, or t
  misc_difference 7897: note = a, c, g, or t
  misc_difference 7898: note = a, c, g, or t
  misc_difference 7899: note = a, c, g, or t
  misc_difference 7900: note = a, c, g, or t
  misc_difference 7901: note = a, c, g, or t
  misc_difference 7902: note = a, c, g, or t
  misc_difference 7903: note = a, c, g, or t
  misc_difference 7904: note = a, c, g, or t
  misc_difference 7905: note = a, c, g, or t
  misc_difference 7906: note = a, c, g, or t
  misc_difference 7907: note = a, c, g, or t
  misc_difference 7908: note = a, c, g, or t
  misc_difference 18754: note = a, c, g, or t
  misc_difference 18755: note = a, c, g, or t
  misc_difference 18756: note = a, c, g, or t
  misc_difference 18757: note = a, c, g, or t
  misc_difference 18758: note = a, c, g, or t
  misc_difference 18759: note = a, c, g, or t
  misc_difference 18760: note = a, c, g, or t
  misc_difference 18761: note = a, c, g, or t
  misc_difference 18762: note = a, c, g, or t
  misc_difference 18763: note = a, c, g, or t
  misc_difference 18764: note = a, c, g, or t
  misc_difference 18765: note = a, c, g, or t
  misc_difference 18766: note = a, c, g, or t
  misc_difference 18767: note = a, c, g, or t
  misc_difference 18768: note = a, c, g, or t
  misc_difference 18769: note = a, c, g, or t
  misc_difference 18770: note = a, c, g, or t
  misc_difference 18771: note = a, c, g, or t
  misc_difference 18772: note = a, c, g, or t
  misc_difference 18773: note = a, c, g, or t
  misc_difference 18774: note = a, c, g, or t
  misc_difference 18775: note = a, c, g, or t
  misc_difference 18776: note = a, c, g, or t
  misc_difference 18777: note = a, c, g, or t
  misc_difference 18778: note = a, c, g, or t
  misc_difference 18779: note = a, c, g, or t
  misc_difference 18780: note = a, c, g, or t
  misc_difference 18781: note = a, c, g, or t
  misc_difference 18782: note = a, c, g, or t
  misc_difference 18783: note = a, c, g, or t
  misc_difference 18784: note = a, c, g, or t
  misc_difference 18785: note = a, c, g, or t
  misc_difference 18786: note = a, c, g, or t
  misc_difference 18787: note = a, c, g, or t
  misc_difference 18788: note = a, c, g, or t
  misc_difference 18789: note = a, c, g, or t
  misc_difference 18790: note = a, c, g, or t
  misc_difference 18791: note = a, c, g, or t
  misc_difference 18792: note = a, c, g, or t
  misc_difference 18793: note = a, c, g, or t
  misc_difference 18794: note = a, c, g, or t
  misc_difference 18795: note = a, c, g, or t
  misc_difference 18796: note = a, c, g, or t
  misc_difference 18797: note = a, c, g, or t
  misc_difference 18798: note = a, c, g, or t
  misc_difference 18799: note = a, c, g, or t
  misc_difference 18800: note = a, c, g, or t
  misc_difference 18801: note = a, c, g, or t
  misc_difference 18802: note = a, c, g, or t
  misc_difference 18803: note = a, c, g, or t
  misc_difference 18804: note = a, c, g, or t
  misc_difference 18805: note = a, c, g, or t
  misc_difference 18806: note = a, c, g, or t
  misc_difference 18807: note = a, c, g, or t
  misc_difference 18808: note = a, c, g, or t
  misc_difference 18809: note = a, c, g, or t
  misc_difference 18810: note = a, c, g, or t
  misc_difference 18811: note = a, c, g, or t
  misc_difference 18812: note = a, c, g, or t
  misc_difference 18813: note = a, c, g, or t
  misc_difference 18814: note = a, c, g, or t
  misc_difference 18815: note = a, c, g, or t
  misc_difference 18816: note = a, c, g, or t
  misc_difference 18817: note = a, c, g, or t
  misc_difference 18818: note = a, c, g, or t
  misc_difference 18819: note = a, c, g, or t
  misc_difference 18820: note = a, c, g, or t
  misc_difference 18821: note = a, c, g, or t
  misc_difference 18822: note = a, c, g, or t
  misc_difference 18823: note = a, c, g, or t
  misc_difference 18824: note = a, c, g, or t
  misc_difference 18825: note = a, c, g, or t
  misc_difference 18826: note = a, c, g, or t
  misc_difference 18827: note = a, c, g, or t
  misc_difference 18828: note = a, c, g, or t
  misc_difference 18829: note = a, c, g, or t
  misc_difference 18830: note = a, c, g, or t
  misc_difference 18831: note = a, c, g, or t
  misc_difference 18832: note = a, c, g, or t
  misc_difference 18833: note = a, c, g, or t
  misc_difference 18834: note = a, c, g, or t
  misc_difference 18835: note = a, c, g, or t
  misc_difference 18836: note = a, c, g, or t
  misc_difference 18837: note = a, c, g, or t
  misc_difference 18838: note = a, c, g, or t
  misc_difference 18839: note = a, c, g, or t
  misc_difference 18840: note = a, c, g, or t
  misc_difference 18841: note = a, c, g, or t
  misc_difference 18842: note = a, c, g, or t
  misc_difference 18843: note = a, c, g, or t
  misc_difference 18844: note = a, c, g, or t
  misc_difference 18845: note = a, c, g, or t
  misc_difference 18846: note = a, c, g, or t
  misc_difference 18847: note = a, c, g, or t
  misc_difference 18848: note = a, c, g, or t
  misc_difference 18849: note = a, c, g, or t
  misc_difference 18850: note = a, c, g, or t
  misc_difference 18851: note = a, c, g, or t
  misc_difference 18852: note = a, c, g, or t
  misc_difference 18853: note = a, c, g, or t
tagtaccgaagcgcttggccacctcggggtagagaaccttggtgaccgcgttgatgacgtcgatgtcatccacggcgatgaggatggcctcccgcagatactgatagcccttgatgtgggcaggtacgcccacctcatggatgatggaggttaccatggcctccagactgtgggagtggttcctgtcctgttccagggattcgaaggtggtcagctggcggatgcgggcacagatcgtgctgaaccggcagggcttgaccatgtagtggtcggcgccgttggcggcggccaggtcggcaatgcttccccggacatagctggagagcaccaggatcttgggatggcgttccagagacaggccgcgcagacgctccagcacctccagcccgtccagtccggacagcaccatctccatcacgatcacatcagggagcagcttctgggtcagttccagcagctgaaggccgtctcccgtctctccaacgacctccatgtccggttcgttctgaaaggattccaccagatgacagcgaaactcctggctcgcgtccgcgaccagcaagcgtttgacacattccatttacctctctccttctgaacatccatatcattgcgccgatcgggacggggtggatcgacttggtaaatgtaacatattctgacgggatatgcaaggatggaattgcaaaaatttggaaaaacagttcgtcagtatatgacaaaaatgggtgggataccgcagagaaatcagggaaaactatacagaacaaaggtgaaagtgtcgatatacgtagaaaatatgacgaaatagacagccgtttttcttccagttcggcagggtgcgaggggcagaatctgagaaagagagaacaacaaaatgacaggatgcggcaagatgttggagaatgcggggcccccccgcagaaaaaattgcggtgggagggaacttttttacgcggccgccgtctatctctacaggatcccatccaaacaaaaggctgaccgcctgcttgaaggagtgttgtatgatgaaacgaaccctgtctgctctgatgctcagcggcgcgctgctgtgcgctctgtccgtccccgccctggctgcggagcccgccgcgccccagactgatacgtccctgacccaggaggagaccctcccggacagcgtgctgtactacggcactgtaacggaggtagtccgggatgaggcggggacggtctcccgcctggccctgtcctctgagcggtatggtgactatgtgatgaacctctccgcggatactgtgtgggtggatgccgggaagcgcgccgcctccgatccctccgacctggaggctggcgaagctgtctatgtgttccacagcccggtctctacccgctccctgccgccccagtccgccgcctatgcggtggtccggaatatgccccaggatatgggctgccccatgtaccacgaggtagaggcggtgacggagcaggatggccgcctgacgatcaccacggacaacggcggattgctgctccatgtgggagaggagacccagtgtgtggactacgccacaggagaggccgttgacctctcccagctgaaggctggcggccgggtgatggcctggtacgacgccgtgatggagagctaccccggtcaggcggtgccccactgtctgatgcttctgcctccggtggaggatcagtccggtgagcagacccagctggagcagcctgatgaggccgccgagctggcggacgggactgccctaagcattgttctggagggagatatggtgctcccgatgaagggcagctatgagaacggggccgccatggtgcccgtggccgcggccgcccaggcgctgggctatgaggtgacctacacccccggcaaggacggggcccccgccctggtcacggtggagagcgagaccttccgggtcaacctcaccattggacaggagcagattactggtgtcaccaagatcgagggcgcggcgggtatgacctctcccatgaagtacggtgccgccccccgcatcgaggcgcccggcacgacttgggctcccgcacagctgtttgagatgctgggccgcaccgtcaccctggagggggacaccctttccatccagtaagtgcctctacctcctccaaccggtcagaacaaaagagaaccccctgtgccgtgcaggcacagggggatgttttttggataaggctggattcagcgggcggagacatacttgtgcagggtcttgcgcaccgcaccggggccggcgaacaactcggcggccatggcctcgatcttctcgcccagcccggcctcgtacaagtccaggccgaatacatccttccgggtgtagagctgcttcaggcagctcatgtcctgggcgccctcccggatctccaggggggctacgatggcctgaagctcctccagcagggggtcgggggagggctcgaagggcttcccggcgtcattcacgcccttgaggtagcgggcgtagccggccagaaccagggggatgaggaccagctcgtccatgttcaggcccttggcctgataggccttgatggtctcaccgaagcggatggacagcttctgggaggtgtcggtggcgatgcgctggggggcgtccggcatgaaggggttgggcagacgcttgttcagcaccgcgccgataaagtcggcgggcttgagcacaccgggatccaccaccacgggcatggcctcgatgtagcccatcttggtgatgaggccgcacagatcctcgtccttcatctcggcggagatgagggtgtagtccagcaggcagccatagatggacatggcggtatgcagggggttcaggcaggtgcacaccttcatcttctccaccttgtccaccgtctcccggtcggcgtacagcacgccgccctgctccagaggaggccgtccattggtgtactggtcctcgatgaccaggtactcggtctcctccgcgttgacgaagggggcggtataggtgtggcggtcggtgatgatggtgtagttgtcctcaaagccgtcctcttccagcatcttctgcaccttggcgtcgggccggggggtgatcttgtcgatcatgctccaggggaaggagaccttgctctcatccttcaggtagtccaggaagtcctggggcaccaggccggccctcacccacgcctcggcataggccatggcggcgctgcgcaccttatcgccgttgtgggagcagttgtccatgctctgcaccgtgatgggcagggctcccgcctgatagcgctcgtacagcagggcggtgaccttgcccatgatgagctggggctccgccccgcgctccaggtcggcgggggagacggaataccccttctcggtgatggtgaagctcaccatctggagagagggcttgcggaagatctccaccaggcggtcccaatcagcgccgaactgggggtcggcctttaggctctcggtgacggaggccaccacccgcttctcaatggagccgtcggacttgagcagcaccagcaggctcatgttgtcataggggcggtaggccttatcgatgatctcatagtcaaagccctcggccacgatgacgccccggtcataggcgcccgcgtccagcacccgctggagcagggcggcggggaaggcacggaagatgttgcccgcgccgaagtggatccaggtgggttcgtcgtgggtcttctggcggacggcctccaggtcgaacttgggcagctcatagcccttgtccgcccaagcctggacgtcgcagccctcagatcggatctcagaaagtttcattgtacggtccctctttccggtcaatcacagtttgcgctccgccccggctctgaccgaaccggggcgggcggatggatggataaaacgggcttatctgcccttcttctccgcgtccagcttgtccagcatgtcccagatgccccacatatacatgatgcccagagcgcggtcatacaggccgtagccgggacggcaggtgccggggccctcgccccacagctggcggccgtggtcggggcggatgtagccctcgaagccgcagtcgtggtaggccttcacgatgtccaggataccggtgtcgccgtcgcagtcccggtgggaggcctcgctgaagtcgccgttggggaagtgcttgacgttgcggatgtgggcgaaggcgatgcggtcgcagtgcttgcgcacgatctcggccacgttgttcttggggttggcgcccaggctgccggagcacagggtcaggcagttataggggtcgtccaccatggacaggaagcggtcgatggcctcggcgtccaccagcaggcggggcaggccgaagatgtcccaggggggatcgtccatgtggatggccatcttgatgtcgcactcgtggcacaccggcatcagcttctccaggaagtacttcaggttctcccaaagcttctccttggtcacggggcggtacatctcgaacagctcgtccaggcgggccatacgctccggctcccagccggggaaggtcatgccgttcaggttcttcaggatatagtccgccatggcacgggggtcatcctggatcaggtccttctcatagaacagggcggtggagccgtcgggcagggggtggaacaggtcggtgcgggtccagtcgaagacgggcatgaagttgtagcagatcaccttcacgccgaactccttcaggttccgcatggtctggatgtagttctcaatgtactggtcccgggtgggcaggcccaccttgatgtcatcgtggacgttgacggattccaccacgtccatgttgaagccgtagggctccagctgcttctggacctgggcgatctcctctttctcccagacctcgccgggctgcttgtggtgcagggcccagacgatgctggtcacgccggggatctgcttgatgtcagacagcttgatgctgtcgttgccctcgccgtaccagcgaaagcccatctgcataggcataaataaacctcctcattcttacacacgggagaggcggggatggggagccgcactccccaccggccgcgtcctcaggtcacgtccatcccggtctgcacatccccgaaggggaggcggcgcaccgggagacgtgggaatttgacaggaaaaagcgtccgatcagccgccgaaccacttcagaggcacctcgaccagcggcgggaaaatagccagcaggaagcacagggccgtctgggtcaggaagtagggcatggtgggcggaatgatcttgtccatcttcacgttgccggcggcgcaggccacgttcagcacgggacccaccgggggagaggtcaggcccagcacgttcatcagcacgaagcacacgccgaagtagacggggctgatgccggcggccttgaccaggggcagcatgatgggggtaaggatcaggatgctgggggtgacgtccatggccaggccgaccaccaccacgatgagcatcagcacgatcatcaggagagtggggttgtccaccagaccctccaggccggcggtcagcagctggggaatgcgggagaccgtcatgtagtaggcggccacgttggcggcggcggccaggaacatgaccaccgcggaggtcttggcagcggacacaaagacggggcccaggtccttcagcttcatctcgcggtagaccagcaggcccaccaggatggcatagacacaggcgataacgccggcctcagtggcggtgaacttgccggagtgcaggccgaccaagatgattacggggagcagcagggcccacaggccgcccaagaagatccggaccgcctccttgggggtgggggccttgaagtcctccacgctggggaccacgccctccttgcgggtgcggaggaaccacaccacacaggcgatgatggtcaggtacacggcgggagcgatgccggccatgaacatggacttgatggagacgccggcggacacgccgtaaacgatcatgggcacagaggggggcatgatgggggccaccaggttggcgctggccaccagggcggaggactcctcccggttgtagccggaacggaccatcatggggatcaggatggcgcccagggcggcgcaggccgccacagcggagccaaccagagcggcgaacatcaggcaggcgaagatggtgacatagcccagtccgccccggatgcggcccaggaagacatcgcagaaggcgatgatccgcttggtcaggccgccgcggttcatgatctcgccggccagcacaaagaagggcagggccatcatggtaacggagtcagagccctgcatcagggtgcgggcgatgatggtggggttggcgtcgccgccgcccatggccagcgcggtgcagacggcgcacagcagcagggccatggcgatgggaagcccgatgccgatgccgatgagcatcgtggcgataaatacggcaatgatcactgcaggccgcctccttccttggcaatggggtcttctccgtcatcggccttgtggccggtgagcagctcgatgacgggctccttcaaaacaaacatacggtacaggttcaccagagagatgatgatgacggacgcgcccagcagcacgccggcgaagtggactaggaacaccgggaagtgggtggcgacccagaagtcgttgcggttgttccaggcgttcaggaacgcgccgttggtcaggatccacatcagccagatgatcagaccctggatgatgacatacaggaccttctggcccagcgggggcagcttgcagatcagggtgtcgatcatcaggtgctggttctcccgggcggcgataatagcgcccaggtagatcagataaataaagcagatccgggcgatctcctcactccaggggaagccgatcccgaattggcgcaggatgacgttcatgaaggtgaagaagatcatcgcgcccaggaaaatagcgatcaggatctcaatgccgcggaagagcttgtctaccgccgcgccgatcccgtgagatttgcgactgctgtcggacatagagaaacctcctcattcagggtgagaccgcgcccccggagggggcacggtctttggggataggttgattactgaacggcctcgatcttctcgatcagagcgggagcccagtcgttggcggccagcagctcgttcagggtgggctggatcttctcaatcatcttggcgcgctcggcctcggtcatctgggtgacggtcacaccggcggcctcgatggtctcacgatcggtatccacggaggcgatgtagtcctcccaggcctgctcagcggtggccttggcggcgtcgcggacgatctgctgctgctcctcggtgagcttgctcatggcgtccttgttgccgatgatctccagggtggcgacgatgtggttagtctcgtacaggtacttctggacctcctggaagctctgagccaccacggtcaccatgccgttgtcctggccgtccacagtgccggtctccagggcggtgaacagctcgcccagggagatgacctgagcggaggcgcccagatcctccacgatgccgatgtggatggggttgttgggcatacggaacttctggccggcgaagtcatccacacaggtcagaggcttgttggaggtaaaggtacgggcggagttggggccccaggacagcatctccacctcggggaacttctcgttgaaggcggcgctcacctcatcggccacctcgccggtccacacgttcttggcgtgatccaggtcgcggtacaggaagggccagtcggagatcagcatcatggggaactcctggttcatgggggtgcccacnnnnnnnnnnnnnnnnnnnnnnnnnnnnnnnnnnnnnnnnnnnnnnnnnnnnnnnnnnnnnnnnnnnnnnnnnnnnnnnnnnnnnnnnnnnnnnnnnnnnaagcgctcgatggtgggctggaactggttgcaggacatccgggtgccgatgatggacagctcacgggtgttgatcatggcctgggtgatgccctcctgggcggtgcagaagcccatcggtacgatggtggccccgttggcagggatgcccatctccagcagagcggtgagggaaccggggtagcaggcggagtcaaagatgacatccacgccggcgccgttggtgaactcctgaacggcctgcttcagatcctgctccttggtgttgacgatggcgtcggcgccatagccccgggcgcgctccagggagctggggttgatgtcggcgcacatgacgcggcagcccttgaccttcagggtctggaggatgacggcgccgatggtgccgctgcccaggaccaggaccgtctcgccgccctggatgttggcgcgggcggtgcagtggccgccgatggcgaagggctcgatcagggccgcatcccggaaggggagctccttgggcatgacatagacctcatgctccggaacggcgaaatactctctccagccgccgtcgatggcggagccgcgggcctttacctggcggcatacgttgcggcggccggcccggcactgggggcactcgccgcaggcaaccaccaggtccaccaccacatggtcgcccaccttgacgttcttgacgtccttgccgacctccacgatgacgccggcgttctcatggccggggacgcggggaaacacagcgttggggttctcgcccagaaactgatgcacatcggagccgcacacgccggccgccttcatctggatcagcacctcgttgtccgcgggcttaggcacgggaacttcccggacctcaaactgcttcgggccaatgatgacaacttccttcatggtttctttcatctcttgtgaccacccttctcagcttggaccgggggcgcttccttctgccgccccgtctgggatgcatactgccgcccggtctctgtctcactgacactattctacaatacttgtatactagaacacaaggtggggaattaacaaagattcatgttcttttttatgcaaatcataaaaagctttggaaatttccctcaaagacttagaatttgtttccagcttctgtttccctggctgatgaggggggctgcttgaaatactgtgggaattccgcctggatcttcaatgcatcaaatttataacggctcaggtgggtctccatctgctgccgggccatctccgcattccccaggcggatctgccgggtgatctcctcgtggtcctggaccgccgcctgctggctctctacggagaccagggacatactgcgcacccggtcaaaatggatggagatgttctggatgaggctgtgtatctgggatttgcgggcgatccggaacaaattctcatggaatttgttgtccagccacatgagattttccgggtcgtagttgtccagatagaagttttgaaggcgaacattctcctccagggcctgaaggtctgccggagtgacaagctcacagacctgctccacgatggcgcactccagcacatcccgcatgaatcgggactcgtctaccagatcgtaatcgatgagggagacgacgctcttcctctgggggtaggtttcaatgatcttcaccttggccagctcgatcagcgcctcccgcaccggcgtgcgggagaggcccatctcggtggccagctcattttcactgatctggctgccgggctccaggcgaagggagatgatgttgtccttgatgatccgcagggcgtagtcgcggctgctttcccggggaagtcgttctgagatatgcacgggtgtcctcctaaaatatttcagatcttccggcccacgcaggggacgagattgatcggctttgaccggcctgagcgcccggaagtccggtcaaagctgtggtctgattttattgtggcacattgcgcacgaattgtctactagcatactagcaacaaattccgatgtttttttggcagaaatgtcaacggaatgaaaaacagctgtgagcggctcacaaggaggctcacagctgtggatgccggaaaagatctgttggagatcaggcggccttgcccagggactggcggctgccggtgtggtagatgggtttccactccaccttttttaccagagcggccagagagatggggatgtaagtaaacataaagagcgggaaggtaaagacgtagaggaactttttccctgtggggatttggatctgatcccactcgcacaggacggtgaggatcccatagaggagcaggcccaggtagaagctggccacagtggacagcaggaaactgccggatacggagaggatctcccttacaatataggagggctgtccccagcaggccaggcacaccaccaggttgaaggcgatggtgaccaaggtgagcagcatcccgggggccacggtcataaacatatcgtagcaggaccagcttttccagctgggcttttggcagaagccgcggaccaggtcgccgctgtaattggcattgacctgatagaagcccttggaccagcgcagccgctgatcccaggactgccggaaggcggtgggctgctcatcatagatgactgccttgtcgcagtagccgatgcggcggcccttcagggcacagctgacagaaaactcgatgtcctcggtgagcaggtgatagggccagccgccgttctcccggatcacatcggcggagatgaggaagccggtgcccgaaacgtggcagttgctgcccagcagcatccgggggaagttgaggaagcgggcctcccgcaggaaccagatggcataaccggcggagatccagttggcgccgaagttctgggagttgcggtagcaggtgatagctccgtagttcccgctgtcaaataccttgttcatctccgacacaaagttggggtccaccaggttgtcggcgtcaaagatcaaatagccgtcatactggtcccggccctcgtgggccagggtgcggaataggtaatccagggcgtagcccttccccttcttgtgctggttgaagcgctcatacacgatggcgcccgcccggcgggacacctgggccgtgtcatcggtgcagttgtccgccaccacatagacatccagcaggtctgtggggtagttctgttgttttagagtgtggatcagttcgccgatcactcccgcttcgttccgggcggagatcaccgcggcgtagcggtggagctgtgccgcctccggctgcttccagtgcttccgccggatcagccctagaaagagatagaccagctgataggcataggccagagtgaacaggacagccagaaacaggttaaatgcttcgaccattcggatcatattcataagaaaacacctttttgagcgtccgggtctgctttgcgcgcccacctgaacagaagaggagaggggagcagcccggcttttgttgatacggatcggtttttgcgcaccccttggcagggacttctttggggtacgcaccatgatagcacgcttttgaaatattacaagattgtttcgtgagtcttaataaaaagttaagagttcgttcataatttagcgcaaagacaggggcaaaacagagaggttatgcggaaataaagtgggaaaagttgtttatttgttaaaaaagaaaaagcgcccctgtttcggggcacttttttggatttaatacttttgtaataattagcggatagattccccgcggaaaggggtcagctctgcccgaatgaagtacccctggggatgacggcacacagggcagttggcgggggcaacggtggcgtccaccacatagccgcagtgcaggcacatccatgcctccttcacgtcggagacgaacagctgctcctgttccagcagatcggcgtaccggccgaagcggtctccatggagcttctctaccccggcaatattttcaaacagcttgcccaccagggggaagccctcctccatggcggtacgggcgaaggcggcgtagtcgtgttcccactcctgatactcgttgtgctgggcggcccggagatagtccagcagatcggtgtacaggtccaccggataggtgccgtccacccgcaccgtctggccgctcaggtcgtggagctggcggtaaaactgcttggcatgggtcttttcctgttccgcggtaaacagaaacaggccctggatcacggccaggccgcttttgtgggcgatcccggcggcaatggtatagcggctgcgggcttggctctccccggcgaaggcgcgcatcaggttctctctggtctggctggcggcaaaggctttggcttgatctggcatggaaaattcctcccctgcatcatttggattctgttccagtatgcccgaaaacaaacctgtcattctctttgcggaaaatttacaaaagagactgcttctccttgcctttttcctgtgggcctagtataatggaggcaatttagggtgtcatgtcacccatgcgaggaggatacctcagagatgaaagcaaagacaaatctgaccatgctctgcgatttttatgagctgaccatgggaaacggctacttccagaccggtctggccgaccgtatgtgctatttcgatgtgttttaccgctccgtcccggaccggggcggctttgccattgcggcgggcctggcccaggtggtggagtatatcgaaaacctgtgctttgacgaggaggacatcgcgtacctccggtcaaagggctgtttttccgaggagtttttggaatatttgagcggattttcctttaccggcgatatttgggccgttccggaggggacgcccatcttcccaggcgagcccattctgacggtgcgcgcgccggccatccaggcacagtttatcgagaccttcgtgctcctctgcctcaaccaccagtgcctgatcgccaccaagtccaaccgcatcgtccgggcggcggagggccgtccggtggcggagttcggctcccgtcgggcccatgggccggatggggccctgctgggcgcccgggcctcctacatcgcgggctgtgccgccaccgcctgcaccatggccgaccagcattacggttcccccgccacggggaccatggcccactcctgggtgcagatgttccccgacgagtacaccgccttcaagacctactgtgagctgtatcccaccaacgcgaccctgctggtagatacctataacgtgctcaagtccggcgtgcccaacgccatccgcgccttcaaagaggtactggcccccatggggatcaccaagtgtggcatccggctggactccggcgacctgacctatctgtcccagaaggcccgggagatgctggatgaggccggcctgacagagtgcaaggtcattgcctccaacgccctggacgagtatatcatccgggacctggtgcgccagggggcccgcatcgactccttcggcgtgggagagcggctgatcacctcccgcagtgagccggtgtttggcggcgtgtacaagctggtggccattgaggacgacgaggggaacatcatccccaagatcaagattagtgagaacgccgccaagatcaccaccccccatttcaaaaaggtctaccgaatcttctcccgggacaccggcaaggcggaggccgacctgatctgcctgcgggacgaggagatcgacttcacccagccgctggagctgtttgatcccagcgccacctggaagcgcaaggtgtacaccaacatcgaggccaaggagctgctggtccccatcttcctgaacgggaagcgggtgtacgaggtaccggagcttcaggtcagccgggcctactgccagcggcaggtggacgccctgtgggatgaggtaaagcgctttgagaatccccacaattactatgtggacctgagccagaagctgtgggacatcaagcagtccttgctgaacagccatgatatgaattaaaaaacggtgagccgcgggcactgcctgcggctcaccgttttttcagggatcagaccggcccctgacggaagcgctcgatcatctcatgggtcagggagatggaagagccgccctccggcagctcagagcggtcgaaccaggtgccctcacccagctcgtcttcctgaagggtcacagtctcgtcctccgtgtccaggtcacagtaaaacccggacagaaggctgctggagaagctccagggctgactcttatagaaccggatgtttttgaccggcagaccgacttcctccatgacctcccggcggaccgtgccctccagaggctcgccgatctctgcgaagccggcgatgagggcatagttacggactgtgcccggccgggcggtctgggaatacttggtgagcagcaggcggtcaccgtgggtcactgccacgatcaccgccggggagatggtgggatagaccagaccgccgcaggcgggacaacgcatggcgcgctccacggcgtcctgctgggccggagcgccgcaccggccgcagaactggtggttgtggtaccagtcatacagctggctggcggtgatgcaggcgaaagccagccagccgggctgcatatcccggaactgtccgtttttggccggaacagcggcgtccagaatggccgagggcaccacatggcaccagtgaaaagcgatgtcatcgatggaaaagaaataggtacagggcagtgcagagagatcggcgcgggcgtttgcctcttcccaggtgaacgggagcccgctctcgcggctgagaagggtgctcccgtcctgatagaagaagacgcggtccccgtcctttggctgggtaggatggtaggcgttgtcataccggtggggtgcaatatcctggatcatagcagttagggtcctttctgatcaaattttgtcgttgcatctattatgaaggcttttctgaccactgtcaactgccgccgccatcccagggcaaaggagaccatccaacagggcgggcccccacgcggaacgaaaatttcccaaaaccggcgggtggagcacgtcctgcctctgcgtgtgccgtgaacaggctttttccatcagggcgcctcccggagttcgtccagcagatgggctgcgccatagcgcaggcaccgctggagacgccgctccccccgcttgatggtgcgggagacagtggacttgtctacgcccatctgctccccgatctcccgcatattgtagccctccgcatagtacagcagaagcgctgtccgctgcttctcggtgacgtcctcccgcagggcacggatcaggttgtgtcggaggcggctgatctcccggctgttgtccgccgacatctgccgggagtagacggccatgtccgcggcgtacagcttgccgcgcctatatcgtgtatttgacattccggcggtaccccctctcatagtagcgctcggtaagcactgccagttcccgggcctcacgaaacatggtagacagcattcggatccgctctgccagcagacagcgctcctcctcgtcctccgtccggtccagtaccgcctggagctggcaaatgcggaagtccagcgccctggcgtgggcgcggtattccacagaaagctcttgcagggtcattgtgcacattcctcctcttgttctgcctcccgccgtctgcggccgccccgccgtcccgccgcgcagcgggtgcagaggatgcggccgttccgccggatcagggggtccagccggtacagctccccgccgcactgggcgcacagcgcggcaggagcggccagctggacatcccggaggggcgggagcagaccggagacacattcgtatcccgtgagtgagacgctcctttcttctctcccggccggggccggggctcttggtgtggatctgcggatttttctgcgccctgtccccggatgagaacagaggcgcaggaaaaacctcttggggcctgtaaaataaaatgagaaaaatcaaatatttctattgacaagactcgctttctctgttagaataacacctgctgttggacagcactcttgatacgctggtgtagctcagccggtagagcagctgatttgtaatcagcaggtcgggggttcgaatccgtccaccagctccacaattcaatatggaggagttcccgagtggccaaagggggcagactgtaaatctgttgcgtttcgcttcggtggttcgaatccaccctcctccaccacgtcggagtaaacgtcatatcgtttgctccgactttttttatcaaaagtcagaacgcactcattttgttgctcctcctttccaaatcacaaccgctgcgctgggttgtgatttgctgtcgccgctttgcggcgttttttgattgtgggaaaagatcggggttgaacggagcatgcagaaagcggtggtcccaaacgggatcgcagttttcttttcagcgggaacggcggccttttgccggagcgccggtggcagggcggcctgtgcggggagatggacacaggcagcggccttttgggagaaaaagccgtaaatagaacgtacgttctatttacggctctactataccgcgaaactgcgcctttgtcaagggggaaattggaggtttttcaaaaattatgtctaccgcagactactgcacatggattcctctgtttttcacgcagagctggcacagaaaaagcgcgccgcctcccacagggaaggcggcgcgccggtgcttttatggatccgaatggaacgcttagaaatactgcttgatgccctcgggggccaggtcgggctcatcactgatggtgatggtgaacttgatgtcgtgattctcgccgaagtcgttcagccacttcaggaagtcctcagtctcgttgtagccgtcggaggggacgatcttggtcagactatcaataaagacatgggtaatgtcatagttgccggcgtacaggccgctgatgaagcctctcatggcagcgtagtccgctacatcgtactggctggaatccaccaggcggatctgatagttgatgtcgaagcggagcttgtcgcccttttcgatgcagaccacgttgccgtgctcgctctgaaccgcctggttaatcatgtcgatcatctgcttggtcttgccggtgccctttttacccatgatgactcgaatcatgttaaatcactccttcatggatgttaccagggacgctggtcccttgtgttgtattaactttaccatattgcggcgggattttcaaccggaagattgtgaattttttgccgcgccggaaagtatttttccccttacagacgggcctccagctcggcctgccgggcctcgtagccgggcttgcccagaagggcgaacatattgctcttataggcctccacgccgggctggttgaaggggttgatctccagcagatggccggacaggccgcatacatactcaaagaagtagatcaggaagcccacgctggtctcgctgatggcgggcatctggatgagcacattgggcacaccgccgtccacatgggccagcatcacgccccgcatggccttctccgccacaaaggagagaggcttgccagccaggaagttcaggccgtcaatgttctcagggtcgttggggatcagaaactcgcccttgggagcgaaatcgaccacggtctcgcacatgaggcgctggccctcctggatatactggcccatggagtgcaggtctgcggtgtactccaggctggcggggaacaggcccttgccctccttgccctcgctctcgccgtagagctgtttccaccactcggcgaagaagcggaagctgggctcgtagccggccagcatctccacctttttgccgctctcgtgcagggcgtggcgggcggcggcgtaccgccatgcggggttgtccagtccggggacggccagctccgtcatggcctgggccgcgccgtccatcagagcctggatgtcgatcccggccacagcgatgggcagcaggcccacagcggtgaggacagagtaccggccgccgatggcgtcgggcaccacgaactcctcatagccctcggcatccgccaggcccttcagcgcgccccgggatttgtcagtggtggcatagatgcgctcccgggcgccctccttgccgtacttctcctccagcatccccttgaaaatgcggaaggcgatggcggactcggtggtagtgccggacttggagatcacgttgacagaaaagtcccggtcaccgatgagggagatggtctccagcagggcgtcagtggacagtccgtttccggtgaagaagacgtcgggggtgtccttctttttcagattgtagtggggggagcgcagcagctcgatgaccgcgcgggcgcccagataggaaccgccaatgccaatgaccaccagcacctgggactgcttctggatcttccgggcagccgcctggatccgggcgaactcctctttgtcatggtcccggggcagtgtcacccagccggtgaaatcaccgccgggtccgctgtgggtggccagcatctccgccgcctgctccaagcggggcttccggctggtcaaataatcctggggaaggaagctgtctgcattggtcagattgagtgtcagcatagaaaaatcctcctttgagaatggaattttacccctctagtatagcatagatcccgaagtttttcaccgtgaaagccgctttttttcaccagacatttccaccaagaaaaaacaaaaatttttgaaaaaaagaattgactattcagctgctctgtggtatcataaataacgtcgtttggacgattagctcagctggtagagcatccgcttgacgtgcgggaggtcacaggttcaagtcctgtatcgtccaccannnnnnnnnnnnnnnnnnnnnnnnnnnnnnnnnnnnnnnnnnnnnnnnnnnnnnnnnnnnnnnnnnnnnnnnnnnnnnnnnnnnnnnnnnnnnnnnnnnngcacaaaatcgttcttgccggtccatgttccgaaaaaggcctctctgcggaaagatctgcagagaggccttttctatccaggaaatgcggtccatgagttcaattctgcaagcagcgctggaggttttccgtgatccgccgggaaaaggccaggtattccgaccgctcctctggggtgaagcccgccagatggtccgcaagggcatcctcctgagccgcctccaggtcggcgatcacagaacctgcctcgggcgtcaggacgggcttgcgcatgtccagatagccggggggctcgctctccagcaggcccttagaggacagtcgttgcagggcgagggcgagggaggcccgggagagcccggaaaagtctgctagttcccggcgggtacagggcccgtgcagctgatgcagggacagcaggatctgggcctcctggagggagagcccgtttttcagcgcggcggtctccagatgggattccagaagccgccgctcccggtaggcgtcgcagagggggccgcttcccatcacaccggcctgaaaggcccgcacacgctcgtcgcccagccgctggctggtggggagcaggggcggcaccgcgccatctccggcggcgtccagaagaaaacggtacaccttcgcccggcaccgctcatagctctcctcatccagcacctccttataaaactggtgataggactcaaagatcatcagcttcatcttgaccgtcctggaaatgctcaggctctgggacgccagggaccccttggtcttgacatagtagtagatcgggacagacagggcgtagaaccgctccgcccggcggatgtactccagattgaataaaaagtcctcgcaccagctgacctccgggtccatccgcagatggtaccgctccaccagctccctgcggtacagcttattccacaggacgccgtaataaaagtccgcgggattttccatcatgtgggcggcgtattcctcccgggtgaggaggctgtcctcgtcgatgtcgccctttcgggagagacgctcgccgaccacccggtagaagtccgcgatcaccagatcgcagcgatgggcctctgcggcccggaccagagagcgggtggcgtctggagtgatccagtcatcactgtccagaaactggagatagacgccctgagccagatccagggcatggttgcgggcggcggagaccccggcgtttttctggtggatcgcagtcaccctggcatcccgggcggcaaattcatcgcagatcgcgccggagccgtcggtgctgccgtcgtccaccagaagcagctccaggtcggtaaactgctggtccaggatgctggccacacagcgccggatggtctgttccgcattgtaaaccggcacaatgacgctgaccattggtttcatttcagcaactccttattttgagggattagggatggtgaggttgggatatggggtagtttatcacggctttgtgccagcgtcaaatcgagaacagcttcatgttttctgcggatgcggagatgatgggggctatgtgaacggggggagtactgtatagctgacaaggaacagagggggaccagcacagccggtcccccttctgtcaaaagccgatatgggaagatcaatcgacatactccacgccaatctgctccaggatctggtccacgaaggggcggggaaagcccttgccggcatggatcccggccagctgcccctcctccttcaacttgacggcggcggctttggccagttccccggcatcctcaggcttgatgaccaggatgctgtcgccatcgcccaccagaatgtcgcccgggcagatgacctgtccgcccacgctgaccgggaagttgatctcgccggggccgttcttataagggagttgaaatcatggttgagaagaaacgaaagagctttgtaaagcgcatggtaacagccttgatcctgggcgtgatcctggctataccaaaatcgccaccgtgatcaccgcagatctgccggtcatcagccagtgccggccaggcgacgccacccgcttccagtcaatccctgtctcccaggcacaccagctgtggcgggagatgcaggagcgcctcaacgatctggaccggagactgaacgccccggctgctcagccgcaagcccagccccaagccggaaggccgggacctgtgcgccgctaccgcattacagtcaatggaaaagtctatgagacctccatccagatggtctcccagtaacagaaagaggtgtgtttcatgtataccatcgatttgaacagtgacatgggtgagagcttcggcgcttaccgcatcggaaacgacgagggtatcatccagcatatcacctccaccaacgtggcctgcggctaccacgccgggggccccatggtgatggacaaggtggtgcgcatggccaaggagtggggcgtggccgtgggcgcgcaccccggctaccctgatttgatggggttcggccgccggaagatgacgctgtctgtggacgaggtcaaaaattacatgcagtatcagatcggggctctcatggcgttcacccagagctatggtctgaagctgcagcacgtggcgccccacggcgcgctgggcaacctgtgccagtatgaccgggagacctcccgagccatctgcgaggcggtgtatgagatcgatcgatccatccgcatcttctactgcgcgggggccgtcctgggggaggaagcccagaagatgggtcagaaaacggcggcggagatctttgccgaccgcgcttatatggaggacctgtccctggtcccccggaagcagtccggtgccatgatcacagatgaggatctggcggtggaacggtgcatcaagatgatcaaggagcacaaggtcaccgcgatcactggcaaggagatcgagatccagggcgatactctgtgcgtccacagagacggggccaaggcattggcctttgtggagcggatcaaaaaagaattccagcaggaggggatccagatccgaaactttctgtgatcttgagccctgccggagtgcacacggcgcgcgtggaagcattgcccctgtcggtcggctgcggccgctgggggcttctgtctgtcaacatcgggcagatggatgcggaacggacaggttttcgttgacagagtgaagggaagaggataaaataaaaggacagagcggcaagccgctctgcatctctgcgccagtagctcaataggatagagcgcacccctcctaaaaatcgaatcgttcgaatcctggagccctgtaaaattgaatattttctgtataagcccccgtagctcagttggatagagcggtcgcctcctaataatcaggtcatcaaagtcctgggaggcggatcgctccatccttgaccatgaaaaatcgaatatgtctccgtagctcagttggatagagcacacgcctcctaaggttgcgttacaacggccacctcaaaaaaaactaaataagggattgcagttcgactttgatcgggctataatcatatatcagacacgtccatatagctcagctggatagagcacacgcctcctaagcgtggggtcggaggttcaaatcctcttatggacgccagtgaacaacgccgaaagcctttgttttcaagggttttcggcttttcttatataaaaagctacgaaaaagctctttcactgtatgagataaaattctactccaaaatttgatttttgacaacccctccagaatcgaacggttgttataagacaaaatcgccagctaatttttagcagaaaacgggctgttcttgctaatgaaaatgcccttcctgctaatcagccccaaaatcgtgccaaaaatccagctaatcaaaaaaggcggatgttttgaataccatgcagttatagcagataaaattaaatatcgttatgtacatagagcgtctatttgccccgcattggggatggataggcgctctttttttatgcccaaacccatgggcaaatacaagagattggaggtgttttatttgagcaagcctgtttataccgcagacaagccgagcgactgtcattactgctacttctggacgaatggcagaaagggctgccgtctgggtagaaataattgctactacttaatctctttgccgccgaaacccaagtcggaatgtgatggctgtccctatgggcgagatcacccgtgcattggttggtgtacgaagaaggttatgcgtgaagtggggcttcgttgatatggatgtgtatgaacaggaataccgcttctactattttgcccgatgtccttacgaaaagacggatacgactttccgcagcattccgctgacaacagaaagttttccgcagaaagaaggtggtgaagccgtgtgagttttgattatttttacggtcagcaatccgatctattcacattctatcgagttccgaaggtgttgttcacgaacgagaggttctggaatatttctgccgatgccaagatgctgtatggcattttgcttgaccgcatgagcctgtctgccaagaatggttggatagataaaaacggtagagtgtatatcatttttacaatcgacgaagcgaagatggctctgaactgtgctgaacaaaaggctatcaagctgctcagtgaacttgagaagaaagcaggattgattgaacgtaagcgccagggtttgggaaagcccaacctgatctatgtgaagaactttatctctgctgtggattcacaactcttgaattgtgaaaatcacaattctggaacaatggaaatcacaactcaagaacttccgaaatcacaatgtaataatactgatattaaaaatactgaatttagtgatactgattctatctttccttccggaaatggtggaatgatggacgagaatgaccggtatcaagaatactttgattatttctcggatcagctcagtatggatttgttgaagaaggattacccttacgattccgaaatgctggataacattctggagttgatcgttgaaacagtttgcacgaagcgaccgttgattcgcattggtgcagaggagcgtccggcagaaattgtccgcagtcggtttatgaaactgaatgccgaacacattcgatatgttatggactgcttcaaggagaacaccacaaagattagaaatatccgtcagtatatgctgactacgatatacaatgcgccgacgacaatagacacctactacgatgctcttgttcggcacgatatgtcacacggatatttggaaggaggatttaagaaattgaaaatgaagcgagaggaaggagagtgacgataaatgtcgaaaaaagcaaccatcattgcggtggtcaatcagaaaggaggcactggaaagaccaccaccaccgagaatctgggcgttggcttggctcttgaaggaaaaaaggtgcttctggtagacaccgatccccaggcttccctgacggtcagtttgggcaatccctgcccggatgatctgtctccgacactttccgatctgatgggaaagattatgatggaaaaccctattactcccgatgaagggattcttcatcatccggagggcgttgatttggtgccgtccaacatcgaactctcaggtatggaggtagcactggtcaatgccatgagccgggaaaccattctccggcaatacctggatacagtcaaacagaattatgattacattcttcttgactgtatgccgtctttgggtatgctgaccgtcaatgcgttggcagctgccgacaatgtgctgataccggttcaggcagcataccttcctgcaaagggtctggaacagctgcttggaaccatcaacaaggtcaagaggcaaatcaacccgaaactgaggattgaagggattcttctgacgatggtggacagccgcaccaactactccaaagacatcagcaatctgattcgggagagctacggcggaaagctgaaggtttacaagaccgacattccccgctctgtccgtgcagaggaaatcagcgcagagggaaccagtatcttcaagcatgatcccaaaggcaaagttgccgaagcctataaaattctgacgaaggaggtgttaaacaatgcagaaaaaaggcgcaaacatcagcttgaaggggtacgatgatattttctccaccgatcaatccagagctgaagcccagcaggagcgtgtgcaggaaattccgctttctgagctacacccctttgagggacaccccttccgtgtggttgatgatgaagaaatgatgaaaacggcagagagcgtccgagatttcggagttctcactcctgcgattgtccgtcctgaccccgacggtggttatgaaatcgtttctggtcacaggcggcaccgggcatcggagcttgcgggtaaggaaaccatgcctgcgattgttcgtgacctggacgatgatgcagccattattttgatggttgatgcgaatttgcagagggagagtatcctgccgagtgaaagagcatttgcttataagatgaagctggatgcgattaaacatcaaggtcaacgcaccgatttaacttcatcccaagttgggatgaagttgcaggcaatggatatagtcggtcaggaggcaggagaaagcagaaatcaggtacaccgttatatccgtctgaccgaactgattccggaactgctggatatggtagatacgggtcagatcaaattcaatcctgcggtggagctttcctatctggcaagtgaagaacagaaggattttctttctgcaatggattatgctcaagcagctccttccctttcgcaagcacagcgaattaaaaagctcgcacaggagggcgagtgtacgctggatgcgatgtgcgagattatgaatgaaatcaagaagggagagctggacagagtaaccttcaaaacggattcgttgcgaaaatacttcccgaagtcctataccaacaagcagatggaggataaaatcattcagcttttggagcaatggcagaaaaaaagagaaaaatcaatggaaaggtaaggtaaaaaatgtttacacccaaaaacattcagggcgctttggaagaactctacgacctttgcgatcctgattatatggtagatatgctcgtaaactacagtgaggagttcgatgatatttctcctgcgcttctggcaaagtcgttccagaaaaatgccgagatggttagcaagtatcgagtattgtcctctgctggtgagggtatcgactatcagggaaaggtacttctgaacagcagagctgtgcggcttctgtcctatgtagaagatatgagcggcgatgaaaaagttcgcacgattcagagcaaggagctgtggttagcagaagatatgacattctatgtggtgtcctgtatgtctacgatcacgatggacaaggaagaagccatttgtcttaacgaacaccgcagcgtggttactacggtggaatgcgaggacgatattttcttcgacatgggttccctgatttgcgaactggacgatatttgcttgttcgagcttttagccgatgtggatgcgactatttatgaactgtaacaggttcatggatggtcgcttttcttatttccaaagaaacggaggtatcgaaacttgaaagaatacgatgtgaagatcaccgaaaccttggagaaaacggttacggtgcaagcagaatctcacgatgcagcagaggaacaggttagagccgcttattacaattcggagtacattctggactccgaaaactttaccggtgttgcgttcggcacgaccgaggaacgggaggttcagaaagaacaggcagataccatgaatgtgttgctggtaaagccgttcatgtatccgcaggctgtgcagatcggctgtgagctggaggatttgcagaaagccgtaggtggcgatattgaggcaacttatccgttcaatgagccggttgcactggtgatgcacgacgaaggtaaactcgtaggcaaagaactgaaccgtgcgctgcgtgatgatgacggcgatatttatgacattatcgccggtgattttctggttgtgggattgggcgaggatgatttttgttctctgtccccggaactgatgaagcagtttgaggaacactttcatcagcctgagacttttgtacgcatggggcgcagcattatggcgcttcccctgccggatgacatggtgaagaaagaagatgcacctgtcaaagctgattcggttccccacaaaagtaaccctgaccgagatgttctgtaaggaggttcttatgcaaagaaattcgacgattggagagctgatggagcgaaagcggattcaggatggtgccaaggagtaccagggacatacctatatggacttggcacgatttgatgacgccaccaagcacatgattattttcgatgtgctgaccgatgaatcgcctgtcggttggaaaggcgaaagaaatcgcctgtatttgagcgatgtgggttatcagaaggctctggataaccagaaagctggcaatatcaagattattagccatgccgcagttgccaagggcaatctgtattacgaccacagagatatggcacgataatctgttcactctactgcttgcaggaggtgatgaatcatgcaggaagaagttgaaaacaggacagtaaacctggcgatcagcacaaccaagctgacggggcgcactatcattgctggtatccgcaagtatttgcagcaccgggaaaaagtgaagatgaaaaaggcacgagatcctgccgttcatggaaagcaatccgtgaaacagcttttgggacagaatcagggtgctacgaatgttgagatcgacaaagagagtatccgtgattttgaaaagctcgccaagaagtacggcgtggactttgccgtaagaaaagataagtccgttgatcctccccggtttcttgtctttgttcgttccaaagatgcagatgctttggatgcgatctgcaaggaacatcaggcaagggcattaaccaagaatgaaaagccgagcgttctggcgcagctgaagaagttcaaggaaattgtcgcagcgattccgaagaaggttcgagagaagaaacaggagcgtgatctgtaatggataagagaaaaattaaaaagctcctgattttgaatttaccgtattttctggtagggttgttcgctacgaatttaggagaagcatggagattggctgagggtgcagattcatctgcgaaaatcctcagcttttttcatgcccttccgatagccctgaacaatccgatgcccagctttcacccattggatttgctgattggtattctctgcggcgcaggacttcggctggctgtctatctaaaaggcaaaaacgcaaagaagtaccggcacaatgttgagtacggttctgctcgttggggaacggcaaaagatattgagccgtttattgcaccaaagttcgaggacaatgtgatcctgacaaaaacggagcggctgatgatgagcaatcgtccgaaaaatcccgccaatgccagaaataagaatgttctgattatcggcggttctggttccggtaaaactcgcttttggttgaagccaaaccttctccagatgcacagctcctatgtggttactgaccccaaaggcagcatcgtgattgagtgcggcaacgcccttttgaagcacggctacaacatcaagattttcaacaccatcaactttcggaagtcgatgcactataaccccttcgcctatatccattcagaaaaagacattctgaaactggtgacaacgctgattgccaatacaaagggggatggaaaagccggtgacgagttctggacgaaggcggaaacgctgctctactgtgccttgatcggatatatccactatgaagctccggttgaggaacagaatttctccaccctgattgagttcctgaacgcaatggaggtgcgggaagatgatgaggagttccagaacccggtggatctgatgtttgaagccctggaaaagaaaaagccgaatcactttgcagtccgtcagtataaaaaatacaagctggctgccgg

SEQ ID NO: 756 - DNA, 13319 bp, unidentified
  source 1..13319: mol_type = unassigned DNA
atgaaccaacctcttatcagactgactgagattgccgctgcatacgaccagaaaaaagtgctggaacatatcaacctggaaattgcagaaaaggattttcttggagtaatcggcccgaacggaggaggaaaaaccaccttgatgaaaattattttaggcttactaaagccttcggctggaacaattcagttttttcatcagggaaaggaggtgaatgagattacaatggggtatttgccccaatacaacactatagataagaaatttcccatctcggtgtacgaagtggtcctttctggattaaataaacaaaaatcattgttccgctcattctccaaggcacagcatgacaaagtacgtgaaaccattgcccgcatgggactggaaggcttggaacaaagagctatcggacaattaagtggcggacagctgcaaagggctttattggggcgcgcactcgtctccaatccagaagtcgtcattctggatgaacccaacacatacattgacaagcgttttgaggctcgtctttatgctctgttggaagaaatcaacaaggaatgcgccatcgtgctagtgagtcacgatatcggcaccatcctgcaaaacgtaaaaagcattgcctgtgtaaacggcacgctggattaccatccggatacggaagtttccgccgaatggctggaggcacattttgaatgtcctatcgaactgttaggacacggcaacctgcctcatcgaatattaaaatgccatcatcacgaagagtagaaggctgcttttaacgccttttgcaacattatcatttacttttgggacttgattagcaaatgtttgctatctttgccgcattgaattttaacgagaaactaaaaataattcatgaaacagtacaacaagattaacaatctggtaggctggcttacttttgcggtggctgcatttacttactgcatgaccattgaaccgacggccagcttctgggactgtccggaattcattactaccggatacaaactggaggtaggacatcctcctggcgcacctttcttcatgctgacagccaacctgttcagccaatttgccagcgatgcgactcaagtggctaaaatggtgaacataatgagtgccctgatgagtgcggcatgtatcctgttcctattctggagtattacccacctgaccaagaaactgatttgccccgatgacaaagagatgactacgggcaagctgattaccatcatgggagctggtctggtaggggcactggcttatacatggagtgatacattctggttcagtgcggtagaaggtgaagtatatgcgtattccagccttttcactgccgttgttttctggctgattctgaagtgggaaaaccgggctaacgagcctcacagcgaccgttggctgattctgattgcttacctcacaggattgtctatcggtgtacacttgctgaacctactttgtattccggccatcgtactggtatattattacaagaaaaaccccaacgccaacctgaaaggcagtctgatagccttggctggttccatgattctggtagctgtcgtattgtatggcatcgtaccgggtatcgtgaaggtaggcggatggtttgagctgttgtttgtcaacgacttcggcctgccatttaatacaggtgtcatcatttacatgattattctggccgcaagtatcatctggggtgtgtacgaaagctacaccgtgaaaagccgcaagcggatgaatatctctttcctgaccactgtcggtttgctgggtattccgttctacggacatggctggagcagtgtcttcatcggtatcatcgtactggctattttagcaatttacctctttgccaatatcggtgaaaaataccgtgtcagcgcacgcacgctgaataccagtctgctggccatgatgatgattgtggtaggttattcttcgtatgcagtcattgtcatccgttcttcggccaatacgccaatggaccagaactctccggaagacatctttactttgggagaatacttaggccgtgaacaatacggtacccgcccgttattctacggacaaacttatgcttctaaaccggcattgaaacctactgaaggaggatgcgtgtacgacgtggaagaaggggctccggtataccagcggaaagaaaaggaacgtccggatgaaaaagacagctacgaaattgtacgtcataaaacagagtataaatacgctcaaaacatgttgttcccacgtatgtacagcgatgcacatgcacaagcctacgaagactggctgggaggagtagaaggacgtcaggttccctacgaccagtgtggagagatgattatggtgaagattccgacacaatgggataacatcaagttcttcttcatctaccagttgaactacatgtactggcgttatttcatgtggaactttgccggacgtcagaatgacattcagggacagggagaaatcgaacatggaaactggattaccggtatttcatttattgataacatgttgataggcgaccagacgctgctcccaagtgaactgaaaaataacaagggacacaacgtattctactgtttaccgttgattttaggacttatcggtctcttctggcaggcttataagggagaaaagggtatccagcagttctggattgtcttcttcctcttcttcatgaccggtctggccatcgtgctttacctgaaccaaacaccgcagcagcctcgtgaacgagactatgcatacgccggttcgttctatgcatttgccatctggattggactgggagtggcagccatagccgaatacctgagcaagaaaatcaatgaaaagcctgcggctatcttagccagtgtggtctgcttgctggtgcccgtgcaaatggtaagccagacatgggacgaccacgaccgcagcgaccgctatacatgccgcgatttcggacagaactacctgaactctgtaccagaaaagggaaatccgattctttttaccaacggtgataacgatacattccccttgtggtataatcaggaaacagaaggtgtacgcacggatgtacgtgtctgcaacctgagttacctgcagactgactggtacatcgaccagatgcgccgtccggcatacgactctccttcagtacctatcaactgggatcgtattgactatgtatccggtcacaacgaagcggtgtacgtacgtcctgatgccatgccgaccattcttgaattctacaaaaagaacccggaagaggcagccaaggagtttggagataatccatacgaactgaaaaacatcctggaacactgggtacgctcaccgaaagaagacttacagatgattccgaccgacagtatcgtcataaaactggataaggaagccatcaaacgttcgggtatgctgacacctgattctattccggaatacatgcatatctcgctgaaaggaaaacgagtgctgtataagagcgaactgatgatgttggaaatgttggctaacaccaactgggaacgtccgatgtacatggctatcactgtgggttctgacaatcacctgaacctgaccaataacttcttgcaggaaggtctggcttaccgcatcactccgtttgacaatgcgaaattaggcagacgactcgacagcgaaaagatgtacgacaacctgatgaacaagttcaagttcggcggcattgacaaccctgacatttacctggatgaaacggtattacgcatgtgcgatactcatcgccgcatgttcgtacagctgaccagccagttgattaaggaaggcaagaaggataaggcactgaaagcattggattattgcgaaaaagtgattccttcgaccactgttccgcacgactacctgatgagcagttccaaggaaatggcagaaaactacctggcattaggacagccgcagaaagctgaaaagattctcaatgaactggccaacaacgctgtagaatatgctacctggtacttgagtctggacgatgcccgtttcgcaagttcatacgaaaactgcatgcgttatttctatattctggatgatgtatgcaagaccatggcgcaaatgaaagacagcaagacaggtgaagaaaacaaatctgctttgcattatgctcaaaagttcgaccagctgtacaaactgctggaaaaacgagtaggtaacagcgctcctgctcaataatacagaaattgaatgattagatacagaatgtcattctgaacaccacagagaatatcaccacctttgcaggttcagaatgacattctttcttttaattctttctgcaaaacaaacctcttaaaacgacgaaaaacatgttcatagaacaacctccacaatttatccgtctgctttatccaaaagctctctggcgcatggataaaaacgaaagagctgtctacctcacttttgatgacggccccatacctgagattactccctgggtacttgatttactggacaaatatggaattaaagctaccttcttcatggtgggtgataatgtaaggaagcatcccaaagaattccaaatggtagtggaacgcggacatcgtatcggaaaccatacttttaaccatatacgaggattcgaatttttaagccagaactatctggccaataccgataaagccaacgcttatttgcagaccaacttatttcgtcctcctcacgggcacatgcggtggatgcaataccatgtgttgaaaaagaaataccagattgtgatgtgggatttggttacgcgagactacagcaagcggctcaatggtccgcaagtatttgagaaggtaaagaaatatgcccggaacggttctatcatcacgttccatgactccctgaaatcggaagaaaaccttaaatatgcccttccccgctccattgagtggctgcttgcagaaggctacgagtttaaggtatttccttaatatcagccgttgaaaaaaagactctccttcgtcatgccagtacttccttgaaagtactggagtacactgccgaaagtactacagtactgccctgaaagtactgcagtattttcagtatagtactgacaaaataaaaaccgacagaacccaatctccccaaacggtcattcggcactgtcggttttccttatatctttatatctttcctgttacagacttttatttctgaacggtcaccaccagcggattacgtactttctcagcataatccttcaagtaattggtccagtcttctgctttttcgaaaccatatttgctccagcctgaaccccagtaatatacaaaatcattacccggttcatacgtagaaatacccaatacatgtcccagtgcatcgcctgccggtttttcaaacaactgtgtagtagtctgtaccgaagcagggaataccgctcctacatatacaataccgttgccagcttcagcattcgtcgtggggtctgcataagagatatatcctttcgctgcatcatacgcatatccttcaggatttgccgcatgaagcaccaaccctgctgctaccggagtagcctgcgtcagatattcgtatgaaaccgtagtcttgttcagctgagagcctttatcaagctgtatgatacgagtttctaccacatttgaatcgttctttaccaccaaaggattgaataccagtttcacggtaaaacgcaaaggtccgttatccaaaatctcataatctttgtagcaataaggatatacaattgcagagtccggcatcagagctgcagtaccgcctcccaaagtaggaccaaccgcatagcagtccattccgttaccatggtctatatgataagaaatagcacgcgacaaactgtctgcttcctccttctttccggcttctctcaacgccttgatttctgcacgtgaagcagaatccagctccattgcataacgatcttctacaacgagctcttctacgctctttgtaaagacatcatatccataagctttttctccgctcttctgcaaagccgggccgtatgcacgataagccgcacggtcattctcccaggcaatgtcatccagacgttccggatagcaacggccatacactaccgcattaaccagtgaaggtgttccctgctgcactgtatagtttacagaagcttttgaagcgatagacacgggaaatatcactttctcatcgtatgtcagctgataaggaatctcctgggctttctcatcatagattacaaactgtgcagtgtcagaaagattcagctgcgtataaatatcatttacgggaatttctaccatttcccctgtacgttctatagccaaggggttggcaattgtcacagtgacagattctgatttactacatccggtccacaatacagtggcacaagcagcggcagcaaacaaagtctttctcataatattatctttatctattaccaaaaagtcattctgggaaagtacaaaccctcccagaatgacattctatctacaaaataaatgtaatttatttaggctgtttaccgatataagccaaaataccaccgtccacatacaatacgtgaccgtttacaaagttagatgcgtcagaagccaggaatacagcaggacccatcaaatcttccggagttccccaacgagcagccggagtcttagccacgataaatgcatcgaacggatgacgagaaccgtcagcctgacgttcacgcaaaggagcagtctgaggagtagcgatgtaacccgggccgataccattacactggatattgaattcaccatattcagaagcaatgttacgagtcaacattttcaaaccaccttttgctgcagcgtatgcagaaactgtttcacgacccagctcactcatcatagaacagatgttgataatctttccgtgacctttcttaatcatgctaggaataacagcttttgaaacgataaacggtgcgttcaaatccacgtcaataacctgacggaactgatcagctgacatctcacacatcggaatacgtttgatgatacctgcattgtttaccagaatatcgattacacctacttctttttctacctgtgcaaccattgcatttacggcatcttcgttagttacgtcgcatacataaccgtgtgcattgataccttcttctttgtatgcagccaaacctttgtcaaccagttcctgtttaatgtcgttaaacacgatagttgcacccgctttagcaaaagctgtagcaatagcaaaaccgataccgtaagaagcacctgttacaagggctaccttaccttcaagtgaaaagtttaccataataattataaattttaaaatctcccgttgttccccgaaaaacagagaacaactttatattattgtttaaagttctttctctctacgcagacaaaaatacaaaagttagccgaaatccaggtacaatatttgttcacaaaacctataaaattgtgctacttcttgtgtatttattgatttttcctactaaaaatacgtttcagcagactttttcactcaatttagctgtatcaataactcacaaattttatcctgcagtttacgggcctgacgagctttcaatacattttgattaatgataacaaaagaaattttgtgcccgttcacggatgtcaaataaccagccaatgaactgattcccgtaacagttccggtctttgctcttacattacggaaggcttttcccgtacgcattcttccctgaagcgtaccatcaactcctgctacgggcaggcagtcatagaaagtctggaacacggacggatgacgataagcatagttcagataagccaatatcagacgaggagacacataattatacaacgagactccactaccatctacaattcgatactccttggggtcatgcccaatggcattgcgcatgaatctccctattacaacctgacagtccccaaaagagatgtgtgaagtatgtttcccgttcatttgccctaactgacgaaacaaggcctccgcagaaagattgtcactttctttcaaggcacgcttcaacacttcctccaccggacggcggcaagtataaatccattgtgtactatcaggagcggttaaaaagaaaatactgtctttcgatacggacagcccttctttgttaagcttataacaaaacgtatccataaagaatcgcttggaatcatacagattcagcgtacgcttacgaacagaagaaacacatccggacacatctatcgtattgccgtttgtgagccagtcacgcgttattttcagttttccagcttcggggtgcagacttatagaacgattgttcaactgataataatctgattccggagtaatttccacggttccggccttccctttggcagcaggagataccttaatatccacacatcccctgttcagcataagcggtgaaagataaggttggaaagcttctggagtatcatcccatgaccagccttctccccagtatatggaatccatcaaagaaacatcacccacaagtttcccggaaatagcttgtatgcctgcctctttcacggctctgaccagaaagtccatatccaactccataaactccgggtcaaaacctccttttacgtacaggtttcctttcaagattcctttttccaccacaccgtcgtacgaaagtgtagtctgaaactggaaatcctttcctaatacatccaaagcagttaccgcagtaaccactttttcaatagaagccggccggtacaacttgtctgcctgatagctataaagctccttgcctgcagtcaaatcatgaaccacaatacctacttccgaggttttcaacaaggggtcggaagatattaacttgtttaactcgtttgttaataacgtctgggcatgaagaaaaccggcccaaagaaataaaaaaaataatactccgcttattcgtttcattcaacacttcaatttataactcgcgaaagatttcgcctaccgtaggatgtggaaagacatattttttccagtctgaaagtttacgtctgtcttctatcatcattcctgcctgaataattaattcagaagccggatttcccagcaaatgtactcctaaaatttcttcatcttctcccaccagtaccttgcagactccattcactccttcattttcagccacaaaacggcccgaataggctgctggcaagcttactacacgataggcacggccttcgcgtgtaagcgcttcttccgtacaaccgacagaagcaatttccggattggtataaacaactcccggtatggcacgatagctcatggcgtctgtttttcctaaaatatgatgaactgccacctctgcttcacgcacagccgtatgagccaacaaagatactccattcaaatcaccacacacatatactcccggcacggaagattgcagatgttcatctaccttcaccgttccacgtgccgtaagttccagattcaggttttccaatccgaatccgttcatcaccggccggcgtcctacgctcatcaacagtttttcggcacaaactgtgcttttttcttctccgcaggtatattctatttctattccgtcttcattctgtgtaactccggttactttcgtattcagtaagaacttcactcctctcttggcataatctgcccgtagaaggcctgacaactccttgtccattcctcctaaaatttcatccatcatttccacaaccgttactttcactcctaagctgtggaaaaacgaagcaaattccataccgataactcctcctcctacaataactaaagaagaaggaatttctttattgtccaaagcctcccgatgtgtccaatagttcaccgaatcaagtcctgccacagaaggaataaaagtcgcactgcctgtacatactatcatctgttcacattcatacaactcctcaccgcaacgaacagtatgtgcatcctgaatgtaagcttccccctgcactaaagtaaccttctgtgccgtaagctttgccttgatacccagtaccaattttctgaccaccttcgttttccgggctataatctttcctaaatcggctgaaacctctttcacattgacaccgtattttgctgcatgcaaagctgtatcgtgtactttcgccgcatacagcaaagtctttgtgggaatacatccctcattcagacaaactccgcccacgttgttcttttcaaacaaaactacactgagtcctgcttttccggccatctcagcagctgtatatccagccgggccaccaccaattatagccaattgacacttcataatccgttcaaattttagaaatgattattcttcacgatagtctgcatgaggattgcgttctttcgcacaagccacaaatccttttaaatcggccgggtcaaaattaatgaaccctttcgtataatatatggtaattcttcctttcagcaacgaatctttcttacgcaatgcaatccgtcttactccatacgccttgatactgccactgaaacctcttttcaaccaaatatccccgttttcctgtaccagaatacgcgtcatctgctcatcaatcaacaataaaacgggaagcacaatcggcatcaaattccaatagttttctgtatgcaaagccatcagcacaatggctacaatcacaataatgactcctaaccacactttaaaaggagttctgcggattttaaactcacgtaccatagtatttttatcagttaattatttgtctcaatcataaaattgaatcgcctcgttctttttcaacaggcaacggataaaatcttcctgattcttaggagaaagagaaatggagcggacctttccatgttttttaaaaacgacttcaagccgctcgaacgacaaagcaggttgccagaaagtcatcgaacggactttccgtatacgaagaatctgatctatttcaagtgaagcattggggataaaccgtccggtctctactttcagccagccatctcctgtaattacatactgcgtatgaatcagcatttcgatttcaaaaatcaccacagttgcacacagaattgtacacagcagataatgttcccagaaaaaaaagaataacaacacagaagttattcctatcactatccaataccaccaaccaacttttgattgaaaagtacgattcattgtctgattttttgatttaatttcccgtgaagataagaaattctgcttgaaaacaaaacatctccaacgcatctttaagtattttaaaaatcaatctacagagacacacaaaaaagaatgcttttgagcatcatataactgacttttttgtagttttgcgttataatacccaatcttatgataagaaaattcgattttctcgttatcggttcaggaattgccggaatgagctttgcgctgaaagtggcgcataagggttcggttgcactgatctgcaaagccggactggaagaagcgaatacctactatgcacagggaggcatcgcttcagtaaccaacctgaaggtggataatttcgaaaaacatatccacgacaccatggttgcaggagactggatcagcgatcctgccgctgtagaaaaggttatctgcaacgcgccttctcaaatagaagaactaattaaatggggagtaaactttgacaagaaagacaacggagagttcgacctgcacaaggaaggcggacattctgaattccgtatcctccatcataaagacaatactggtgctgaaatacagaccagcctgatagaagaagtaaaacgccatcccaatattaccgtcttcagtaatttctatgcggtagaaatcatcacccagcaccatttgggaattatcgttacgcgtcacacgccgggaatcaaatgtttcggtgcttatgtgctgaatgaaaaaacaggagaggtggatacattcctttctaaaatcaccgtcatggccactggaggatgtgaagcggtttatacccacaccaccaacccattggttgctacaggcgacggtattgccatggtatatcgtgccaaaggagttgtcaaggacatggaattcatacaattccaccctactgccttgtatcacccgggcgaccgtcccagcttccttatcacagaagctatgcgaggttatggaggtgtactgagaaacttgtcgggtgaagaattcatgcagaaatacgacccgcgcctttcactggctcctcgtgacatcgtagcacgtgccatagacaatgaaatgaaacaacgtggtgaagaccatgtatacctggatgttacgcataaagatccggaagaaacaaagaaacatttccccaatatttataaaaagtgcctgagcctgggtattgatattacgaaagactatatcccggtagcaccggctgcacactatctgtgtggaggcatcaaggtcgatttggacggacaatccagcatcaagcgcctgtatgctttgggagaatgttcttgcactggattgcacggaggcaaccgccttgcatccaattcactgatagaagccattgtttatgcggactctgccgcaaaacacgcactcagtgtactcgaccgttacgatttcaacgaagatattccggaatggaatgcagaaggcactatcagcaacgaagaacgaattctgattacacaaagtatgaaagaagtcaatcagattatggagtcgtatgtaggtattgtacgaagcaacctccgtctggtgcgtgcatggaaccgtctggatattctctatgaagaaacagagcgcctgtttaaacgtgtaaaggcttccagagagatttgcgagctccgtaacatgattaatgtaggttacctgattactcgccaggcaatggaaagaaaagagagcagagggcttcattacacgattgactatcctcatccaagcaaagacaacgtagagaaataaaatctctaatggatattttcacaagccggggtaaatactccggcttttttatgttcttctctgaaaatcctactaaacacaacattctgaagtatgcccctctcccaggctgattttcgtacgttttaagcctgtttgaatgctccgataaagaatggctctccttttcggagaaaacgtctccaggcgcatttctgagagccgtccgggtaagcggtaagggaacaaatgatagcaaaggggaaaaagaagaaaagaatccggcagcagaaagaggaaacggcctgctgcgaaagagcggaaacggacgcagagacagtacggacacaaaaaagtcctgaagcatttccgcttcaggacttctgttaaaacggcgactacctactctcccacttgcgcagtacca

SEQ ID NO: 757 - DNA, 14073 bp, unidentified
  source 1..14073: mol_type = unassigned DNA
atgaaagaagactggaaacccggaacaatgatttatccgctgcctgccgtattggtgagctgcggaagcactccggaggaatataacattctgactatcgcatggacggggacgatttgtacgaacccgcccatgtgctacatctccgtacgccccgaacgccactcctacgacatcatcaagcggaatatggaattcgtcatcaacctcaccacgaaagatatggcacgggccacggactggtgtggcgtacgctccggaaaggactacaacaaattcgaggaaatgcatctgacaccggggaaaagcaccgtagtcagcgcgcctctcatcgaggaatcaccgctttgcatagaatgccgggtaaaggagattatggctctcggttcgcacgacatgtttatagcggatgtggtaaatgtacgtgccgatacccgtaatctgaaccctgaaaccggcaaactggaactggcggaaacgaatcccttggtctatgtgcacggtggatattatgagctgggagaaaagataggcaaattcggatggtcagtagagaaaaagaagtaataatgcgataaaggttttaagagatggagttgcgacgaatcttgatgggcttatatctgttggccttccccgccatgatgtggggacagactccggttgtgcccggtactgccgacgaagagcattccggacaccgcaaggaaactccggtcaatttcggtttcaaaggcggtttcacctcttccttgttccttgtatcccagttcagtgtcaacggagtacccattgacgaagtgcagaacaattacaagataggatatttcggttcccttttcatgcggataaacttcgaccgccacttcctgcaaccggaaatatcctacaacatcaaccggtgcaacatcaccttcgagaaacctctgcccgaagacgccgcatcaggagcccggctggaggaagcctccattacatcgtccatccacagtatagacatccccgtcatctacggatacaacttcatcaaggaggggccgtacagccttgccgtctttggaggacccaaagtgcgctatatatgggacaggaaaagtgacatcgacttcgagaatttcgaccaggtgaatatccgtgaaaggctgcgtccgctcaatctcagtttcaccgtcggcgtatccgtcaccatctcacgcgtctttttcgacttccgttacgacatggggctgcacaacatctccaagagcgtgacatacgatattccggccgacaacaacgctgctgacgaaaacacgaaaaacgaaatccgttttcaccgcagggacaatgtgctgagtttttctttcggagtgttcttttgacagtaaatttcttccttttctttcaatttattcatttatttcccgtaaatttgtgcgcttaataagagaacacagatttatcaaacttatctaataagcagaatgaaaagagatgatttaattttcgaacttatcgaaaaagaacaccaacgtcagctcaaaggcattgaactgattgcatcagagaactttgtaagtgaccaggttatgcaggcaatgggctcctgcctcaccaacaagtatgctgaaggataccccggcaagcgttactatggtggttgtgaggtagtggaccagagtgagcagattgccatcgaccgcttgaaacagattttcggcgcagaatgggccaacgtacagccgcactccggtgcacaagccaatgcagccgtattcctcgccgtgctcaatccgggcgacaaattcatgggactgaaccttgcacacggcggtcacctctcccatggctcactggtcaacacttccggtattatctatactccctgcgaatacaatctgaaccaggaaaccggacgtgtggactatgaccagatggaagaagttgccctgcgcgagaaacccaaaatgattatcggcggcggttctgcttattcccgcgaatgggactacaagcgcatgcgcgaaatcgcggacaagataggtgccatcctaatgattgacatggctcatcctgccggactgattgcagccggtgaactggataaccccgtgaaatatgcccacatcgtgacctccactacccacaagactctgcgtggtcctcgcggtggcgttatcatgatgggtaaggacttccccaatccctggggcaagaaaactccgaagggagaaatcaagatgatgtcccagttgctggattcagccgtattccccggtatccaaggtggtccgctggaacatgtcatcgcagccaaagccgttgccttcggcgaaatcctgcaaccggaatggaaagaatatgccaagcaggtgaagaaaaacgccgctgtcttggcacaagccttgatagaccgtggcttcaccatcgtttccggcggtacggacaaccactccatgctggtagacctgcgcagcaaatatcccgatttgaccggtaaggttgccgagaaggcgttggtatctgccgacatcaccgtaaacaagaacatggttccgtttgacagccgctcggctttccagacttccggcatccgtctgggtactcctgccatcacaacccgtggtgccaaggaagacctgatgctcgaaattgccgagatgattgaaaccgttctgtccaacgtagacaacgaacaagtcatcgcagaggtacgtgcacacgtcaatgcgaagatgaaagaatacccgctgtttgcttattaataagcaaacagaattaaaaattaagaattaaaaattaaaggctgcgcagttcaaagcgaacattgcgcagcctttaatttttaattcttaatttttaattctaaacgcgctccgcgcgtttagctcagcccttctatatttccgtccacaatatcaatgtgttcggcttgtggtttcttgggtaatcccggcatacggagaatttcaccggcgatggctacaatcatttccgcaccgttattgaccacaatatccttgatgtggaactcaaagttgttgactgcaccgtatatcttcgggtcggcagagaaggagtactgcgtcttggcaatacagacggggtaatggctgatacccatctgctctatcagtttgataactttgcgggagtggagactgtaagtcactacgcttgccccgtagaggttgcaggctaccttttctattttacgttccacgcaatcgctctcttcgtaggtgaaggtcagcggttcggatggtttgttctcgatagtatctactaccagattggcaaggtcaacggctccctctcctcctttggcaaaggcgttgttcacggcaaaacctacctcaagcttttcttcgcaatggcggcggatagcttccacctcctcgtccgtatcactggcaaaacggttgaatgccacgatgacctgctggccgaatgaacgcaaattgcgtacatgcttgtccagattgccgaagccctctttcagtccttccatattgggttccttgatgcggtccagactgacaccgccatgcatcttcagtccttgtgcggtagcaacgattatcgtcagcttgggctgtaggccgctcttgcggcacttgatgttgtagaacttctccgcacccaggtcagccccgaaaccggcttccgtcactacataatcgccaaatgtcatggccatttttgtggcaagaatggagttgcaaccatgggcaatatttgcgaacggtcctccatgaacaaaagcagcagagccttcggtagtctgtaccaagttggggttgatagcatctttcaacagtacggtaatggcaccggctactcctaactccttcactgtgaaaggagtaccatcgaaacggaatcccagaataatattttcaatacggcgacggaggtcgtcgaggtctgttgccagacagagaatagccataatttcggaagccggggtaatatcgaagcccgactcctcggtaatgccgttggtgctcggtcccaatccggtgacaatgctccgcaaggaacggtcattcacatcaagtacgcgccgccagatgatttctttcagtccgaagccatccgcctgatgctggtacaagtaattgtcgagcaaagcggaaatcatgttgtgtgcggaggtaatggcgtgaaagtcgcccgtaaagtgcaggtttatcttctccatgggcagcacctgggcatatcctccaccggcagcaccgcctttcatgccgaagcaaggacctaacgagggttcgcgtaaagccacaatcgctttcttgccaatcttgttcagccccaatgccagcccgatggacacggttgttttaccgatacccgctttcgtagccgtgatagccgtcaccagtatcagattgctcttcttcactttctcttcatcaatcagatgcgtaggaatcttggctatgtaacggccatagttctctacttcgtcacgcgggatatccacactttcagccacctgctttatcttcttcagctctatgctgcgggctatttcaatgtccgatttcatacagagtcttttctttaaataacaactttaatgttttgaaagttgcaaaagtacgaaagatgtggcaaagtacaaaagaataccgtattttcacctgaccacctgcatcttctatctatttgaaccgcgacgtatccaccgcctcccgttgcttctccttatatccaccgaatttataagtaaacgatacgccgaattcgcggaagcatgagtaatgattcgtcacattctgcgtcttgaaacggatgcggggagaaatctgtcccgtctcaaaaatatcgttgcaatagaggttgagaatggctttgttcttggcgaagccgtagcgcagggcaatattcacattgcccgacgtaggcaggtcgtagatgccctgaatggctttactatgcacaaatccggtcaccgtcagcttcaagtcgggtttggtggagagggtaaaagtattgttcatctgggcaatgccatagcattgctttctgtcgaaaggaatatcccagaaatcaccatccttttcgcgatgccacaagccgatgagggtaaggcgagaattcaaccaatccttcaccttaaatgggatagaggcttgtattcctgcttgttgctgataatcaaaattgagtgtcttgtagatttcaaccagacgttcggaggattggtagagtgtctgtacagagtagtccttggtgtggttgaaccaggcgctgaagatgtatttgcttttcaaaatataggtcattttcagctcatactcttgtgccggtttcagcaacggattaccatgcagctcagagtatccaccgccgatgtaagagacggcatcctgcaccgcccagtagtcgggatagtccttgtcgctgctcagagagagctgaaggatatgtcccggtgccggcatatagttcaagttgacgatgggataccagtcccactggtcccagacgggagtcttgtaatgctccacagccagggaagcgtccaaagcaagtttgtcgccgaaactcttgctgaaacctgcatagatattccaagtttgctcgcggcggcgggacttcatattgcttaaggcatctgaggaggtcagttgttcgccggtttcggggtcgtaataatattggtagctgttgtcgatgctggtagtatagatggctccgtaattcaaatcccaaccttttcccagactatgctcctgggccagaaagaatttccatcggttgatgcgttggcaatcttcggtgtagaagtcaagttcctcgtcctgcatgcggctatgcagcaactggtcggacggggaacggtagtaggtcagttcggcaccggctttgaggccaaaaggggtacgatagtccagacggccgttgtgcagccagtcggtgctattgccatgagttgtggacacctgcgtgcccgtcacgcccttccagttgtgggaggtggaatagccaccgttatagacgaaactcagctgatggttcttggcgatattatagtccgcccctacccggaagctatgggtatggctgcggccacggcccacctcatctgttgtcatggggtgaaccgagccgtctgccagggtgtgcacagcctctttgtcggtagtagagtagccccggccatggctgtgcgagtaaagaaaatctgctgagaatttatttttgctgaagagcaggctggcgcgttcctcaaagccttcgttatgcttctggcgatacttggcatagagttcgccttgccaggagccggggccgcctgccgattgtttcagggtgatattgatcagtgcgccacgcacctggtagcgtgcaggggcgttgtacatcacttccgccttctctatgcggctggcagggatgctgcgcagcaaggaatagagctgctctgtgctgagggtggttactttgccgtccaggataacggtgactccctggcctgccaactgcagcccgccattcatctcgatgacgccgggaagctctttcacggcatcgtaggcattgtctacggggaggttccggataaggcggggcaggtcgtacaccagcttgccttgcgctgcctttacgatggggcgttcaccggtaatcatcacttccggcaaggtctgataaagactgtccagacgggcatcggtcgtgataaggctgtcggcgctgaggatgcgattgtcgtccgcaccggaggtggttgcagtgccgttgttctcttgtgccgaaagactgatgctcaaagcacagcatacaatagggagtaaatagaatcgtttcatgttcttctttttatttatgtttatattcttcttctgcaaatcttcgtctgcaaagtacggcagaatcagcagaaacttgtgttatcagcggcttaccaagtgttatccagtgttatcgggagtgttatttagtcttatcggatgatagggttcacaatattaatcttacctttgtatgtataaaagtaaccggaaacaaacatgaaactgccattcaaatatattgccatacttgtcatcgtctccctggccggcatcttcgcctaccaagcctactggctgacggggctctaccataccatgcacagtgaaatggaaagggacatcaccgaagccatgcgcatgagcgactataacgaaatgatgatacgcgtggataaaatgaagcaggacgacataaaccacggtgaagtcagcgtatcagccggatacagcgatgacggaaaatcatttgtccgtagcagtaccaccatctcccgtgaagattctttggacaacaccaccctgcacgaaaccttcatgcccaaaggagacagtgtttacgtgacccacccgaacgattcaacccgcgtggaagtcagtgtcagggactcagacagctctccccaatccgcattgagtgccaaagggggactggatgtgattttgcgcgaccaaaacagtatgctggaactcgccacctacttccagcgcggactgcattcgggactggacatcatttccgaccccgacgtactgctttatgacagcctgctgacttcattcctgcatgaccgtaacatcaatcttccccataggctgctacatcttcacaaaggcagcaaatgggactctaccattctctatatagatacattggtaaacatcggtacccccggctatgtgcctacctcaaaagccgtggaatataattattctttcgacatcaatacaagtcaaagctaccgtctcatcatggaaccagccggcacgttggtcttgcgacagatgtcgggcattctcaccacatcattcgttattctgatcgtactcgctttctccttctggttcctgatacgcaccatcctgaaacagaagacactggaagagatgaagagcgatttcaccaacaacatcacccacgaactgaaaacccccatcgccgtagcatatgccgccaacgacgctctgctcaacttcaaccaagcggaggaaaagacccaacgcgacaaatacctgcgtatctgccaggaacagcttcagcgcctcagtggactggttgaacagatactttccatgagtatggaacgccgcaggactttccgcctgcacccggaggagtttgcaatacgtgatattctggaaacactcatcgaacaacacaagctgaaagcggaaagctccgtccacatatcggtggacatcgaaccggaagatttgagcgtacttgccgaccgcacgcatttcagcaacatcatcagcaacctgatagacaacgccatcaaatattcgcacggagaggccgaagtggccatccattgccgcaaggtaaccgtcgaagggcagaatgaacagaccgaaatctccgtcagcgaccacggtatcggtattgctcccgagaagcagaagcacatcttcgacaaattctaccgcgtacccacgggtaatctgcacgatgtgaaaggctatgggctgggattgttctatgtgaagaccatgatagagaagcatggtggcagcgtatcggtaaagagtgagttgggaaaaggaagtacctttacgataaggatatgataacattatttgttagggtactttacattacttgttaaggagctttacattacttgtaacaaaagcgacaattatggaaaagataaccgtacttctggttgaggacgaacagaccctcgccatgattatcaaggacacattggaagggcagaacttcatcatccacaccgcagcagacggtgaagagggattgcgcaagttctttgacctccgtcccgacgtgctggtggcagacgtgatgatgccccgcatggacggctttgagatggtgcgccgcatccggcagaccgacaaacagaccccggtactattccttaccgcccgttccgccatcaacgatgtggtggaagggtttgagctgggtgccaacgactacctgaaaaagcctttcggaatgcaggaactcattatccgcataaaggccctggtaggcaaagctttctcctttacagaagaaaatcccaaggaaactaccgtttttgaaatcggtgactaccgtttcaattccgtcactcaacgacttgcttttgcaggcagcaccccgacttcacctgacgcggatacggaagtggaactctcccaccgcgagtccgaaatactgaaacgcctttgcgagaaccgcaaccaggtggtcaacacccagaacgtattgctcgacctctggggagacgacagcttcttcaactcccgcagcctgcatgtgttcatcaccaaactgcggcataaactggccggagacgagcgcatccgtatcgtcaatgtgcggggaataggatataaactaatagtgaactaaactaaaactaaactactatttatgagaaagttattattcattacttttatctgttcctcactctgcgcctatgcacagagcgagattccggaagacacaataaagaaccggcctcccgtaaagaaagagcagattcccttttctccaaaagagaacaagcgtacgggccttgatgaaagccagccccaacaaagtctgcagggcgaacagcaggaagagataaatctccatctccctccctccgactatgtggagcccctgccctggacggacatgaagaagatacactttcagaagaacatctttgaatgggacttccagcgtttcgccgatttcctgctctcgccggaagtcgtactgacgatgtacggcagccataacacctatcctgcaatgggctccatcatgcaggctggcgcaggagtcacttattacagtcccgacggacattgggaactgagcggcggagtgtatgccgcccactattccatctcccaaccttcatccattacaggtgcccagtatgccaaaagggatgccccccgaggtactcaatgggacataggctacaatgcctccgtatcctaccgcatcaatccctacatgcgcctgcatgccttcggccagtattcgggctacgggagaagcaactcctttcatggatatatgaacccgatgtatccgcaaagcggttatggcatggtactggaactgaaagtgacggactggctcgacctcaacggagggatggaacgaagatacgaccccaccaaaatgaaatgggtaaattcgcccatcttcgcccctaccattcgtataaagaaatagaaataatacaaagatatttccagaaatagagggaaacgagtatctttgttcagtctgcccctatgcggcagacagcaactgaaattgtgaacaaagaactatgaaacgaatcttcttctgcatcatcattttacttgcaggcatgtcatccgtcagcgcacagaacgggatgcctgccgatacggtacgtactgcagtacgtggcgaagcgtctcccgaaggcatgtctccgtctgaaaaggagcttctgccggacgtgaagaattacgacggcttcctgctggatatggggctgatgaatctgtccacccccactcttcccaaattcactttggagataccggatgccagcaaagactatagccgcatcttccagttgaacccgaacgtgacttattcacaaggtctttcgaacatattctcactcagcaactcccggtatttcagttcgaatcccttcggactgacgggcttctggggctctaccgacaacctgcaaatgggaagtttcactttgaagaacggcatgcgcatccatacgtacggcgaatatgacaaggacggctggaaagtacccaacccttccgcactgccttgggaaaagaacaatttcaaaggggcgttcgagctgaaatcagccaacggagcctttggcatacgcatcgaggtacagcagggcagacacgtgccctattgatgcccatcacttaacaacagaatcaatgacaagaaagaaaatactggtaataggcgccaacggttttaccggcagacgcatcctggatgatttgtcccgcaacttgtcttaccagacaacgggctgttccctgcacgacgacatctgtccccattcgggcgactatcgctttatccgtacggatatatgcgaccgccaggcggtggaaaagcttttccatgaagtacagccggatgttgtaatcaatacctccgccctctccgtccccgattattgcgaaacgcaccatgcagaagcggatgccgtcaacatcactgccgtagagcatctggcagaatgctgtgaggcgggaggcagccgttttatccatctttccactgacttcgttttcggtggtgatacggaccgaccctatacggaggagaatattcccgctcccgttaattattacggctacaccaaactggaaggtgagaaacgtatcgccgccgtttgcagggattatgccatcgtgcgtgtagtggtagtgtacggtgccgccctgcccggacagcatggcaatgtgctccaactggtggcaaacagattaaggagcaatgaggaaatgttcgtcgtatccgaccaatggcgtacgcccaccttcgtgggagacgtgtcgcaaggagtggagaagctgataagtcatccgcaaaacggtatctatcatctctgtggcagcgagtgcctgaccattgcagacatcgcttatcgggtagcggacgtattggggctgaatcgctcgctcatccgtcccgtcactacgaaggagatgaatgaaaagacgccacgtccccgtttcagcgggctgagtatagaaaaggcaagccgggaactggggtatcagccgcacacgctggaagaaggaataaagcagatgttcggatggtaaataatgcaggtgcggatggcagcagattcgactacagcaactccggctctgccagtcctttctctttgcgatacacacgtaccatctccagaatcacatctccatatttctccacccctttttttccgaaatacggaatgcgtacaagcatggccttatccgaaggaagcagattgcagatgcctagaattgccttctgctgaatgacggtgtatacgggcagccctaatgcggaagcttctgcattgcgccatgctaccaagcggttgtaaagttccggatgcagcacatccgtgggtacttcaacagccgcagcatcgcgtttccgctcacgcggacgtttctctttatcagcctgcttactgcttccctgcccttctttggcagaagcacttctccctttgcctttacccttctgcgaagccgaatcatcaatggaaagcagtgctttctgcttcaagtatcctgccatatggaaaccattctccagcacataatccagcaaatcagtcttcatgtcaaacacttcctccagctcctccatggcatcccggagcttcttcttcaactctttattatcagaagttaccgtactcgccatcaccgcatccagcggttgcaactgctcttgaaaataagtggcggcagagtgtatgcgcccctgcaaagtcgggtcggctgcatagtcctgcgcagtatcaatcaggcgggtatactggatactgaacttctgggctactttcgtcactttgtcgtgaaaacgttccatttcctccttacaggctgcgagttgcttgggaaagagcttgtacaagtgttcgtctatcagccgcacataccgccgcaaagcctgctccatgggctggaaatcgaacaagcccgacagcagttccaggaaataggtctgctgcaaggaacggaagcgtttctcgtccggctcgtttctccgtgcctccatcgtgaaggtatctactgcatggtcactgataacggcctttgcagaaagcggggcactgagcaccactccctccaatgtcttgcagcggctcagagccacataggtctgcccatgcgcaaaggaggcactggcatcaatcacggcacgttcaaacgtcagtccctggcttttgtgaatggtaatcgcccacgccagcttcagcggatattgccggaatgttccttcaatatcttctgtaatctccttggtttcctcatcaagcacgtatttggcattcgtccactcttcctcctgaagtaagaaggtagcgtcgcttcccttactgcgcacttcaattccatctgccgacacggctgtcacctctccaatcatgccattgtagtaacggtgctcaccggaggtgtcgttcttcacaaacattacctgggcaccgcgtttcagttccagtacttcatccgtgggataggaatattcgggaaactttccgtcaatcttggcacgaaaggcatacgagcgtcccggaagttgttccagctcatggtcattaatccgttgggcctgataattgtgggtcaccaggcggatgtatccttcttctttatctggtacgaaattgggaatataccggcggttcaaggcttccagcacttgcccgtcacaacggttttcgcgaatgcggttcagtaattcaagaaaagtcccatcgttctgccgatagactttctttagttctatagtgcagtattccgtctgcttcaaggcctggctggagaagaaataaggcgtgtcatagtatttgcgcagcatctgccactcatcgtctttcactacgggagacagctgctgtaagtcgccaatcatcagcagttgcacgccgccaaagggtttgttccggtcgcggaaccgcctcaagacggcatccaccgaatcgagcaagtcggcacggaccatactgatttcatcgatgaccaataaatctatgctgcgtataatgttgattttctctttcccgtaacgaaaacggtaggttgccttgccatctgcgctgaatgagctttcgggcacataaggagcgaaaggtacttggaaaaaagagtggatggtgacaccgcctgcattgatagcggcaattcccgtcggtgcaagtacaatcatccgtttcggactctctgccctcagttttcgcaggaaagttgtcttaccggtacctgccttgccggtcaaaaaaagatgagtgcctgtgttttcaatgaattgccatgcaagcgctatttcgggattattctccat

SEQ ID NO: 758 - DNA, 27300 bp, unidentified
  source 1..27300: mol_type = unassigned DNA
atgaaactctttatttatgaactgaaaaagatacttaataaaaaaatattttttgttgttttattgctctgccttgcaatcaacggctttttattatattcatcgcaaaataccgaagaaaacagcattagaatcacttattccaatgagtatactaaaatgctcaatagttattcttcaatgtctttgaatgacgctgaaaagcaaattgacaatgaactgcttgcatatgaaatttttagtagacttgaaaatcttgcacagactgataacgaggaacttattgaaaattacacatatgaacttgatgagtatcgaaagagtaatccggatgcgtatcaaaaggctgttgaaatgagtgaaaaaggcggagataacttttggaaaaacagttttctctataatatttcacagcagattgagtatataaattcctatccggattttattgacaaaatgtatgacagggcaaaggcgcagtcgtcctcttcaatttttggcgatgaaagttctttttcatataaaaatctttacaaaacatccaacgattattcaggattaaaaaacaccaagctaagccttgtaaattctgatgcttttattgcaacaacagaatacagcttaaccgatatttttataatcgccattgtgtttttgctttgcgtttatctttttcaatatgagcgtgaaaaaggactgtattcgttggtacgatgtacaaaattcggcagattcaaaactataatttcaaaattcatgttgttttttgtactgtcagctgttgtatcaatattattcattttttgcaattttatcataaacactttcctgtatggcagtaccgatttaagcgtaaatattcaatcaatttccgagtttcgcaactgtacccttacagttacagcaggtcaatttttgattttgtttgcatttgcaaaaataatggggacttttgttatttcatcgtttttggctcttgtatttattatcttttcaagttctgcaacgatgtatcttacagggctcgtaataattggtgcagagtatttgctctataccttgattggacagaactcttttttgaaccttttaaagtacattaatattttctatattcttgacggcggggaattttttggaagttatctgaatcttaatattttttcaaatgcagtaacttcgattccgattgcatttgccgtttttggtacagtatttcttttgtgtacggtgttttcctgcatattattttgcaaacgcaatcaacagaagactgccggcattttttcaagactgcttgaaaagtttaaatcaagattttttacattaaacggcagtaccggcgtttttaaaggcgaagtttttaaatttactattcaaaataaaatggctgttatgattgttttgtttgtgctttttgcaattatttcatcgttcggaacggttcgttacccttattcagaaaattcggatgctgactacaaagcgtatatggaatatcttgagggtgacataacttcggaaaaggaaaactatattttgaaacagcaaaattattttaacaacttgcaacaacgcatgggcgaaattgctgaaaatagtgagctttccgaaaatgcaaaacaggctatgtccaagtcgattgaaaatattttaaacagcaaagggattgcatttgaaagagtaatcgaacaatacaatcgactccttgaactagataaaaagggcatagatgcaaaatttattgatgaaaacatctataaaagttttgtttcaagtaaaacaagggaatggaacgattttgctttgctttgccttgttcttgtgataggtgttccttatgtattttcacccgagtataaaaatggtatgatcaaccttattcgtactactgaaaacggtaaaacaaaactgttttttggaaaaatagtagtggagtgtatatatttgttaatagcatttacagctctgtatgtgccgtattttgtaagatttataaatacatacggtgcgaacagtttgaatacacccttagtatgtatttttgaaaatgttcaagaaacatcttttagtgtgataaatgcggtagttgtcaatctcatttgttactttttgcttgcaacagcagtaacatttgttattacagcagtttcaatttttacccgtagcagtatgtttacaatggtggtttcaactgttttagttatattaccattgcttgctttgtattcgattgaaaatgtaagaataggttattgggttgtaaattcccatattatagctatcgttatgacttgcttgctgagtatcttaattgcaattgtcacacttgaaatttctaaattaaaatttaccgaaacaagaatatggaggcgaataaatgccaaagcttgagattaaaggtattacaaaagtctataaaaaaggagcggtaaaggcgcttgataatttcagcgttaccttaactccgggagtatacggcttgctcggaccgaacggagcaggcaagtccacgctgatgaacattatcaccgacaacctcaatgccgacggcggagaggtggtttacggcggtgaaaatatcaaaaagctcggcaaggattaccgagccgtactcggctatatgccccaacagcagggcttgtatgatgatttcaccctcaaccgctttttgtggtatatggcggctttaaagggcttaaaaaagaaagaagccaaggaaaagatcactcagcttcttgaaacggttaatctgacagatgccgcacataaaaagttaggctcgttttcgggcggtatgaagcagagagccttgattgctcaagcgcttctgaacaatcccgaaatcctgattttggacgaacccacggcaggacttgacccgaaggagagaatacgcatacgcaacttcatcagcgagattgccgaggataaaattgtcctaatctccacccatgttgtgtcggatattgagtttatcgcaaaggagattattttgcttaaaaaaggtcagctcatctcccacgattccccgaataagttgacaaaggagcttgaaaataaagtctttgaggtcgaaattcaaagggaagatttaaaatattttcaagacaattaccgtgtttcaaatctctgtcacaacgacaacagcataatagtccgcatcgtgaccgataacccgccgacagactgccaatacacaaccgcaaaaccaactcttgaagatttgtacctctatatttttgaacaaggaatgtgatattaaaattattgccgacaagtaatggcgttctatgctaatacttgtcggtatttttatgcactttttacataaaatcggaatggtataacggaatgtaaatacaaaaatgctcatatgccgatagtgtggataggctttgcaatatttatgttgctatgaaaaggctttacaacacagcttgtatcaatatggtttgttctcggctcggtttatgtttacggatttaagcgatattgatgaaacagctcaggcaaaggtcggtgccgaaatatggacagtaaagtccgacaaagcaccgcattcaaaaggaacaaaaagcaaggcaactgtacttacattactttctctcagaaaagcctttatgtgtttatagtgataattactaatttcttgatatcttagtgtacaataataaattagtcacacaaactttgtcaatagtggaaaaaagtaaaatattgttgttgaaataaattggatattggtttataatagtaatcaataatgcagaaaacgaattaatatgtaaaacggaggtagttctatggaagaaaaggacgaaattgttatttcattgtcagatgtatggaatattattaagaaaaatgcagcttttattatcgtagttacgcttatttgtgctatcggaagcttttttataacaagatattttattccaaaattatacacatcttcaattcagttatatgttgatacgtcaaatgatgatgaaaataaaaacaacctcaatatactttctgagcaaacctatgcacagaatcttgttgctacatatattaaaatgctgaacacaaatactttttacacagagctttccgagcatataaacaacaaatataccgctaaacagcttagcgaaatggtttctttcagcagtgacgaaaagacggagatatttgacgctaaggttactacttcttctccaaatgattcaaagcttatagctgatgcggttggaaaggttgcacctgaggctatttcaagacttaaatccaaagcaacgctaaagatagttgattatgctcaactgcctactgctccttcatctccgaatgaaataaagaacataataattgcaatgatagcaggacttgttatatctgtcggaatttcattgctcagagcgttccttgataaaaagatgagatacaacgaggaaatgactatgattggagatattccgattcttgcagctattccaaaatttgacgcagtaaataaatctaacaaaaaaaaagataagagggagtcagtatgaaaaaatatccaaaaagaggctcttttcaagatgtaaaactcaatgcagaagctgtcggctttcagattaaagagtcttataaaaaagcaagaacaaatattgcttattcaattgtaaaaaaaggctgtaaaatggtgtctattacaagctcttcaaaatccgaaggaaagactattactgcagttaatatagctattgcacttgcacagcaggttgataccagggtactgattattgattgtgatttgagaagacctcgaattcaatcggtgcttgaaatacctgttgacaagggaattacaaattacctcaattttgaatgtgaggtatctgatatagtttacacttctaaattggacaatcttgacgctatctgttgcggtactattcctccgaacccgtcggagcttttatcaagtgacaatatgaaagaattaatcaaagagctttcaaaacaatatgattatattatatttgatactacgccaattggcgtagtaattgacgctttacctataataaagcaaactgacggtgttgttgttatagtcagagataatgttactgacatcagggactacaaaaaaacaattgatattctcaaacgctccgaagctaatattatcggtgttatatttaatgatgttgagcctgtcggtaaacgcaaatacggcggaggatacaaatacggttactacggcgaatacggctattaatttttttgctagaggggtgtagttttggcgaaaagaatatatgcaaatgaaagaaaaaacaatattttcgaaaaaaaggttatgcctgaaaataatatttattatgcaaccttaaaaacaagacgcggttaccggtggctaagaagatttcaggatattttattctctctgatagctattattgttctttctcccgttatgctgattacagttatttctatcattattgatgatcccaaaggaggtcctgttttttcgcagataagagtgggaaaaaacggtaaagagtttaaaatgtataaatttcgctcaatggttgttgatgcggaagacaggcttaaggaactgctggaagaaaatgaaatggatggacctgtttttaaaattgccgatgatccgagaattacaagagtcggaaaatttataagaaaaacaagtattgatgagcttccacagctttttaatattctaaaaggagatatgagcattgtgggacctcgtccagctttgcccagagaggttgagcaatattctgcttatcaagcccagcgattgtttattacaccgggtcttacgtgttattggcaaattcagccaaacagaaatgacatttcttttgatgaatgggtcgagatggatatacagtatatccgtgaacgcagttttctcgtggactggaaaatcatatttaaaacaattatcgcagttcttactaaacaaggaagatgatttggaaggtacatatgaaaggcataattttagcaggcgggtcgggtatccgactttatccgccatgtggcaggtaagccgacaaagtgatattaccgattttgaagaagttgtaaaaccggattgaatgatatatacagttttaacaagattcatacactgacagtgttcgattcaacaatccaacacttagaaaaaacatcattgcagggtatatggggttcgattatataaagcaacacttcggttactgaggaatagatgcgagcgtacttaactgatattttatggagtagaaaacaagggcaatatgattgtcggggtaattggatacgacagcataagaaaacatttagccgcgtgcggttattacacagctgaaattagagagaaatactatctgcaatagctgatgtgtacatagaaaattagaggatatgcccgatgagggtcggaggagtaaataacatgaagaattacaaaatcgccgttgcgggcactggttatgtgggcttgtcaattgccacactgctttctcagcatcatcaggtaactgcagttgatattgttccagagaaggttgagatgatcaacaatcacaagtccccaattcaagatgattatattgaaaagtaccttgcagagaagaaactaaatttgaccgcaacacttgatgcaaaggttgcatactctgatgctgactttgttgtaattgcgacccctacaaactacgatagccacactcagcactttgacacatctgcagttgaagttgtgatcaagctggttatgaaatataatccgaacgccatcatggtcatcaaatctactattcctgtgggatataccgcaagtgtgcgtgagaagtttggcagcaagaacatcatcttcagcccggagtttttgcgtgagtccaaggctctgtatgacaacctgtatccgagccgtatcattgttggcactgatctgaacgatgagcgattggtagaggcggcacacgagttcgctggtctgctgcaagaaggtgctatcagggagaacatcgacactctgttcatgggcttcaccgaggcagaggctgttaaactgttcgccaatacatatctggccctgcgcgtggcttacttcaacgaactggacacctatgcagagagcaaagggctgaatacccagcagattatcgatggtgtctgtcttgatccgcgtatcggtagtcattacaataacccgtcctttggttatggcggctactgcctgcccaaggacaccaagcagctgctggcgaactacgctgatgtgccggagaacctgattgaagctatcgttgagagcaatagaactcgtaaagacttcattgctgatcgtgtcctgaagctggctggctactacggctatgacgatgacaacgaatacgatgagaagcaggaaaagtctgtgaccatcggcgtgtatcgtctgaccatgaagagcaatagcgataacttccgccagagctccattcagggcgtcatgaagcgcattaaggcaaagggcgcaactgtgatcatctatgagccaactctgaaagatggtgagactttctttggatcagtagtggttaatgatctggctaagttcaaggaaatgagccatgccatcatcgcaaatcgctatgacaagtgcttggatgatgtgaaagagaaagtttatacgagagatattttcctgagagattaaatgagaaatagagggagggaacggttatgaaaggtattattttggcaggaggttcaggcacacgtctgtacccattaacaaaggtaacatctaaacagctgttgccgatatatgataagccgatgatttattatcccatgtcggtgcttatgaatgcgggaatccgtgatattcttatcatatcgactccgcaggatacaccgagatttgaagatttgcttggtgatggtcatcagtttggcgttaatcttacatatgccgttcagccgagtcctgacggacttgctcaggcattcataatcggagctgattttatcggtgatgacgatgtcgcaatggtactcggcgataatatttttgccggtcacggtcttaacgagagattaaagtctgccgttgaaaatgcaaaaaatggcaatggcgctactgttttcgggtattatgttgatgaccccgaaagatttggcatcgttgaatttgacaagaacggcaaggctgtttctattgaagaaaagcctgaaaagccgaagtcaaattactgtgtaacgggcttgtacttctatgataacatggttgttgagtatgctaaaaacctaactccttccgcaagaggcgagcttgaaataaccgacctcaacagaatttatcttgaaaataatgcgttgaatgttgaacttctcggacagggcttcacttggcttgacacaggtacgcacgaaagtcttgttgacgctacaaattttgtaaaaacagtggaaacacatcagcacagaaaaattgcctgccttgaggaaatcgcatatctcaacggctggatatccaaagaggatgtacttgaggtttatgaagtgctgaaaaagaatcagtacggtcagtatctgaaagacgtactggacggaaagtacatagactatctttattaagaggggaaaacaatatgaaaaaatatctgattactggttgcgccggatttattggttcaaattttgtttactatatgctgaagaagtatgaggatattctcctcgttaaccttgataagttgacttatgcaggaaatcttgaaaatctgaaggacgtggagggcgatacacgtcatattttcgtgcagggagatatctgcgacaaggagcttgttgtaggactgtttgaaaaatatgattttgactatgtgattaattttgctgcagaatctcacgttgaccgctctattgcaaatccggaaatctttgttcagacaaacgttatgggcaccgtaaatctgcttcagagagcaaaggaagcgtggtataacgcagaaacaaagatatggaaagatggcaaaaagtatattcaggtttcaaccgatgaggtttacggcgcactcggtgcagagggatattttatggaaaccactccgctttcaccccacagtccgtattcttcctctaaagcaagtgccgaccattttgttatggcattccacgatacatacggtatgccgataaatattacacgctgttcaaacaactacggtccgtatcagttccccgagaagctgattccgctgatgattaataatgtgaagcatcataagcagctccctgtttacggcgacggtatgcagattcgtgactggctgtatgttgaggatcattgtaaggctattgatatggttgcaaacgatggaaaaatcggtgaggtttacaacgtcggaggtcataacgagcgtccgaatatctttattgtaaagactatcattgagcagcttcacgacagattgcaggacgagggaatttctgaggagcttatcaagcacgttgaggacagattaggtcacgacagaagatacggtattgatccgacaaaaattaagaatgacctcggctggtatcccgaaactccgtttgaaaagggaatcgttctgactattgattggtatcttgcaaatgaagaatggatgaacaatgtcaccagtggcaattatcagaaatactacgaagaaatgtataagaataagtaagagggcagacagatgaagttttttgtaacaggtgtcagcggacagcttggacatgacgttatgaatgagcttgcaaagcgtggttatgatggagtaggctctgatattcagcctgaatattgcggagtggttgacggttctgctataaccgatatgccttatgttcagttggatattaccgataaagaggcagttaaaaaagtaattactgaaataaagcctgatgcagttattcattgcgcagcttggactgccgtggatatggcagaagatgacgacaaggttgaaaaagtccgtgctgtcaatgccggcggaacgcagaatattgcagatgtctgcaaagaaattgactgtaaaatgctctatctgtccacagattatgtgtttgacggacagggaacacagccgtggcagcctgactgcaaggattataagccgctgaatgtttacggtcagactaagcttgaaggcgagctggctgtaagcagaacacttgaaaaatactttattgtccgtatagcatgggtgtttggtcttaatggtaagaatttcatcaagactatgattaatgtgggaaaaacacacgatgaagtgcgtgtagttaatgaccagataggtacaccgacctatacatttgatcttgcaagattgctggttgatatgtgtgagacagaaaaatacggctattatcacgcaacaaacgagggcggatatatttcttggcacgacttctgcgttgaattttacaggcagtatggattaaaaacaaaggttactcctgtgactacggaagaatacggactcagcaaggctgcccgtcctttcaacagccgattagataagagcaagctcgttgagaacggctttactcctctcccgacgtggcaggatgctgtaagcagatatttaaaagaagcacagctttaaggagatatataatatgggacagattaaggttgaaaaaaatgtagcaggaattgagggactttgcgtaattacccctgccgttcacggcgacagccgcggttattttatggaaacctacagtcagcgtgatatggaagaaaacggtattgacatcgtttttgttcaggataatcagagtatgagcacaaagggcgttcttcgcggactgcattttcagaagaactttcctcagacgaaattggtccgtgtaatcaaaggttctgtttttgacgtggcagttgacctccgttcaggaagtgaaacctatggcaagtggtacggcattgagctgacggaagaaaacaaaatgcagtttttaattccgagaggatttgcacacggctttcttgtattgagcgataccgcagagttttgttataaatgtgatgacttctatcatcccaacgacgagggtggaatggcttggaatgaccctgaaataggcattgagtggcctatgcttgagggtgagtataaaggcaatgcagattcagagggatacactgttgacggcacacctcttaatctttcagataaagataaaaagtggcttggattgaaagatacatttaagttttaattagtttcaggtgaatttcaattatgcagactaaaatcagggtattacatattgcacaggccgcaggcggtgttgacagatatttgcgatcacttttgaagtattttgatcgtgaaaaatttgaaaacatacttttatgctcatattattttaaaaaagatgattatgatgaaataaccgatgacttcattcagattaatatgcagcgtgaaatcagtgccaagcacgacctttcttccgtcagacaggtaagaaaagttattaaatcacttaaacccgatgttgtttatatgcattcaagtaaggcaggtgctatcggaagaatagctgaccttggaattagtaatatcagaatttacaatccgcatggttgggcattcaatatggattgcggtaaaaaaaagcaggcaatgtatcgcattattgaaaagatgcttgctctgtttaccacgcaatttgtttgtatttcagaggcagaaaaagaatcggctgttcagaataaaattgcacacactgaaaagtttaatgttattctgaacggaatagacattgaaaattgcaacaaacagcttaataacggaatttcaagagaaaaaatcggaataccggaggatgcctttgtaataggacaggttggcagaatttcaaagcaaaaatcccccgatgtatttatcagagccgccgtaaaaatcaaagatgctataccaaatgcgtactttgtacttgtcggcgacggtgatatgaaagacgaaattttgcagtatgccaaagaaaacggtattgataattcgctgaaaattacaggctgggttgaaaatcctcttagctacgcaactgtatttgatgtagctgcacttctctcacgctgggagggatttggccttgtgctacctgagtatatgcttgcacaaaagccgattgtagcgtgtgaaacgggcgctattccgactttgattgacaacagagtaaacgcggtctgcttgtaccggttgagtcgccacaggctgtttgtgatgctgttacggagctttataataattctcagctcagaacacagcttattgaaaacggggaaaaagcagtatatgaaaaattcgacgcacagcgagtatcggacgagcataagacgatgattaaaaacatactcggaggaaacaatggctgataaaaaaattgctataatgacttggctgtataacggcaattacggtacattattacaagcatatgcattgcatagttttgtaaaaaatgaaggctatgaggttgaaaacattaattacagaagctcattgaaaacaaagttgaaaaactggtttgtaaacagaaattcgcctgctctttttgttggtaaattcaaggaaaagttctccaaaaaagactctgttgcaaacgaaaaaaggaatgagaatttttctgattttttaaactcaaatattaagcttaccgagcttgcctcatcgcccgaggagcttgtaaagttcggcaatagttttgatgtctttgtctgcggaagtgatcagatctggtcgccgtatctgatgaatccgccctatttcttttcttttgttcccgataataagcctaaaattgcatatgcgccaagttttggcgtgacttccgcttcggccaaaaaagaaaagatgatatgtgactttgtaaaaagatttgattatgtatctgtcagggagaaacagggaagtgattttctcaaaaaaatcacaggcaaagagtattcggtgatggttgacccgacaatgcttctggaaagaaaagattgggaaaaatgtatcggtgagcgtattgaaaaagaaaaatacattttttgctatatgcttacctacaatgcaaaatatgtcaacgcagtaaaagaatatgcagataaaaacaagctaaaagttattctgattaaaaatgatacaggctttgagaatacaggctttacagtcgttgaggacgcaggtccgcaacagtggcttaattatattaagtttgcggagaatgtatttactgattcttttcatggcgcaattttttctgttatatttcataaggagcttgtacttttcaaaagattttgcgataaaagcggagcttctcagaattcgagaatctacactctgaccgaaatgcttgatattaaggacagaattgcagatgaaagctcacttgaaaagataggaaatatgaagacaatagattttgaaaaaacagactgtataatgcagactaattcaaagaaatcggcagactggctgctgaacgctttggaaaaggcttgcagtaaatgattatgaggtaaaatatgattaattctgtattggaaattactgaaaaaagctgttgcggctgtggttcgtgctttcagagctgtccaaaacattgtattaccatgcaggaaaatgaaagaggtttcttactgcctgaagtcgatgagtcattatgtgtgaattgcggattatgtgttcgctcttgtcccgaaattgaacagccaaaaccgtattcagtaaaaaaagcttatgccgctgtcgcaagaaatatgccaatgctcaaaaagagcacttccggcggaatctttggtgtaatgtcacttgctattttaaatcagggtggagttgtttacggctgtgcatggggcgataattttaaagctgaacatataagaataacggcagcagatgatttgtatttaattcagcagtcaaagtatttgcagtctgacacagccaatacttttgtgcaggtgaaaaatgatttacttaataacataatggttctttacagtggaacagcctgtcaaattgcaggattaaggaaatttttaaaacaagaatgtgataatttgttaacagttgaggttgcctgtcacggtgttccgtcacctggtcttttcagaaaatacattgattggattgaaaagaataccggaaaaaaagtgtctgattatcaattcagaaataaggaaaagcacaagaaaggcgaacattacaagtattgcgttacttttgccgatgagagtaaaaaatacggtttttcaaaagaggacgcttattacggttcattccttgaaggacgcacacttcgttgtacttgctataattgtaaatataaaaataatgaacgtatagctgatattatgctcagcgactattgggggattgagagagagcataaggatttccctgcgcaaaacggtgcatcagccgttgttttgtgcagtgatgccgcaatagatttatttagttctattaaagattcattgatttttaaagattcatcttttgaacagattacaaaacataatcatagtcttgttcaaagctcattagttgacgaaaatttaagaattaaaacaataaatatcgactcaaatgacctttttacatctttaaaacctaaatttgatattaaggtcagagttaagaatttagttccggaaaaattaaagtactttatgaaaacactgagatagttgggataacaatgataaaaaccgtagttttagtatatgatcaggcgtttatttctggcggagctgcaaaggtagctataaaatccgctgttgccttaaaaaacaggggatacagagtaatattttttgcgtgtcttgatccgatagacaatcagcttaccgagaacaatattgaggttatttgtgtcggcggagagcatatagcaaatacaaaaagtcccaaaacaatgctcagaggtatctggaacggaattgccaaaaaaaagcttgaagatttgctgtcttttcttgatccagaaacaactgtagtacacattcacggctggacaaagtcattgtcatcgtctgtgttttctgcttgcagaaggaaaggctttaaaaccttcgtaacgctgcacgaatacttcacggtttgcccgaacggaggaatttttaactatcagaatggtaagatttgcaacaaaaatcccggaagtttcagttgtgctgtatgtaattgcgacaagcggaattatattcagaaaatatatagagatgtccgtcagtttgttcagacacgacagcttaaaaaattacagccgaatgttatttacattactaaattcagcagaaacattatcgaaaaaaatcttaaattcaggcataaaagcttttttatagaaaataatgtagaaatatttgacagagtaaaggttgagcctgctgaaaacagcgattacctgtttgtcggcagaatgtcaaaggaaaagggagcagatcttttctgcgaggctgtgacaaaatcaggcgtaaaaggagttgcaataggctcaggcacaatgtatgaggaactcaaagagaagtacccgaacatcacttttacaggttggcttaactctgagaaaatgaaagaatatatcagcaaggcaagatgtcttgttatttcttctaaatggtatgaaaccatgggacttacgattcttgagatgcaggtaaagggtattccctgcattgttcctgacagatgtgcaggaattgaatatataaaggataaggtaacgggtgttgaatacaaaatcggcgatgtaagctcgctgattgacgcaattaattatacccaaaataacgatataatttcaaaactcagcgataatttttataacgaagattttaaagacagattcagcattgaaactcacaccgaaaatcttattaaagcgtacaatcaataatcaacgagggtttatatgagagagtgggagagagggcttgccgtagtaattctcaattacaacggttatgaccttacaatagaaagcacaaacaatttcagaaaaatcagcagcgagttaaatatcataatagtagataactgttcaaagaacgattcacttgagaaacttaaaggtgctttttctgatgacaaaaatacacatattattgcaaatgataaaaatacgggatatgcttcaggcaataatgtcggattgagatatatttccgataatttaaaacaaataaaggctgtctgcatctcaaatcccgatatttttgtggagtcggcttctgttcttgaaaatctgtataacgctttgcttgaagatgaaagtcttgccgttgtaacagcaaagacaatctacaacggaacaataaaaaaacctaacgactgtgcctggatgcagccgacaaaaagatatatgatgttcggttcaacctgcgttaataagcttttatctcaaagtatcagatataatgaatttatcgcaaatgaaaacggtattgcatatgttcacgcagttcagggatgcttttttatggctaaaaaagccgtaatggagagcataggttattttgacgagggaacttttctttacagcgaagaagtcatccttgccaagaaaatacagaatacagggtacaaagagggtgtgcttgtgaatgagtatatccaccataaccacaaagaaaaggacaaaagcctaatcaaaaaagaaaacaaaatttttgatataaattgcttctatcactcgaaaaaatactataatgcaaagttttcaggcaagccgagaatatttacgcttatagcaaacggatttttgaatttagattacggcttgaaaagatttttgatgttgtttaagtaaaaacttatgtccaattaaatcagtaggagggaaatatggtttccgtaattattccgtcttataatcgagaaaaaacaataaaaagagcagttgaaagtgttctcaatcaaacctataaagatatagaagtgatagttgttgacgattgctcaagtgacaaaacgattgagattcttacatctataaaagataagagattcagctattataaattagataaaaattccggcgcttgcgttgcaagaaatctcggaattgaaaaagcaaaaggtgattatattgcttttcaggacagtgatgatgaatggctgcctgacaaattagaaaagcaaatgaaagcctttgacaataaagatatagatgttgttttttgcccatttaacaaggtcagcgatgaaaaaacagatatccatcctgtattacccgagggcaaagtaagcagagagacgcttctcggaaaatcctgcgtcagcactcagacgctcataggcaaaaaagaatgctttgattcaattaagtttgatcctttaatgccgagatttcaggattatgatataacaataagactttcggaaaaatataatttttattttgttaataagccgttagtaaatatgtatgttcagggtgactcaatttcaaagaacaaaacaaaattgcttaatgctgaaatacgcattttgtcaaaatatcaaaaggaagccgctgaatgtcctgcattcagatattataatataggtgctttaggagcagccaaaagagcatgcaaattcaaagcaaaacaagaatataaagaagtatataatctgcgtccgaatcttaataactggttaaaatatgtctttgtgtctgctacagactttagcaggagcaaatacaagagtaagtaatttttaatttatataagttcaggtttatcaaattatgacaaataaatacatcattataggtaccggtcaaaagaataatattctaaatgaagctttttatgaagtaatctataataaaataaaaaatgcttctttttcagatccatattcttttaataataaaataataaaaaagctatataatttcagatatagcaataagcgcagaaaaatctttcgttttataccaaattctttatggaatcgttactccgtgcttaataacattaaagttgagaatgatgaaaaattattcttactttttgttatcggcagagatgttgaaagactttatacacctaagcttttacataagatcaagcaaaagtttggcgataagatatgtacagtattaacactatttgattccattgatgttactaagtcacataatggttggggaaacattacggaatgttttaatagttacgataaggtagctacatttgatttgaatgacgctaaaaaatatggtttgatacacttttgggatccttacgcaaggagagaggaaatagctgcaattactgagcaatcagatatgttttttattggtgttgataaaggaagattaagtacattaactgatatagcgaaaaatgcaactgataaagggttagtatgtgattttaagatatttgatttaaaaacggaaaataaagaaattggtataaaaaaattacctgcattccttccttatgatcaaatgttgagttatgctatcagttcaaactgcttggtagaggttttagctgatggtcagagttcaagttcatttagatactatgaggctgttgtatataacaaaaagctattgactaataattctaatgtgaaagatatgcctttttatgatccaaaatatattcaatactttgatgatacgaatagcattgattatgattggattaaagataattcatatggtgttgattttaaatataataatgagttttcaattctcagattatttgataaacttgaatagagcgtgtggtgattgctttgaatcctgtgattgcatttgtatgtagttggttagtgtttcttgtagtagagtttaaagaaaagaaaaaagtagtatttaaatttacacgtagtgatgtttttggattaattctcatattttttaccacattttttttggcgtttaatacatttaatgctgattatgagaattatgggagaatatacgctgattatttaaatgaatctactacgggttcaaactttgtttttggattaatatgtggattaggtaatttattaaagcttgattatcaaaccttcagatgctttttaatttgctttgctgtatttagtgtgtttcatttttcaagacgatatagtaaaaatgtagcatttatgattttcttgtatatgatttcaggctttataatggatggtattcagttcagacaatttactgctatgggcgtgtatttgttgtttttaccttatcttttacaagatgattccaaaaaaggtaaaatattgtatataatcggaacgcttatagcaacaggaatacatacgctgtttgtatttttctttattttccttttagtaaaggttaaaaaggaaaatcgaataaaaatttctgttgcggttactttggctgtaatagttttattctggattttagataaagtaggtttattgataaagtacctatcttacgtaatgccggaagaaaaagtagatttatattttctcggtacacaatatcatagttctccaaaacttgtaatacaatttatcctgcttcagcaagtattgattcttgtattgttgctggtatgctataagattggaaaagtaagagagtgtgacaaagcgtttatctggtcggttataggcatagatattcttatgctgtgtatgtgtcctatactgttttataccttacaattcaggcgtattttcagagttgttatgatacccagtttcatagctatatacaagatgtcgcctgataaaaaggatgcaagatttatatttatagtgatagctttgatagctttctcacttattagtttaaatttaaatttaaccggcaattcagatttaatcggcaatttagttttaaataactatttttggtaatattttaagaggttagtatgaaaaaaaagtcagttggaattaacgcagtacttaatgtaataaaacaatgttgtgctatattatttccgattatcacgttcccgtatatttcacgtgtccttcaaaccgaaaattacggtaaggttaattttggtaattctatcattacatatgttacattatttgcagctttgggcttaactaattacgctattcgtgaaggcgcaagaattcgtaatgataaaaaagcatttcagacttttgctaatcaagtgtttactatcaactgtataacaacattgactgcatatctggtattttttttgctgattatatttgtaccgaaattgcattcgtattggctgttactgttgattcagagtattagtgtaatacttaccacgttaggcgcggattggattaactctatttacgaggattttctgtatattacaattagatatatagttgttcaaatattttctattattgcaatgtttatatttgtaagaacacctgatgattacatcgtttatgccggaattcatgtgtttgccaatgcgggtgcgaatatttcaaacttttttcatattagaaaatatactcacttgcgcctgaccagaaaaatgaatttcaaaacacatatcaagccgatgttaatgctgttttgcaattcattatcagtacaattatacataaattccgacataactcttctcggcatactgatgaatgacactgtggttggtatatacagtgcagctgttaaaatatataatattatgaaacagcttttaaatgcagttatcgttgttattattccgagggtttctgcattgcttggtgaaaataaattaaaagagtataattctctcctcgaaaaagtatttcatgctttaatcagcataataatgccgattatcgtgggaatttttatgctgagctatgaaataattgcactcattggcggagaaagctatgcaagtggacactgggcattaaggatcttaagtatagctctttgcggagctgtttttgctaatttctttaataatgcaattcttgttccgaacaaaaaagaaaaaaattttcttattgctactttaacggcagcaattgtaaatgttgtgcttaattttgcatttattccgctatggggatatgttggtgcagctataacaactgtttttgctgaatttatagtaatgttttttggtatttattattcaaagggtctttataccttcaaaatatgcataaaagatatactgtcctgtgttgtcggatgtgtatttattggatttatatgtgtattagtaaaatcctttttctccaattattttataataattggagtcagcgtattgacggcggttatttgttattccacaactctgattgttatgaaaaacagactggctacaacaattttaaatactttaaaaaagaaatttaaataatcatgattattattgaaaggttatgatattatgaaaatcgcagtaggatatgcaggatatagccaaatccttcttttatatgttcgaaaatgccggattagatattgtctgggaaaacaacatcaagaaaatggtatggaaaaaattgatgttgaatgttgcgggtaattctataacggcgctaactttagcagattacagtttttttaaaacaagctcgaaaatacaggaattgtgtgttcaggcaatgcatgagtttctcatggttgcccagtatgagaatgttgagctaatgaagaaagatattgatgatgttattgattattacattacctataaaggaagtaaaaagacatctatgcttgaagacatcatgaataacaggaaaaccgagaatgagtaccttgcaggggatttaataagacttgcagaaaagcatggtgtatcaacgccgatgataaaaactctttattatttaatcaaaatcagagaagaacaatatttagaaagataatatgaatcagacagagcttgtaaaataaagtgtgtaagttaaaaaatagcttgcacactttttcatttcgggaaagtgtgctacaatgaaagaaagggcgtaaccttcaatacggctacggatttgacggttatcaatcaagtatccatagccgtattgagtttgccaagctccttaatatctccgactttcagttcagttatatcacgaatgtcggtgcaggacaggggggttctcaaggttagcagctctcttgttccgtttgtcaataaatccccacgcaatattgagctttacaagctgatgacgagcaatgtaaaatgctgaaattgcggtgttcgcattgtattgtgagaggttggcgaaaataatcgtcttgattagtgcgaaaattcaaggaaatttcattgattattacacgaatatttgctatactgtgttcagtacctttaaggaggtgtgatatgagcaaacaaaaaaatgtacctaatcaaacttttgataatttcatcgtaagccgcagtaatgaaaaagcttattcggcttgtctcgatttggcaaacaatccccagggaaagtttgttgtgatttatggtgcaaactcattaggaaagacacatctgctatatgcggtaaataatgcacttatcagaaaaaaaacggacttgaagatttgcttaataaattacgaagacttgatttctcagtatatcaccgctcttcataaaaacgataccgatatttttcttgataggttattagagacagatctgctaatagtggacaatatgcaatttgtcgccggtaagaattacacccaagaggacattacaagttgggtcaacaaaatgatactcatgggaaaaactgtagttatgtcgtttgatagacccataaaatattaccccgctctgataaaagggacttgcgaaagcaaccctgaaaattgcaaagccatagaaataaaaaagccggactatttactaagaaaagaatatcttgatcacattctgaaagaatattcagtttcgttaccttcctttgtgaaaaaatatttagtgtatttatcccgaatgactttttcagcgatgaaaggtttcttgtgcaaattatcatttatagaaaagcaaaatggaactaaggtgtccaatttagatattaagtaatgtttgtcctcatatgttgtttggaaactcagatgacaaaagatgacgaaaaatagcaagctaaagcaacataggaacaaaatcaattgcgatctacagttcgaagattttatatatgatatagtcgatgaaaatgttattattgcaaaattagttgattgtaaaagtcgagcataaagtttctaaaatgaaaaaagattgctgtttagaacagaagcttaacaggcaacaaaatcataccgatcgaaaaatcagctgtatttaacccaaaaagccaattgtaaatatgccccttttggctattttacaatcggctgggtatttatttaattaggtgggaactttaatgttggtgaatatagtatttgattataatgcggatatagtaagtgtacctgatagtattgggataaatataaaaaaatatcgaaatcaatgcgataaatggttatttaataaattgaatgagcatgaattttgggagaaggatgactctggaaataaattaggggttggtgtttgtagtgaatcgttcatatattggttgaatgaatttgttttaaaagattctaaagagaaagcatatattgtgcgaaaaagtattaataattatgattaaagtttgcctaccatatattattgatgaacagagcatattgacaacttatgtgaactatttattcttttgtacaaaaactaatctgttgtaatttaatgcacgagtcccaatgaaaagcaaacaataaaaaaattaaaaatgtaataaaaaagataccttattttgccaaaaagattctatcaaaaattaaactcaaaaaatttgaaaatatgatagcaggagcgacgaattcagcaatattaaataaattcttaaattatataattgaaaatgttgatatagtgttatcagtaggcggagcaattttcgacattttagattatatatttgataaaagtataaataatgttatatggaaatttaaattatggtgataaaaatatcatgcaaatacataaaaaataatgcttttgatattacagttgggcaggagacacgcacaattacccacgaaaacaatcaggctgtttttaagttgagcgaatcaaaaaattacaatattgaaatttgcaaaaagtcttgcaaaagcaatcattctttcagtgatattttgattttctttttcactatgatattgcaaggcattttcaatattctattgatgaacaccgattcaaagtggtataataagttaagtccttatattattaaaactaactttaatattttcatagataaagataccgatttggaatttatttacaacgaaggatatttttattatgacaggaaaactaaaaagttacccacgataagttggatagattgcgataatatagttctcgttaaaacggaatataccatagataaggtcaatttgaccaatgcatattgtaaatatgttaagaagtttatttcttgtgcatcagtctgtgagctgatattcttattgctaatactacttgctgtttcttgcaataattttacagcagctatcatttgctgtatactttttgttttggtaataattattcaaattattgtttttaaaaaagagtttatgagattaaagaaaataggtgatgtgctttaattttagccccaaaatactttatgtattcctgtatttctgtatcttaatgtagctttttgttattttctattttaacttgctatgtaaagaaatattgactcatatgacgggagcagaacaacacaggttagaactgttcgcagtgacggtactcttgtatttaatacagactatgagtatgcagacggtaaggctgaaaattcaactactaaccttgtcagcaagtacagtcagtcatatggcggtgacagcgttttgtcatacgattattcttatgatgcaaacggtaatattaccgagattaagcaaaacggtaagcttacaaacaagtatgtttatgacagccttaacgagcttaaagaagaatacgactatgtaaataaattttacattaactattcttatgacggagcaggaaacctgcaaaataaatatgaacaggttcttgatccgacctacggttatccgacaggaacacagcatggtaatacatatgagtacaccgatacaagctggaaagataagctgacaaaggttaacggcagtaatatttcatacgatgcaaacggcaacctggtcctgtgtcaagatttagcacaaaataaaatgagaagttctgccaactaagttgctggcagagaagataccctctcaaactatttttaaaaatcattaggagacatatagtcgcagtggctgtgaatcctaacggtattataaaaggtttcaatatattcaaatacatgcctataggcatgtttgtagttaatgatatgaaatctgttaagccattctcttttgattaaggaatggaaagattcgatgcaggcattatcgtaaggataaccactatgagaatagctttgctgcatcttttcagtggcttcacgccacgcgtttgaaacatactggctgccacgatctgaatggataataagtggtaaatcagtattacgacaggcttttgccttgttgattgtttcgataactgttgatacttccatagtgtctgcaagagtccatgcaatgatttttctggcatacaagtccataacgcagttaaggtatacaaaaccatcctgcgtccagatataagttatatctgttgtatcacgcagctcacgcttaacttcatcagaagcgtaactgccggaattgataacgggaatatcaccgtcattatctctgaacggggcttcccagtgagcaagagtactgacaccgatacacaggttctttgcacattcaacctgtgtaagatcagggtgctctttgcgatagttgatagcatccaacttgaattgcttggtgtgatgagttttttgtcgtgacataatgaattcctcctcttttttattatacaacacttaaaggggatatctcattttgttttgtactatttagatgctaacactagaaagagaaattccagtactatataaaagaaaagaagaatgctgtggatgtacagcctgttatgctatttgtccgaaagaagctatttctatggtcgaggacgaagaaggctttgaatatccaaagataaatgaaaacaaatgcgtgcggcgctaccagtgcattatggtatgtccgataaaagcagcacgagcacagtaaggagaaattaatagggaacgagaactccatgtactactattatcgcatggcttatgaggttgttgtgcgcattgctctgtggatggttggtaagaaaagatgagttaatagaaaaaggtgattggtaatcaagtggtacataaaatcaataattcaagatttcggacaacccgtgtcatacttgattccagccatcttcttcagtggatgcattgtatttgctgttagctggttatgtggaaagaagagtacaataaaacatagaattccatttgcctttttcttagcgtacattctcgttatttttcgcgtagctttcttatgcagggaacctgggagtagaaaggctattagcttggtcttgtttgaaacatggggacatacctttcatatgcacgctatgtttgttgaaaacattattatgtttattccgcttggtgtactgctaccgatattgttcagaaaatttagaagtggatgggcatgtgtgctgactggatttatttgctcttgtagcattgagatattgcagcatattactcaaacaggatatttacaattggatgatgtggtgacaaatacaatgggtacgctgttgggatggtttatatggtgtgcatggaaagtgaacagaaaaatatgaacacgatgatactcaattaccgatgcattaaggtatgtccgataaaagctacacgagcataggaaggagagattatgaacacaacattacttatcatggcggccggaatcggcagccgatttggaacaggaataaaacagttggagccggtcgatgatgcaaaccatatcatcatggactattcaatccatgatgcgattgaggctggcttcaatcatgtagtatttatcatccgcaaggatatcgagaaggagttcaaagaggtcattggtgatcgtattgccgctatttgctcttctcataatgtaactgtggagtttcccatagttaaagataccacaccaaatatgatgaacccacgcttatac

SEQ ID NO: 759 - DNA, 6161 bp, unidentified
  source 1..6161: mol_type = unassigned DNA
atgcagcatgaaactgtcatcgtgctggactttggcggacagtacaatcagctgattgcccgccgcgtccgagaaaataatgtctactgcgagatctattcctataaaaccgatctttcggtcatcaaggccaagaatcccaagggcattatcttcaccggcggccccaacagcgtttatctggaggattctcccaccatcgaccccgagatcttcagctggggcgtgcctgtgctgggcatctgctacggtagccagctgatgatgcacctgctgggcggtcatgtctgccgcgctcccgagcgtgagtacggcaagaccgaggtgtttgtgaacaccgagagcaagctgttcaccgatgtgcagccttctaccatctgctggatgagccacaatgactacatcgagcaggcggctcccggctttgagatcaccgcccacactgcaaactgccctgtggcagccgttgaaaatgccgaaaagggtctgtacgccgtacagttccacccggaggtgctgcacaccgccgagggcaagaagatgctgcgcaacttcgtgtacaacgtctgcggctgctccggcgactggaagatggattcctttgtagagaacaatgtcaaggctctgcgggagcgcatcggcgagggcaaggtgctgtgcgcactgtccggcggcgtggattcctccgtgctggccgctatgctggccaaggccatcggcaagcagctgacctgcgtgttcgtggatcacggtctgctgcgtaagaacgaaaaggaagaggtctgctctgtctttggcccgggcaatgccaacggcttcgacatcaacttcatctgtgtggatgcccgcgaccgctacttcagcaagctgaagggcgtcaccgagccggagcgcaagcgcaagatcatcggcgaagagttcatccgcgtgttcgaggaagaggccaagaagatcggcaaggtggacttccttgcacagggcaccatctaccccgacgtggtggagagcggtctgggcggcgagtccaccgtcatcaagagtcaccacaacgtgggcggcctgcccgatactgtggacttcaaggaactggtggagcctctgcgcaacctgttcaaggacgaagtccgtcaggccggtcgcgagctgggtctgcccgagtatctggtcagccgtcagccgttccccggccccggtctgggcatccgcatcatcggcgaggtgacccccgagaaggtcaccattgtgcaggacgctgacgccatctggcgcgaagaaatcgccaaggccggtctggataaggagatcagccagtattacgctgcgctgaccaatatgcacagcgttggcgttatgggcgacgagcgcacctacgactacgccgttgcgctgcgcgctgtgactaccaccgacttcatgaccgcagaaagctacgatatgccgtgggatgttctgggcactgtcaccagccgcatcgtcaacgaagtcaagcacgtcaaccgcgtgttctacgattgcaccggtaagccgcctgcaacgatcgagctcgagtaatccccaatagcaccatcaccccggagggttccgttaaaacgaaacctcccggggtgttttttcttctggtacggtcaaatagactgtaacgttcaaagcatttcctgtatcagagcaaacggtaacccttttatagcagtttgcatttttaatgcccaagcaacatccgcaaactgcatatcgcaaatatgccgttttgataggcactatttttgaaaattgcgataaacgcagtattttacacaaaaaagccctaaaccccttccttctccgcccgcaggggagtataatagaatccgttgtttgcaaaataggaaaggggaagtatcaactatggaatcgaagcagaggcttttggagccgcagctcgtccaaacgggaagggcggatcagttcagccgcaaggtgttctgcgatggaatgcgggatggcgtgcccattgcgcttggctactttgcggtatcgttttcgctgggcattgcggcgcgcaaggcgggctttacgccgtttcaggggtttcttgtcagcctgctgaacaacgcctctgcaggagaatatgccgcatttgcgctgatcatggcaaacgccacctattttgaggtggcagtcatcaccctgatcgccaatgcgcggtatctgttgatgagctgtgcactggcacagcgctttgcaccggaaacgcccttctggcatcggctgctcatcggctacgatgtcacggacgagctgtttggcattaccatcgcccgcccgggcagcctgaacccgtactatacctatggagccatcctgctggcggcaccggcttgggcttccggtacggcgctgggcattatagcgggcaacctgctgccgctgcgggtggtcagtgccctgagtgtggcgctgtacggaatgtttttagccatcattatcccgccggctcgcaaagaccgggtcgttgccgtactggttatcatcagctttgcgctgagctttctgtgcagctatctgccgggcatctcggcgctctccgagggtacccgcaccattcttttaacggtggcaatctccggcgcagcagcggtgctgttcccggtcaggcaggaggaaaacgaagatgacgcataacaattatatctatattgcggtcatggcgctggtatcttatgccatccgcattctgccgctgacgctgatccgtaagcctatcaaaaatcgctttatccagtcgtttttgtactatgtgccctatgtgacgctggctgtgatgaccttcccggccatcattcaggcaacgcagagcccggcagcaggtgctgttgcattggtagtcggcattgccgccgcatggtttggcgcaagtctgtttcaggtggctgcgggctgctgtgccgtggtgttcgtgctggaattttttatctgaaatcttataacaggagaacaaaatgaaaaagatccttgtaaccggtgccggcggctttgtaggatcccgcgtgatgcagcaatgggcggggcgttacgagctgtgcgcctttcccaaaggctttttggcagcagcaggggaggatgccgtgcggcaggctgttttgcagcagcgcccggatgtcattctgcataccgcagctatttcggataccggttactgcgccgaccacccggagcaggcttaccgcgccaatgtggagctgccggtctggcttgcccgtgccgcagcggaaacagatgcaaagctggtggctttcagctcggatcaggtctatgccggtgtagagcagtccggtccactgccggaaaccattccgttacagcctgccaatgtgtatgggcagggcaagctggaaatggagcagcgggtgcaggcgctctgcccgagcgccgtgttgctgcgcgccacatggatgtacgacctgccgggctaccgactgcccatccggggcaacctgctgctgaatcttttgcgtgcggcacagcggggagaatctctccgcttttctgtccaggatttccggggcatcacctatgtccgtcaggcggtggcgctgctggagcctgccctgaccctgcccggcggggtctataacttcggcagtgagaacgctgaaaatatggtgttgaccgcccggcagtttgctgagacactggggatcacggtcgatattcaggaagccgactgggcacggaaccttgcaatggattgcagcaagctgcgggcgcagggcatcgtatttgacaccacacagaccggtcttacgcgttgtctgcgggattatggattgcgttgacctcagagaatcaaatttttccgtatcgcacaaaaaacagagaaaagcacgaaaaaagcaggggattctgtatgctgccagcccgacagggtgggacaaatcatacggaaaccctgcttttttgcttatctgccggagaaaagttcgcttataggatgcagcatttcttcatgtaaaaagtcatacttattttacatcttatctgcagtttgctataatattttcgcttttttgcaaagcatccgaaccgcataaacctttaaaaccttgaggagagtgaaatttttgaaggaagtcaagcttgaagaagcggcttatcagtttgaagccaaaatgtccctgcggcaggccattccgctgggcttgcagcacgtctgcgccatgttcgtgggcaacctgaccccgctgctgatcatcaccagcgcctgcggcattgcaggcggcgagtttgcagacctgcaggtcaccctgctgcagagcgccatgttcgtggcaggtatcgtcacgctggtgcagctgttcaccatcggacccgtgggcggcgcagtacctattatcatgggtaccagttccggctttattggcgtgttcaacagcgttgtgggcacgatgggcggcggtgtgctggcctatggcgcgattatgggcgcatccatcatcggcggtatttttgaaagcgtgctgggctttttcctgaagccgctgcgcaagttcttcccgccggtggtcaccggcacggtggtgctttccatcggcctttcgctgatttcggtaggtatcaactccttcggcggtggcaacaaggccaaggatttcggctctgtggaaaacctgctgctggcactgttcgtgctggtggtcatcttgttcttcaagcactggaccaccggtttcctcagctcctccgccatcctcatcggcattctggccggttatgcggctgctttcatcatgggtctggtgctgcccaccactggtgtgactgctgatggcgtagagttcaccaaggcatgggtgctcaactggagcaaggtggcgcaggcttcctggttcgcagtgcccaagctgatgccggtcaaggtggtatttgatgcccgtgcgatcctgccggtgctgatcatgttcatcgttaccgcagtggagaccgtgggcgatatctccggcgtgatggagggcggcatgaaccgtgagccctctgataaggagctgtccggcggcgtcatctgtgatggcctcggctctacctttgctgcactgttcggcgtgctgcccaacacctctttcagccagaacgtgggtctggtggccatgaccaaggtggtcaaccgcatggcactggcttccggcgctgtgttcctgatcctctgcggcctgatccccaagctgggcgcgctgatctccatcatgccgcaggccgttctgggcggtgctgccgttatgatgttctcttccatcgtggtcagcggcatccagctgatcacaaaggaaaagatgaccccgcgccacctgaccatcgtgtccgtggcactgggcgtgggctacggcatgggtgccaacagcggcattctggcacaggcaccgcaggctctccagctgatctgcggcgagtccggcatcgttccggccgcctttgtggcgatcctgctgaacgttctgctgcccaagaacgatatggcagagtaaaacttagttttttagccgggcaagggcttccagctgttgcaacacctgcggggtgtccgcatccagcagctccataggggctgcaatacagaccgtgcgtacctgcgcagggtactttttaagcagcacgttgccgcctttgttttccggcagggtgagcagttccgaaaaaaaactgcttccaaacagaacgggacttccgacaagcggtgccgggtcgttatcggccacggcacccagacggaagatctcccgttctgtttctttttgccattctgccggggatgtctgttcgtggcaaaagcgctctgtcatggcttctaccgtctcccggcgcagcaggggctgatccccgggcagaaacatacagccgctcagttccggcagctgctccagcagcgccgaaagccccagtcgaacggtatcgttgcggccgggcaggctgtgcagcagcaccgggacgccctgcgtcctgcacagtgcctgtacatcttccgagcgggtcaccacgatgcgggcagcgataccgggtgtggcagtggcggcaaaagcccggcagagcatgggctggccgcaaaaatccgccagcagcttgtttgtgccaaaccggcggctcagcccggaagccatgatcacacagccgaccgtaagcgacttcttcat

SEQ ID NO: 760 - DNA, 27797 bp, unidentified
  source 1..27797: mol_type = unassigned DNA
gtggttttttgtcaagccttattttttagaagcttttgaactttctgaacttggacatccaagaagtttctcagaacaaaccgtgagcttgtcggggtgagtcccctccatcttgctttcgcaagaccgctctgtttgcttgaacgccccactggggcgattcattgctttcgcaaccgcaaaacttttcagcgtctattggttcttttcaagggcttcctgctgaggctttggaagtcattcttttgcctcagcgcttggcgctcaagtataataccacacccccgcctccttgtcaacactttttgacagattttttccattcttttttgcgtgcaccccaaaacagcagcaggccgcaggaaaaactacgccgcagttgctttggtgcagcttggcacaaatgccctttctctttgcttatataatgtattataaagctttcgccgtataatattttgcgatattacacctcggaaacaggtgtgcgttgtcaagaggtcttggctcagattttatcctgaaaattatccatgaattttggctaaaactccaaaacgcaaaatgtagtggtattttccttgacttgccactagatagtgatagaatagagctacattcagtttgttggatatcgtgtgcgcaaaacgggtatctcttattgtaagaggtacccgttcacactgtgctttatttgttaaggaggagagccgatgaagatcatcaaacgcaacggtgcagaggtcccctttgatatcaccaagatcatcaccgctgttactaaggccagcgattctgtgagcggtcagagccgtctgacaaaggaccagatcacccagatcgccgctgctgttaccgaccagtgtcaggcgctgaaccgcgccgtcagcgtggaagaagtgcaggatatggtggagaaccagctcatggacatcaaggcacatgatgtggcccggcactacatcacctaccgctatgtgcagagcctgaagcgccagaccaacaccaccgatgagcgcatcctgagcctgatcgagtgccagaacgaagaggtcaagcaggagaacgccaataagaaccccaccgtgaacagcgtacagcgcgactatatggccggtgagatctccaaagatctgaccgcccgtctgctgctggacccggagatcgtcaaggcacatcaggagggtctgatccacttccacgattccgactactttgcccagcacatgcacaactgcgatctggtgaatctggaggacatgctgcagaacggcaccgtcatttccggcacctatattgaaaagcctcacagcttctccaccgcctgcaacatcgccacccagatcattgcacaggtggcatccaaccagtacggcggccagagcatcagcctgacccacctcgccccctttgtggatgtctcccgcaagaagatcgccgctgaggtagaagtggaaatggccggtctggacgtttctgccgagcgcaagaaggagatcgtagagcgccgcctgcgcagcgagatcaaccgcggtgtgcagaccatccagtatcaggtggtcacgctgatgaccaccaatggtcaggccccctttatcaccgtgttcatgtatctgggtgaggcgcgcaatccgcaggagaaggcagaccttgccatcatcatcgaggagaccatccgccagcgctatcagggcgtgaagaacgaggccggtgtgtggatcacccccgctttccccaagctgatctatgtgctggaagaggacaacatccgccccggcactccctactattatctgaccgagctggccgccaagtgcaccgcaaaacgcatggtgcccgactatatctccgagaagaaaatgctggagctcaaggtggacaaaaacggcgaaggccactgctacacctgcatgggctgccgcagcttcctgaccccctatgtggaccccgagaccggcaagcccaaatactacggtcggttcaatcagggcgttgtcaccatcaatctggtggatgtggcactctcctccaagggcaactttgagaagttctggaagatcttcgacgagcgtctggccctgtgccaccgcgcactgcaggcacggcacaagcggctgctgggcactcccagtgatgccgcacccatcctgtggcagtatggtgcgctggcccgcctgaagaagggcgaaaagatcgacaagctgctgttcggcggctactccaccatcagtctgggctatgccggtctgtatgagtgcgtgaagtatatgactggcaagagccacaccgatgccggtgcaaagccctttgctctgagcgtgatgcagcacatgaacgacaagtgcaacgcctggaaaaaggccgagaacatcgactactccctctacggcaccccgctggaatccaccacctacaagttcgccaagtgcctgcagaagcggtttggcatcgtgcccggtattaccgacaagaactatatcaccaacagctaccatgtgcatgtgtcggagcagattgatgctttcaccaagctgaagtttgaatccgacttccagcgcctgtccccgggcggtgccatcagctatgtggaagtgcccaacatgcaggacaatctggaagccgtcataagtgtgctgcagttcatctatgacaacatcatgtatgcggagctgaacaccaagtcggattactgtcaggtgtgcggctatgacggcgagatcaagatcgtggaggatgacggcaagctggtgtgggagtgccccaagtgcggcaaccgcgaccagaacaagctgaacgttgcccgccgcacctgtggctatatcggcacccagttctggaatcagggccgcacgcaggagatcaaggaccgcgtgctgcatctgtaaccctctcagtcaacgcttcgcattgacagctcccccgagagggggagctttttatatggagttttatctatgaactacgcaaccatcaaatactatgacattgccaacggcccgggggtgcgcaccagcgtgttcgtgtccggctgccgccaccactgcccggggtgcttcaacgccgtggcgtgggactttgactatggccagcccttcgacaaacccacccgcaacgaggtgtttgcatcctgccagccggactatatcgcgggcctatcgctgctgggcggcgaacccatggagccggaaaatcagcgggagctgctgcccttcgtgcgcaacttcaaggccttgtacccgaacaaaacggtatggtgctattccggctacacctgggaacagctgaccggcaaagagccaagccttgcccggtgtgaagccaccgacgagctgctgagcctgctggatgtgctggtggacggcgagttcgtgcaggcaaagcacgatatctccctgcggttccgcggcagcagcaaccagcgtctgctggatgtaaaaaagacccttgccgccggtcagcccgtgtggtgggaggacgaaaaggtgttcgccacccatactatggaaaaataaacacaacagaaaagagcgtccggttttccacttcctgaacggaacgtgtggaaaaccggacgctttctttttgttttactctctgctgcccacggcatcctcgatgatgcgcaggaaggcattgccgtagcgggcggctttcttctcgcccacaccgctgatattcagcagttcatcggtgctcagtggcttcttctccaccatttcccgcagggtggcatcgctgaacaccataaaggccgggatattctgctttccggccagccgcttgcgctgagcatagagggcattcagcagcttttcgtcaaactcgctcagctcgcctgccaccgcctttgtgcggcgcggcttctcggtcaggcggcgggcattatccgccgcgcgccgccgggaatactccacctgtagctgcgcttcctgctctgcggccagacagcaggagcagttgccgcatttctttggtgcagcttcgccgaagtaatgcagcagaaatccccgcagacagtcctgcgtggtggaataaaatgtcatgtacttgagccgctcctcggccttgcgggcagcttcggctttcacatcggcgggcaggccgttgtctgcctccatctccttttcaataaagaaccggatggtgcgcacatcggtgccggaatagagcagcgtgcaccgggcgggctgtccatcgcggcctgcacggcctgcttcctgataataactttccagatccttgggcatgttatagtggatcacgaaccgtacgttgggcttgtcgatgcccatgccgaaggcattggtggctaccatgatctgcacccggtcatagaggaaatcgtcctgattcttccgccgggtatccgcgtccagcttggcatggtaggccgcagcccggataccgcggctctgcagcaggcgggcagtctcatccacctgctttgtggtgctgcagtagacgatgcccgcgttgtcaccctctttcagcacaagatccagcagctccttcggcttctggctgggcagggcgcgccgggtctcaaaatagaggttgggccggtcaaagctggtggtcacctcgtagggcttgtgcaaggccagctgttcccggatgtcatcccgcacatgggcggtggccgtggccgtgaatgcgcccaccaccggacggctgggcaggctgtccacaaaggctttgatgcgcaggtagctgggtcggaagtcctgtccccactggctgatgcagtgggcctcgtccaccgtcaccatgctgatggtccgctcctgtgcaaaccgctggaagccgggcatttccagccgttccggtgccacatagatgatcttgtaccagccttcccgggcgcggcgcagcatcagggccttctggttatcgttcaggctgttgttcaaaaaggccgccgccacaccggcctgcaccagtgcccccacctgatccttcatcaggctgaccagcggcgacaccacgatggtgatgcccggcagcagcagcgccggcacctgatagcagatggatttgcccgcaccggtgggcatcaccgccagtacatcctgtccgtccagcagccgccggacgatgtcctcctgcccggggcggaagctgtcgtagccgaataccttttttaagatcgagtgcgggttttccatgggtccctccgtatcatagaataggtttttttctgcgcaatatcttcaaaaccatatcagtataccacaaaagccgggcttttgcgcaggtgcagagccgttttttttggcaaaaagcacgaaatgtcaaaggtaatttttttgcaaatgatagcttttcaggcgcgaaaatgatataataggagcacataactccatgtccggcgtttttttgtgcgccgactgttgatagaaaaaggagcaatcatcttatgcagcagaaactcatcacctttgccgttccgtgctacaactcggcggcatatatgcgccattgcatcgagaccctgctttctgccggagagcaggccgagatcatccttgtggacgacggttccgtgaaggacgatacccccgccatttgcgacgagtacgccgccaaatatcccaccatcgtcaaggccatccatcaggagaacggcggccacggtgagggcgtcaatcagggcatccgcaacgccaccggcctgtactataaggtagtggacagtgacgactggctggacaccgacgccctgaaaaaggttctggcccgcctgaccactctggtggcccgcggcaccgcgcctgacatgatgatctgcaactacgtgtatgagcacgtggaggacaacaccaccctgaccgtgcgctacaccaacgtgttcccccaaaaccgcctgttcaactggacccatgtgggccacttccgcccggaccagaacatcctgatgcactcggtgatgtaccgcaccgaggtgctgcgcaagtgcggcatggtgctgcccaagcacaccttctatgtggacaacatttttgtctaccagcccctgccctatgtcaagagcatgtactacatggatctggacctgtaccgctacttcatcggccgtgccgaccagagcgtgaacgagagcatcatggtcaagcgggtggatcagcagctgcgggtcacccggcacatgatcgactgtcaggatctggatgagctgaaggatcagaaacgtctgcacgcctacatggtgcactatctgtccgtgatgatggccgtgagcgacatcttcctgctgctggacggcagcgacgaggcaaaagccaagcgcaccgggctgtggcagtacctcaaggatcacgtaagcaccggtgtttaccgcgccgtgcgctacaatctgggcggtctgaccgacctgaagttccccggcggcgacaagctcactctgggcgtctaccgccagctgcgcaaggtcttcaagttcaactgattctttggaatttactccttccgtcacgtcttacgccgtgccagctccctcaaagagggagcctttggcagaatggaacacttctccttctcgccagagcctccctccgtgagaaagactcccccggccgggggaggtggcacgaaagtgccagaaggggaatgggtggcatcgcgcagcgatgacggaaggagtttcttttatttgcccgaccggagctctttgccggggctccatattccggttgctttttgtctgggcggatagtatattggacgtatatgcgttttttctggctgcgccgcgttttcccttttcgttctttcctttcgctgatcgcggcccgctgcagtgatgatatccagaagtacctcggcatcaccctgctgccgcaggccggtgtggcactgggcatggctgccacagccgcccagctctcggacggccacatggtgcgcaacgtggtgctgttctcggtgccggtgtatgagctgtcaggtcccacgctgaccaagatcgcactgactgccgctggagcgatccgtcccgagggacgcaccagcgcccgtgtggagaacaagccggaagaagttgcatgaaaggttgttttttgtcgaaatgtcacgcaatcattgacgaaccctgttattttttgtatactgagcatagcgccactggaacaattttcctattgtgtcacagactggctatcacaggaaaaggataaaggagaatggaatactatgaaaagtaccggaattgtccgcggcatcgatgcgctgggccgcatcgttctgcccaaggagctgcgcaccagtatgcatctggacactgacaccaagctggagatctttgtggatggcgactccatcgtgctcaaaaagcatcggcccgccggcagctgcgatttctgcggcgaggtggatgagtcttcggtgcagtttgcgggctactgcatctgcccggcctgccgccgcaagatcggtgcactgtaaaacacaaaaaaggaggctctgctatgagccagatgattgatttcaccgtcccgtccactgtgccggggcggactttgcatgccttccgctgtgtgccggagggtgaagtaaaggcggttctgcagctgtcccacggcatggtggaatttattgaccgctacaagccgctggcggaatatctggccgggcggggcatccttgttaccggccacgaccatttgggccacggcggctccatccgcaccaaagcggactacggctactttgccgagccggacggcaaccgcgccgttctggccgacctgcacgccatgaccgtgcgcaccaaagagctgtacccgggggtgccttattttctgctggggcacagcatgggttcgttctatgcccggcagtatttgtgcgaatacggccatgagctggacggagccatcatcatgggcaccggcttccagcccaaggcactggtgcagtttgccaaaaccctctgccgggtgctggccgctttccacggctggcagtaccgcagcaagttcgtggccaacatgtcctttatgggctacaacaaagggctggagggccgcaccacccacgactggctcaaccgcgatcaggccgaggtggacaaatatctggccgacgaacgctgcacctttacctttacgctgaacgcctactacagcatgttcagcggcatcctgcgcctgcacgacccggcgttccttgcaaaaatgcccaaagacctgccgctactgttcttggctggcgatgccgacccggtgggcgaacagggcaagggcgtgcagcgtgccatccagagcctgaaagatgccggtgtgcagaacattgaatgcaagctgtaccccggtgcccggcatgaactgctggtggaaacgaaccatcaggaagtgtttgaagatatcggcagctggctggaaaagcatcttgcctgatctgccgcatccgttttaccgtcattctgaggaatggcggtactttttgccctaatggctggcggcacttttgccagccattagggcaaaaatgcccggcactgaaagttttcccgattgctgaaaaagtccccggaaccagcgttccggggactttctgcgtttattttcagttatgctgttatgctttcttgggtgcgatccagccgtcgatcacatttaccagtgccttgccgcggcggcccagaagcttgggcagcaggacacgggccatggcccacacgcctgcaaagttgtacaggatgatcagcgccgtgatgatgccggtccacaggccgtagagcggcgtttcggccagcagcacaaaggcttcgatcaccagcgcggcggcgttcaccagcacgcggcccggatgcacctgcatcccgatcatgcggtgggcatcgatggcgcgcagggtgaacaccagcgcaaggccaaggaaggacgcataggtagcgcccacaggcccccaccacttgatgaagaagtagttcatgatgcagttgctcacagcacccgccatcatggtgatcatgctgcgggtggactttttattcaccacatacacgctgttcatgaactggttgaagcagctgcaggtggaagccagcacaaggaacggcacaaagtgccatgcgtagtagtagttggacttcataatgtgcatcaccgggcggcacagccagatgataccggctgcgcagcagaacagcacactggaataggtgcggaaaattttggtaaagaactttgcgcggccctcttcctcggtcacagcggaaagctgccatgcatcgtagaagatcaggcccagcgtagtaaggatggtgggcaggaaatagccggtggaaagcaggccgctccatgcattgccgtcgcggccgtccagaccgttgcacatctcacgcacaaagaacaggtcggatgcgttgatgatccagaagctgatctgtgccgggatcatgggcagcgagaagcgcagcatctgcttccacagatccttgttgatgcccttcagctccacgtagttccacagcttgccggtgaacatcaggaacagcacactggtaaggtcgccgctgatgatggccagcaggtagccgttggcaccccacttgaagcccaccagatacagcacgtagaaagccatggtggccacggtgcacagcacgccgtccacggccaccagcttgttccactggcggctgcgcacgaactgagtgcacagggtgcgcaggcagctcatgagcacatagatgtaaatgagcaggccgtactgtgccatatcgggcaggaactgcgcaatgggccagcacagcaccagaatgccaaagccgcccagaatggtcagcaggccgttggtgaacacctgtttttcgctgttgcccttgtccagaccaaagcggatgatggcgttggacatgcccatggacacgaacgggatgagcaggttcgcgtactggctcaggatcttggaaaggcccagatcggagatctccgccattgcataggtcaggaacggctggacgatcagggtgagcagctttgacgaaaagctggaaattgcaaagatcaatgtgttgccggccagctttgaatatttatcgccggactttttttcgttttccaagggaacttccctcctgttttacaattcggatgcgggccggtctgtgaccgcccgcatccgctttcccactatttagtcactttaaaagcgcccgccgggctttccagtccggcagcagctttgccacctcggcccagaacgccgggctgtggttgggctgcaaaaagtggcagtactcatgcactaccacatagatctgcgccgccgggggcatatgatacagctgcagcgcaaaggtgatctgccgctttgccataaagcacacgccccaccggctggtcatgctgcgcaccttgatgacgggcttgtgcccgcccagcactccggcaaaggccgggtagaccttatcgctcatggccgtaaaataggccagcgctgtttccttatccggcagagaccgcgcttcctgcgctgcgcgccgcatggcacgttcccgggcctgctgcacccagtcggcacgtgcggccacaaaacggtctgccgcttctgcgctcgtccgcagggggatgctcaccgccacggtgccatcctcccgcacacggatgttcaggttcttgacccgtttgcgggtcagctcgtattggatgccgcctgccgtgcgcagctgtgtctcctgctttctgcccgccatgaggtcaggtagtcttttttgcccggtgcagcatttccagcggaagctgggccagcaccacggcagcaaagatcagcacgcagccaaagacttcccgggcagaaaggttctggtgcagcagcatccagccgcccagcgcactgaacacgctttccagacacatgatcaggctggcaatagcggggttcagatcccgctggcccaggatctgcagggtgtaggccacgccgctggacatgatgccgcagtagaggatcggcagcgcattctccgcgaactgcgctgcggaaggtgtctcgaacagcagggccgcagcggtgctttccaccgacaccaccagaaactcggcaaggctcagccgcacgccgtccacctgcggggaaaagtggtccaccgcaatgatctggaagctgaacagcaccgcacagctcagcaggagccagtcgctggactcgatgctgccaaagccgtttttcatgcacagcaggtacaggcccagcacggccaccaccatgctcacccacagctgcgcgctgcccttacggcccagaaacaggccgaacaccggcaccagcaccacgtacatggcggtcaggaagccagcctttgccgtggacggattgatggtaatgccgatctgctgtgcagcggatgcagcaaacagaagggtgccgcacacaaagcctgccgccagcagctttttcttctcggcagcagttttgggctttgcatcggtgccgcttttgcggcggatggcatcaaacaccatcaccgtggggatcagcaccagtacagccagccagctgcgcccggccagaaagctgtaggctcccatgccggaaccggcgctctgggccacaaaggccgtgccccaaataaaggagcacagcagcaaaagcagagagttcttggtttgtgtgttcatcagccaatgccctccaccttcagcaggccgtacaggtagtacttgctggagtcataggagatggtcacacggtactgcgccgccgggtccagcccggagatggtgcagcggtagtcggtgccgtcggtatggatataataggtgctgtcggtcacatactctgcgccgccgtccacctttttccacacggccaccttgaaccgctgggtgccctcagccgtgccgcagcccataatgctcagcgtgccggagggcacggtaaagtagctggtctggcggctccagatgccgttgaacactgcatacaggcagccatccgccgtggccgtggcaaacttggccgaggagtctgcaatgccctgaatgatcagcggatcactggtctggtcggcccagcgggtagtgtcctcttcctgcacttcgtctgaagtgcccgatgccttgtgcacgatgctcttcagggtgtccttgcagccgattaggcccactgcaagcaccagcgccatcagcagcacaacgatcctttttttcatcttcatacgtttcctcacgaagcaatgcgcttctctttgtttttcatccctccgccctgttcttgtacagagcagatacagatatagtataccgcattttccggcgctgtacaagacgtttgtcctgtgccgtactgcaagaaaagccccccccggggcttttctttttgtgcggtttgccgcccgattttacgtttctttgccagtgaccgcccgcagggcagcacactcggcagcggcctgctccggtgcacctgcaccaaacagactgccgtaccggtacagcgcccagccgcccgcgttctgactgcgcaggtcctgcacctgccgggccagcacatcgccggtgctccagccgctcacgctgtccgggttcgcgccgccgtcacctgcgcccacgcggtacgcgcccagcccgaagtacagggccacgccctctgcgcgcgggtatgccagccacgcgggcacgatgttctcaaaggcaaagcgggtgctgccgctctgcagcgtgtagccatagccccagtagatctgcgggcagagataatccaccacctgttcttccccgcccgcagccagccacgccgtcacatcgctgtactggctgttgaggtcgttgtcgggattcccctgcggactgatgccaaagcgcagcgtcgggtctgcagtcttcaccgtgtcgtgcaccttcttgaccagagcggtcacgttctgccgccgccatgctgcaaggtctgccgcaccgctggccgcaaactgcgccgcatcgatgctttcttcggtcgtagggtaaaaataatcgtcaaagtggatgccgtccaccgcgtagttctgcaaaagctcggccacgccctgcaccacatagtccgccgctgcaggctcggccgggttcagatacagcccgtcgcccactgcacacacccattccgggtgggtgttggcaaggttgttctctgccagattcggcggcatagctgcagaggaccgcagccggtagggattcagccacgcttccaccgaaaggcctcgcccgtgggcctcctgcaaaaggatgtccagcgggtcaaaaccggggtcctgcccctgcacgccggtgcataggtggctccacgggaacagctggcttttgtaaagtgcatctccgaagggccgcacctgtgcaagcactgtgttcagcccaaggcccgcgcagttttccagcatttgcacgcacccggcgcggaaggcatccgccgaggaaaaatccattgctgcccattccagatagctcacccatacggcccgccactcgcctgcaggcagggcagggttctcaacagactgtttttctgctttcgttttgtcccgtttggaaaacttttttctgcgcagccacagccccgcacccacacaggcagcagcaccggcccccgccagaaaggtgcgccggttcacacggcgcggttccgcttccgtttttttggacttgcgccgctgggtcacagggtctcctcctgggtcttatacagcacaagcgctgcccagccccgggcgcaggccagcagcacgaacatgatgttcgtccagaaggcaagggcgctcatgcccgcatagcgggtcagcagccagaacaaaagccgcagcgcttccgagatgcacaccagctgcagcgggcgctgaacgggcctgccgtggctgtactcgatggcaagcaggcccggccacaccagtgccgagcacaggtcgcccgcccagccgcctgcagccagcttgctgagcatcagcagcacgaacaccagcgtgtagctgcgcttatccttggcgggagcacccttctgtgcggccaaaaacagcactgcaatgccggtgatgcagaacacgatcagttccagccccgaaaaatccatgccgcccagcacggcaaagccgcccagcatggacattgccgctgccgccagcaggaaaaagtaccaggtcttgcgtgtaaatttgagcttcattgtgttcctcccgcctgcagcagtgcgcaggctcctgacaaaattttcaaagaattaaaaatattatagcacaaaagtatgcgggttgtgttacaataagaaaaactcttcaggaggatcttcatgaacgccgcagtttccattgtcctgcttgccgccgtacttggcgtgatcgtttttcttttgtcccggcgcgagaatacccgccgcagccagtacggccccgccggcctttcggagttccgcaccgacctgccgctggacgagtgcttcgaccggctggacgagcacagggacgccgacgagttcgtgtacgagtgccgccgggaaaaggacggcggctttctgctgcatctcaccctgcaccagcccacccagcagccgctggacaccctgtatacccttcggctggaccccggtcgtcagaccgtagtgaccctgatcttcatccgcgaagcctttggctacaaggagccgctgttcccgcaggaaatgcttgatcgttttatgcagcagaagctggatgcccaccgcaccaaataaagttttgtgtaaatgcttttcattttgcgctgtttttggtatacttgtaagtgccgcagcgcagaatatgcgggctagtagctcagttggtcagagctggcggctcataaccgcttggtcccgggttcaagtcctggctggcccaccaaaaaagcacgagattttgctctcgtgcttttctttttgcatgaataggcgctttacttgtacaattctttgctcatctgtttccgaatctcatcacgtcgtctgtcgtagacctgcgtgtagattgcaagggtcgtgctgggctgagcgcgtccggcttctgcggccaccgttgccacaccgatattgggattagacaacagaatgctgacgaaggcgtgccggaacatatgcggatggattttttcgattaggggtacatatcacagagcacatgatacgctggccgtttttgtttgcccccattgcggcagatcctgctttctgccgcaaattgcatcagatcccgccgtttgctcaatgagtatttcccgccgtcccgttatactgggagagaaatggaattaaacgatggaggaacagaccatgaaatacggtgtcatcgatgtgggtggcggcctgcggggcatttacggcgctggcgtgctggaccgctgcctggaggaggatctccgcttcgatctctgcatcggcgtttcggcgggcagcgccaatatgacgtcctatctggcaggccagcatgggcggaacaagcccttttacgatgaatactccttccgcagggagtacatgagcgtgcacaacctcatccgcaagcactcctatctcgatctgggctatgtctacggcaccctcagcaatgcaggcggcgagaatccgctggattacgcggcgcttgcccgcagcccggcagagctctgcgtggtggccgctaatgcacagaacggcgaggcgcagtatttcaccaaggcagacctccacccggacgactaccgcgtcctcatggcgtcctgctgcatcccggtcatcgaccagccctgcgtcatcgacggcgtgccttattttgatggcggcctggccgaccccgtcccgctggaatgggcctttgcccacggctgcgaccgggtggctctcatcctgaccaagcccatcgggctggtgagtagtgatgcccgggacaagcatctggcacacctgctgcagtcgcattaccccgctgcagccgaggggctgcgccgccgggcatggcggtacaacacggctgtccagcgggcgcgggagctggagcgacagggccttgtctgcatcatcgccccggacagcaccgagggaatgtccaccctgaccaagaaccgcgcctgccttgaaaaaatgtacgccaaaggcaaacaggacgccgaagcgctggtgcggtggatgcaaaacaccaaacaagatgaatcggtgggcacctagagatgaaacccgttcacttcccttgacaatatccgccccggacattatacatatgatatgtacatacagacaaaggagcctggagcggtatcgctctgggctttttgcattttgttgttctgctgcggacagatagagggggtccgcagcagaggagtagaaaacctccttcccgatttctgcaaaagaaaaagctcaccttcaattttagaaagtgagccatgtaaagccaaaatggtaacagtaagtgtcgagtttcgtaggtgaaaattttcacctacaaagagccgttttagagacaaaaagataccaaaagttacgtcaaagtacacaaaggcacttttatggaattatcaaatagccataaaatttcacaagaaaaacgggatttcaaaattagcgacgttctcataaccgcttggtcccgggttcaagtcctggctggcccataacaaaaaagagcacccatcggggtgctcttttttgttgccagtcaggacttgaacaaggcggcgacgcgaagcgacgcaagtaaagccccggtggggctttacttagcctgcgggtcccagcgcataggaatgtcaaaaggtgtcggatgccgttctgagggccgccaagacttgaacccaaaacttataaagttctcattgcggaatccctgctcccatgatatgattaaaccagcttggaggaggatatcatgcagaatacaaataacgaactcgtgtccgtcattgttccggtatataaagtagaaccctatctggaccgatgtgtcgccagcattctggcccagacatatccgaaccttgaggtgatcctggtcgatgatggttctcccgataactgccctgcactctgtgatgcatgggcacagcgggacgcacgcatcagggtcatccataagaaaaacggtggcctatccgatgcccggaatgtgggactggatgcggcatccggtgcgtacatctcctttgttgacagcgatgattacattgcagaaaatttcatcgagaccctttatgatctgctccatgagtaccacactgatatttctgccgtccattggaaactcgtctatgctgacgcgccggaggtccctgctccgctttcttcccgaaacgttacgctctttcaaggtgctgatgccatccgggagctttttacggaggatacctacgcatgttatgcatggaataaattatgcaaacgggaactgtttgacaccatccggtttccggtcggtcgcgttatggaagatcttggcattgcatacaagatcctgttcgacgcagggcagatcgtgtactcggacgaacccctgtattactattatcagcgcgatggcagcactctccatacagactgtataaagttctttcaggacaggcttgcgatggtcacagagcgttatctgtttcttgaaaagcggtaccccgacatgctggaaaacgatgcctattttgtggatatggccctgaatgattacccgatcctctatcgttctgccttagaccctgaatcggatcagctcatccgccatgcctaccaaaagagccgttccattttgtccttctacaataaaatgcgctttgcctttttcagccggagcaaagccctgtactactttatcgaacgccgcaaccgcaaccttgcccgctacgataactgctgaatctcctgcattccattcctttctgcgtaattataataaaacaaagaaggagcgtttccacgcgggaacgctccttctttgtttactatcatttacaccattttgcaaactcttcgtcggtgcacttgacatagtggctgccgctcacatggtgatcggtgcccttgttgtaatcgatgccggaagtggcgtagtcgtaggtctcagccacgcggcgcttctccacaacggggttcggcagcgggatggccgacagcaggctgcgggtgtaggggtggatgggattctcgaagatctcttcggtcgtacccgtctccagcaggtggcccagatgcagcacgccgatgcggtccgagatgtacttgaccatggaaaggtcatgcgcaatgaacaggtaggccgtgccggtctcctgctggatatccttcatcaggttgaccacctgcgcctgaatggacacgtccagcgccgagatgcactcatctgcgatgatgagcttggggttcataatgagggcgcgggcaatgcccacgcgctggcgctggccgccagagaactggtggggatagcgctcggcatgttcgggcgcaaggcccaccttggccagaattttctccaccttttcgcggcgctcttcgcgggtcttgtacatgtggtggatgtccagaccctcgccgatgatatcctccacctttttgcgggggttcagggacgccatggggtcctgaaagatcatctgcatctgggtgcgcagcgtatcgttctgcacgcggctcagcctgccgctgatatcatgcccatcaaaggtgatttttccggcagtggggtcatacaggcggatgacgctgcggccgatggtggacttgccggaaccggactcgcccaccagaccataggtctcgccgggatagatctcaaagctgacattgtccacagccttgacggtatagctcttgctcacgcggaaatactgcttcaggccctcgaccttcagcagcggagcagcattctgtcctgccatttattccgcctccttgatcttttctgcctcggcacgcatgcgggcaatgcgctgagcaagctcaggcggcatgtccaccttgggtgcgcgggggtccagcagccatgtagctgcatagtgggtgtcgctgatcttgaacatgggcgggtcaacttcgtcgtcgatgttcagggcaaagtggttgcgcggcgcaaaggcatcgccctgcttctcatgcagcaggttcggcggcgaacccggaatggtgtacagacggtcgtctgcggtgtccagatcgggcatggcggaaagcaggccccatgtgtaggggtggcgcggctcgtagaagatctcatcgatggtgccggtctccacgatcttgcctgcgtacatcacatccacataatcggccacctttgccacaacgcccaaatcgtgggtgatgtaaatgacagagatgccgcgctcacgctggatgctgcggatcagctccagaattttggcctgaatggtcacatccagtgccgtggtgggctcgtcacagatcagcaggtcggggtcgcaggccagcgcaatggcaatgaccacgcgctggcgcataccgccggacagctggtgcgggtagctcttcatgcgcttttcggcatcggtgatgcccacctcttccagcagctgcacagcctttttgtaggcggcatccttgggcatcttgtagtgccacagcatgccctccatgatctgcttgccgatgggcatggtggggtcaaggctggtcatggggtcctgaaacaccatggcgatgcgcttgccgttgatgtggcggcggatccactttttgtccttctgcagcaggtccaccgtctcggggctgccgtcggcgtgatggtagctgaactggatggagccgctgttcacaatggcgttctgtgccagaatgcccatagcggccttcatggtaacggacttgccggagccggattcgcccaccagcgccaccgtttcgcccttgtacaggtcgatgttcacgccgcggatggcgtgcaccgggcctgcggtggtcttaaaggtgatatcaaggtctcgcaccgacaagacctgttcttttttcttttcaggcatggggtgttcctccttacatactcttcatcttggggtccagagcctcacgcaggccgtcggccacgaggttgaagctcatcatcagcaggctcatgaccaccatcggcgggatgatctgataaggatgggtggtaaagctgttgtacagctcactgatcagagagcccagcgagcactgcggcaccgggatgcccagacccacaaaggacaggaatgcctcggtgaaaattgcggtggggatgctgaacatgacctgcgtgatgatgggtccgatgatgttgggcagcacttctttgaagatgatgaagaagctgcctgcgcccagcgtgcgggaagccagcacgaactcctgatccttcagcttgagcatctcagcgcgggcaatgcggctcatgcccacccactcggtgagcatcagagcaaagataatggtgatcatgccgggcttgagcaccagcagaagcagcgtgacgatcaccagacgggggatgccgttggcaacttccagaaaacgctgcatcatcatatccaccttgccgccaaagtagccggagatcaggccgtagctcatgccgatgaccatatcgatgatggcggcggcaaccgcgatgatcagagacacgcgggcaccctcccaggtacgggtccagatatcgcggccataggtgtcgctgccgaaccagtagtagacatcctccttgcccttttccacataggcattcactgtcttggaaccggtggtggtgctcattttctcgtcaccgttgaagatgccgaagttttccagcacctgcacgcggggcgcaaagtttttctggctcagctcctgaccggagtaggtatactcgttcatgccggggccaaatgccgccagcagcacgataaagacaacgaggatcaggccgagcaccgcgctctttttgcggaagaagcgcacccgtacatccttccagaagctctgtgcggcaaagttcgagtccattgcgatctctgcgtcgttatgcttgagcgcaaagtccttctcgttgaaggtatgctcggaatacatggtatccactgcgctgacgatggcatcagccgtggcttcgccgcccaggtgaatcgctttttctgccatatcagtcgtccccctttgccaagcggatgcgcgggtcgatgatgccgtacagcaggtcaacgaccagcatgatgccaatgtacatggcgctgtagatgaagctcaggctgatgaccacattgtagtcgttggactggatggccgtcaccagcaggctgcccacgccgggaatggcgaagatcttctccaccaccagcgagccggtcatcaggtccacgatcagcggggccagcacggtgataatggggatcagcgcgttgcgcagcgcgtggcggaagatcagcgccgggccggaaatgcccttgctctcggccagcagcatataatcggagtccagaacttcgatcatttcactgcgggtaaagcgggcaatggaagccatggtgaacatggacagcgagatgctgggcagcacactggagccgaacacgtcctttgcggagaacagcatggggaaccacttgagcttgaagccaaaggtatagctcagggccagtgcgatcacgtaagacggcaccgacacgccgatgaccgagatgatggtggccagagtgtcgaagatggtgtcccgcttgagggctgcaatgatgccgagcacaaggcccacgatggcacccagtgtgacagccatgccgcccacacggatggaaatgggcagacgggactggatcagctgggagatgggcgtgttcttggagatattgtagcttacgccgaagtcaccgcgcagcatgttggtcacatagcggaagaactgcacatagatgggctgatccagaccgtactttgcgtacagggatgcgcgcatttccggcgtcagcttttcatcgttgaaaggcgaaccgggcatcagctgcatgaggatgaacaacaccagcaggatggccagcagcgtaaacaacgaagtgataatacgcttgagcgtgtattttttcacgttgggtagacccccttaaagtttcttctccgccctgcacggggcagaacggctctcgcctgccgcggtcagccgtgcaccgcacgcggacagtgcaaaagccaaaaagtcgcacagcggcattttcgctgccactgtgcggcatttcagttctcgatcaggatcagacgctcttctttgcgtccttgtagacgcggttcagagcaaccgggtggaagtccacgccggtcacggcagaagagatcatctcggcgttgcactgaccatacagcgggaagatggcggcctgctccagcacgatggactcagcgtcatacatggcttcccagcggccctcgggatcggtgcacagatcgccggtggtgcactctgcgatgacggcatcgtagtcagcatcgctccacagaccgtagttgttggagttgccggtgacccacatgcccagataggtcatgggatcggcgtagtcggggccccagcgggtcaggccgatctcaaagttgccgtcctgcatatcctgcacgcgctgcttcttgggctctaccttcagctccagagtaaagccgggcagagtggtctgcagctgctcctgaacgacctgagcgaccttctgaggagcatcgtcggcatccacgaccatggtgaaggagaaggaatccttgcccagctcagccttggcctgctcgtagtactctgcagccttgtcgggatcgtatgcgcagaactctgcaaacttggtctggtcggcgctgaaatcgctgccatccgggccggtggcgaactgtgcgggcactgcggtgtaggcgggagaagagccgtccttcagcacgtcattggtgatagaatcacgatccagtgcaaaggtgatggcacggcgcaggttcaggtttgccagctccggcacagcgtccatgttggggctgatgtaccacaggtagccggcgcccacgctggtgaactcggggtcgtccttgacctgctcgacctgctcgccgttcagcagggtgatgtccagatcgccgttctgatagctcatcagagcctgctggctgtccttgatgacctgatagttcaggccgtccagagcaatgcggtcggcatcgtagtagtcggcgttcttcaccagctcaaaagcggtggcagccggctcatagctggtcagcacgaatgcaccgttggacagcacggtgtctgcgctggtgccgtaagtatcgccgcagctctcaaagaacttctggttcatggggtagaaggtggggaaatacatcaggctcaggaagtagctgaccggaacgttcagctccaccttcagggtcttgtcgtccactgcggtgatgcccagatcggtgacgggcttgttgcctgcaatgatctcggcggcgttgaccacctgaccgatatcgctcagcatgtaggcatactcggatgcgtttgcggggtcaacagcacgctgccagccaaacacgaagtctgctgcggtaacggcatcgccattggaccactttgcatccttcaggtggaaggtgtaggtcttgccgtcctcgctcagctcatagctctctgccagagcctccacggctgcgccgttcgcatccatctgcatcaggccgtcggtgtagttggcgataacctcaaaggaggtgccgtcggtagccagctgggggtccagagactggacttcggtctccagcatgacgttcagcacaccgccctcagcagaggcggctgcaccagaagcagcggtggagccggaagcagcggtgctggaagagccgccgcaggcagtcagagccagtgcagcagccgatacgcctgcagcagccaggaagctgcggcgagaaatacgacgatcgaatttcatattttttccctctctcttacctcaatgctttacctcaataaagcattgaatggtgaaaaatgcacaaaggttttttgctcctcctctggagcgctgcacacctttgtgcgatatccgcattatacgctgttccgcctaaaaaggaaaggctttcagctgtttttctgtgctttgaccaatggtcagcaaaaattttgtttttgtttttgtgcagttttgaagatatactgtagtcgctcaaaatacagtttcacgaaaacatgagttttttgtgtttttcgggggaacagatgaagagatttcacctgcgtattttcattttttgtgcataagtcgtactttcaacatgttttttgtgcacataccagacacaaaaaaatccctgctgaaaacgcaccgttctcagcagggaaacaccgttttttcggtttttaggcaaacatagccactacgtaagtctcgccgccgtattcaatgaacaccgcgcccatccgtgtgcggcctgccgcatagctgcgcagtgcgctgcccgcctcgctcagcggcggagcatataagtagccggtaaagccccattcgttgttcattgcaaggccgatcaccacgcctctgggcaggaacagaaagctggtggaatgatcaataaaatcgtacacattcgtatccagcatggcaccggagccggtggtcatgggcaccttgcgggtcagcaggccggactgggtggtcagctgggtggagtcctccaccagccagtctgccagacggctggctgcatcttccagatcggtattataggtcaggctggggtctacctctttcatcagggccttggcctgttctgtatccttctgcaccgtgccgcccatcagtgcactgcatccggtcagcaccgccagcgccagtgcacccgccagcaggcaagccagccattttcttgcatgtttcatatagtggttctcccctttcggtctgtttttctccatgataccttttttgctgccggattacaagcagaaaaaagctgctgtgcatctgcacggcagctttttgggcaaaactttattttgcgtactccacagcgcggctctcgcggatcacattgaccttgatctggccggggtaatccagcgtgtcctcgatcttcttggcaatggagcgtgccagcaggatcacctgatcatcgctgatgacatcgggcttgaccatgatgcgcacttcgcggcctgcctgcacggcaaaggcctgctccacgccctcaaagctggaagagatctcctccagattttccagacgcttgacgtagctttccacattctcgcggcgggcacccgggcgtgcagcgctgatggcatcggcagcctgaatgatgaaggccagcggggtcttgggttccacgtcgccgtggtgagcctcaatggcatggatgatctgggtgttttccttgtacttgcggcagatatccacaccgatctgcacatggctgccctcgatctcgtgatccagtgccttgccgatatcatgcagcagaccggcacggcgtgccatggtcacgttcacacccatctcgcctgccagcaggccggccacccatgccacctccatgctgtgggtcagggcgttctggccaaagctggtgcggtacttcaaccggccgatcagcttgatcaggtcggggtgcaggccatggatgcccagctccatcacggcacgctcgccctcgcgcttcatctgcagctccagctcgtggcggcacttttccaccgtctcctcgatgcgggcggggtggatgcggccatcgccgatcaggcgttccagcgtcatgcgggccacctcgcggcgggtctggtcgaaggaggacagggtgatggcctccggggtatcgtcgatgatcagatccacgccggtcgcggtctccagagcgcggatgttgcggccttcgcggccgatgatgcggcccttcatttcgtcgctgggcagcggcaccacgctgacggtggtctcgctgcagtggtcggcagcgcagcggctgacggcctgaccgatcaggttgcgtgcgatgttgtcgcagttttccttcaggtcggtctcgtaggcggcaacgcgcacggccttttcgtgggtcagctcctcgtccaccttgtgcagcagcacctcgcgggcgtcctcctgactcagaccggccagcgtttccagacgctccatctccttggcgcgcagggcctcgatctcggccagacgctcctcggcctcagcggcgcgctttttcagctcctcttccttcttttccagtacctcggtcttgcggtcgagggcggtttccttctggtcgatgcggttctcctgacggctgatctccgcacggcgctgcttgatctccttatcggcttctgccttctgggcatccacctcggccttcagcttgaaggcctcgtcctttgcttccagaaccgcttccttgcgtttctgttctgcggtcttgatcgcttcgttcaccagacgggtggcctcggcttctgcgctgccgatctgggcttcggcggtctttttacggttgttgtaaccaataaaatagcctgcaccgatgcccgcagcaagcgcgacgatcaagatcacgatccagatgatcgtggacatcgcatttcactctcctttgttaaaattcaaaattctgaatcataagcaggagacgctgtagggcaggtgtaggctgcaaacattttttataagtgagctttcaatgcaaaaagtggcaacaagaccacacgcacggccaatgccgcacgaacaggctgcaagcttttctatctacagttctatcttatataaaaacaggcaggctctgcctgtaagggacacgggtcacgggaacgacctgcacacagcgtcttttattccatactactatttatagtacgaaacaattgcccgcttgtcaagaggaaaaccctgccccgcagaacattttgtgcagaaaacagggacagtatccgcaccggatgccgtccccgttcccgtttattccaaatacatcctgcgcagccgcatcaggcgcgcaggggtcaggccgtattcggcttccagatagttctcggcgctgccgtattttgcgcggatggtgcgcagcacaaagggtgcggctgccgggtccacgcccgccttgcggtaatagcgcatccggcaggccgggtttgccgtgatctcttcggcgtgctccgccagcactgcgtcgatctcagccttgcggcagagattcgtgcgctcatagtccgcacagatcgtctcatccgaagcgcccagtgccagcagaatgagcatggccgccacgccggtgcggtccttgccggccgagcagtggaacaggatgggggtctcgcctgcttccagcgcacggaacagctccttgaacgccttgttgccaaacagcatccgctcgtacatagcctgcacgaaggtgctgccgtcggcgctttcttcatagcccttcatcagggcggcgatatcatccggcgcaaaggagatctcgtggccgtcctcggcgcacaagccgcagatctgcaccagacgtgcaccgtccggtacgtagtccggttctttctgcacttccccgctgctgcgcagatcaaggatcaggcgcaggcccagcgcgtccagcttcgcgcggtcggcctcaccggtgagcttgcaggtagggatgccgcgccagatctggccccacttgatatgcttgccctcgtcggcttcgtaaccgcccagctcccggaagttggtgccgccggcaaaatccagctgggtgccgggcaccgggtgggccggtgcagcctttgccgcagcgctggacagcaccgggaaattgtagaacggctttgcgggccgtccgcggcggggcggcaggctggccgaaccgcccagcacctccatcaggtagctgcgcagcaggtcgatgtaggcagaggaatgatcccg

SEQ ID NO: 761 - DNA, 9738 bp, unidentified
  source 1..9738: mol_type = unassigned DNA
atgaaaaatattctgatgaacgaaaacaatatcgggatcataaaattatatgagaaaaaggagatttcaattatgtgtggaattattggatttacaggtaaattaaaagcccaggatgtcttattgacaggacttgcaagccttgagtaccgtggatatgacagtgcgggaattgcgtactttaaagataccggaaaaatttcacttcggaaaactgtcggaaaagtaaaagatcttcgtgcaatctgcgatgatgataacaattctacgtgtggaatcggccacacccgctgggcaacccatggtggcgttaccaatgccaatgcacaccctcataaggtcggacaggttgcattgatccacaatggtatcatcgagaactatcatgatctcgccaccaaatatgatctgacggatgaactgatttccgagacggataccgaagttgccgccgcattgatcaataaactctacgaaggagatccaaaagaagctcttcgcaaagcagtagccgaaattgaaggttcctttgccttctgcgttctgttcaaggatcatccgggtgaaatttatgcggtaagaaatgtcagccctatggttgcaacatactgtgatgacggtgcttttattgcatctgacctgactgcttttatcgcatacaacaagcgttatttcatcgtgccggaatatcatattttaactatgactgcggacggcattacgttagaggatttagacggtcattccgtagaaccggaatatatggaagtaaactgggatgttaccgcagcccagaaagatggctatccgcatttcatgatcaaagaaattcatgaacagccggctgccatcacaagaaccattaccccacgtatcaaagatatgctcccggatttttcggaagatgccattgcggattccttctttgaaaatgtaagcgacattacaatcgttgcctgtggtactgcaatgtacgcgggaatggtaggaaaaaccatgatccagaaccgcctgcatattccggttaccgtggcaatcgcatcggagttccgctatgaagaaccggtaatcaatgaaaaatccatggtgatcgttgtatcccagtccggagaaaccattgatactttggaagctcttcgccttgcaaataaatatacaaagaaaacactgtctattgtaaatgtaaaaggctccagcattgcacgtgaaagcagctatgtattatatacacatgccggtccggaaatcgctgttgcaagtacaaaagcatacaccgttcaggttgcttctttttacctgcttgcatgcaaacttgccatgaaacagcaaaagatttctgtcgaagaagcacgtacatttattggaacactgcaggaaattccaaattacatcgaggaagttcttgcacaggctcctgatattgaacagctgaccaaacgcatgatcaatgccaacaacgcgttctttatcggtcgtggactcgattataccctttgtatggaaggtgctttgaaattaaaggaaatttcttatattcatgccgaagcctatgctgccggtgaattaaaacacggaaccattgccctggtcagtgaaggggttcctgtcattgccgctgctacccagaaacatgtatacagcaaagttatttccaatatccgggaagtaaaagcccgtggtgcttatgtcattcttttgtccaaagacaaagaaatcacagatccttctatctgtgatgtacacatcaatcttccggatgtatccgacgaatttacgatttttgaatctgttgtaattttccagctgattgcatattacacatccgttggaaaaggcttaaatccggatcagccacgtaacctggcaaaatctgtaacggtagaataagaaaaaactgtcgcgcgaaaattcgtgcgacagtttttttgacatagagcctttctaaaacttttgaaggcaaaaaaagaaccccagaagctctctaaaagcctctgaggttgcccctgccaaggattctctcacccatgtaccggaatccttgtatcgtcggcgcgacaggatttgaacctgcgacctctgcgtcccgaacgcagcgctctaccaagctgagccacgcgccgtttcaactgcccaattatagtaacacattctccggtgtttgtctagtgaatttttttaatttatggtacaatacaaaaaaagaatggagaagaacaatgaaacatactgctttgattacaggtgcatcccgtggaatcggtgcagccctggcatgtcgatttgccgctgaaggctatcatctggctctttgctgccataactcttatgaaacgctgcaggcacttgccacaaaacttgaaacaacctgctccatacaggtgcttggcttccgtggtgatgtaggagactatacttttatctgtgacatggtgcaaaaaacactggataccttcggccagattgatgtgttaatcaacaatgccggcatctcttatatcggtctgctcaccgacatggatattaccgactggaaccggattgttgcgacaaacctcacatccgtcttttccacctgcagacaggtcatcccctccatggttcatgccaaatccggacatatcatcaatatttcttctgtatggggaaatgtcggagcttcctgcgaagttgcctattctgcatgcaaaggtggagttaattcccttacacgcgctttgggcaaagaacttgcccctagcaatatccaggtaaatgccatcgcctgtggggtaatcgatacggatatgaaccgttgtttctccgaggaagaacgctctgcactcatcgaagaaattcctgccggtcgtatgggatccccggaagaagttgcttcactggcatattctcttgccacagcaagcagttacctgaatggacagattctcaccttagacggcggatggatttaatttcttatctttttggaaatctttttccatttatttaagaattaaaacgcaatacgcgttttctctgttttttatatcaactttctataaaatcatttgtatgaaaacgaatgataaaaataaatacaaagattttggtgaccgtctgagtctgattatgtataaacaaaatatttccaatatccagctggcaaatgcaatgtttgtttcgccgtccacgatcagcggataccgtaccggtcgtcgttctccgaccgttgcggatcttgcagccatcgtgcagattctgaatgtttctgcagattacctcatcggaaccagtgaaattacaaccagacccgataccaccgaaaaaaatagttgagcacgccctgtttccagagcggtgcccaactcttttttataaatcatgttctgccagtaaaattaccgtagaacgttccggaacacgcacacgtgtctgatctccctgtgtctgggcttcaaaatctgccccatcctggtattcacagaaagtatttactacaagtttccaatgataagactccggcaacgaaggcaggcgcatctccaaaggctcccaatacgcattcattccgtaaaagatcatatcatcatccgtatcatcggcatttcttcccgcatacatgattccaattaaatgtgtattatagtccgtataattccggttcggctctccgttatggatacttacggaaggtaacccgcagactgccggctttgtatcccttcgcagaatcggatgctttgcacggaaatggatcataaaacgggcaaaatcatgaatctcctgaaattcttccagtctgttccagtccagccaggaaataatattatcctggcagtatgcgttgttatttccatactgcgtattacaaaattcatcccctgcaaaaaacatagccggtccacggctgcataacaacgcggcaaatgcattcttcacgagtctgcgccgcaggcccataaccaccggatcatccgtctcaccttccaccccgcagttccagctcaggccgttgttatccccgtccgtattgttccatccgtttttctcattatgcttttcattatatgaatacagatcatacaacgtgaacccatcatgacaggtcagaaaattgacggatgcactatatccgcggcttgccggatcatacatgtcggaggatccggtgatacgtgtaattgcacgccctgcgacgccactgtcgccctttaaaaagcttctcatatcatcacggtatcttccgttccattcggcccagcggttccaggacggaaaacttccaacctgatacaagccacccgcatcccaggcttctgcgatcagcttcatatcccccagaatagagtcaaatgcaagggcttccagaatcggcggattctccatcggtgcaccattctgatctcttcccagaatcgatgccagatcaaaccggaatccatccacccggtactctactgcccagtgccgcagacagtctgtgataaaccgccgtaccaccggatgattgcagtttaagacattgccacagccgctgaaattgtaataatatccatccggtgtaagcatataataaatattgttatcaatccccttaaagcaaaaacatggaccgttttcatttccctctgccgtatggttgaataccacatcaagaatgacttcaattccattttctttcagttcgcggatcagacgctttaattcatcaccctcatgattatgctcctgatgaaatgcataacttgtattcggggcaaaaaaggaaaccgtattatagccccagtaattgtacaactgcacgccatccaccacacgggcactttccatttcatcaaattcaaaaatcggcatgagttctaccgcattgattcccagatctttcaaatacggaattttctgtcgcagaccttcaaatgttcccccaccttttacaccggaggacgcatctttggtaaatcccctgacatgcatctcatagatcaccagatcttcaaatttgtaattcagattccgataccgcccccagtcaaaatcactttgcaccacacgggctttatagacaaaatcctttccgccttccggtttttctccccagtttctctgaccggtaacagctttcgcatatggatcaagaagcgtatgttttctgttaaacagtaaccctctcgcctgatcggcaggaccgtccatctgataggcatactcaaaatcctctgcttttaagccaaaaacaaggatagaatacgtatttccaattttataactttccggaatgcggattcttgcatacggttcctgtgccgccggccggaataacagcaggacacagctcgtagctccatgggagcttacggtaaaacttaccccttcctctgtctgatatgcaccattcatctgataaaatcccggacgtacatcaaatccaccgatattatcgagtggatgaatgacttccccgagactttccatttcttcgtctatcggccagcttttctgttttgacggataattccaaaaacttgcattcatgtgctgattcctcttatcattattatttacttgccacataaaattatattatccccctactcttccctgatgattaccctgccatttgcgtcaaatccgattttactgtacttttccgaatactcattcatatgatcaataatcgtctgttttctgtcgccttttgctatggcaggctgaaaattatttctttctgatgtggaagaaatgctgcatggtatcatatcggctgatatatctgtctgcagtaccccatccacaaaggtaaaggtctgttcatagatcgccgtatctttgtcttttggattcctgttccccccaaagcagaaatttccaagactgtagcagatcatttttccgttgtataattccattccctgcaatacatgaggatgtgtaccgaccagcagatctgctccccagtcaatcacctggtgtgccagcttctgctgataatcattcggataatgatccccctctatcccccagtggcaacaggcaattaccagatccgctccttcttcccgaagttctgcaatcccatcccggatataattggcatgtttttcatctgcagacaactggcttgcggagacaattccgattttgataccatccttcgtggtataggtatccacatgatcattgaatccgaagataatccctgctttatttaacacttctctggtatcatcaagtccctgctgcccataatcaaacgtatgattatttcccagacttgccccctccacagaactgtctgtcataataccaacatactccggttttccttttaagttccacgttttttccacacgctcggtcgcatttgacaacacacattccagattgaccagtgtaaaatcatcctgctcaaaaatacttctgacatttttaaaaaaataatcctgcccgtatttatcatagtattcatgaaaggaacctgcatacccatgcgtctgtgttgccccaagcgtacagtcacctgtcgccgtaatttttaccgtctgtatcaccggttcctgctgcgtttcagttgcagtcccggtttccgtttcttccagcgtacccggttcttccgtcatctgtgtctccgtgattttttccgcagaagagggcaaagccgatgacgttgctgcaggagaagaacatcccgtcagcaaaaatcctgccattaggattggcaatatccattttttcatacgttttcagactcctctttcacaagaatatccaccgtgtgaccgcttgcacccataagatccatccgttcacaggttgccagatgatactgtaaaaatgcatcaaactcttcttccgtcagcgcatttaaaaacggacgcatataatttgctgcaccgtctgccgctatgatctgccggcgcctgacctctacctgccggtccaatgcttcaatatcttccagacgaaccatggaatacagaggattggcttttgaagtacagtgataatcctctgtgagcattccctccttaagcgcctccagaatatgtttttccttaaacgcatacgtgataacggaaaattcattcataatatacgccacaagaaccctgcctccgggtctggtcaccctcaccgcctcccgcagcgcagcaagcttgtccttttcctcatgcagatgatacatcggcccaaacaacagggttacgtcaaaggaatcatcggaaaattttttcagattcattgcatttccctgatatgcatgcacgcctgcacccttctgtttcaagcgtcccagattatgctttaccagttccacggccgtcacatcgtacccttcctgtgccagcggtacgctgtatcgtccggttcccgccccgatatcaaggatatggatttcctcttttgcacgttcttttacaatttcgtccagacactgatggatataatgcatgcttgtcacaaattccaccctgccgtgccggctgtccagacgcttctcttcattaaatttattataataggcttctaagtctgtcatattttaatactaacacattttctttaaaatttcactcacaatcgctgatgcgacatccgctttgctcattatttccagttccctgcagtcatctgccgtaatcagcgtcaccacattggtatctgtaccaaatccggctccggctaccttcaggttattcgccacaatcatatctgcattcttttttgcaagttttgcacgggaattctccagcatatgttccgtctccatggaaaatccacacagaaactgtcccggttttttgtgcgcgcccagatatgaaaggatatcttccgtgcgttccatcgtaagagtggcatccccgtcttttttcttgactttctcatcgaccgggtgatccggacgataatccgccacagctgccgctttgataataatatcctgttgctctgctgtctcctttacggctgccatatccgcggcagatacaaccggaacgacctttacaaacggcggcggagtgattgccaccggtcccgtgatcagcgtcacttccgcgccacggcgcatgcagttttccgcaattgcatagcccatttttccggtagagtgattcgtaatataacgcaccggatcaatcttctcctgtgtcggtcctgctgtgaccatcactttctttccaaccatgtccttttcgcaggcaagatctttcataatataagaaaacagtgtttccggctccggcatctttccggctccggtatccccgcaggcaagataaccactcgccggatcaatgatatgaaacccataatgctccagctttttgatgttatcctgtacgatcggattttcaaacatattggtattcatggcaggggaaacatacttcgggcattttgccgcaagaatcgttgttgtcagcatatcatctgcgattccgtttgccatcttgccgatcacattggcagaagccggcgccaccataaaaatatctgcacgctttgccagtgccacatgctcgacattgaactggaaattccggtcaaatgtatcgaccagacacttgttgcttgtgagcgtctcaaacgtgataggattaataaaattggttgcattttccgtcatgatcacatgcacatccgcatgctgcttgacgagcgcacttgccagataggcgattttataggcagcgatacttccggtcacaccgagtaccacacattttccttttaacattgtctcttactcctttgcagaaaaaatcacatcttctgctattttatcacactttttccctaaaacaattgaatttttgtcatctgttccagtatggaatctttgacagaatcgttcagatatgctggatttaattttctttttgcatatgcaaggtaagaaccatttgtctcttcaatcaaaactgccgtaaaaaaccgctcccagctaaaatatgttttgctttccacatattcccacggcttttccagcacctgatctgcccatttgctttttactacttttgcctttaatatcagccattcaaatgactccggcaaataaagcaccacttgatcttttccaccaatcaactgcatcactctgtcaatttcagaaccaaatgccgcgccgtctgcaattacaagtatgcgttcatttttatgcatatttaaataatggaaaacatttgactttccattcattgtctcacatttcaattgctgttgcctacatacagaattaaaaaactgataaccggaattactgtcttccgttattacaacctctggtttgatatccttctctaaagtctgtgctccatatattctgtaaaactcatgataacacggttttaatgttccgtattttcctgaagtacgaattccatagatttcctccacgctatacggcaaagaaggcaaggattccctggaaataatgacataataattatctgttttctgaatagtatctgcgaattctactgtcttgataaattcgtttccctcatcaataaatacaatactatcctgcattgctgataactgttctttccacagtgagccttcgagcacataacattttttgtcacacgtcagttccacaggggtcccggatggattgtttacgtattcccgaatcatatctaccaatgtggtttttccagttgcgctgtctccccggatgaccgtcagatttcttcgaatttcaaaatcatattttaagcgctttgttgatacaataattctatgttttcccttcat

SEQ ID NO: 762 - DNA, 24121 bp, unidentified
  source 1..24121: mol_type = unassigned DNA
atgtacctgctccggatatacgtgcttgccgaacgccaggctcgccaaaatacaaatcttccggcaggcgtccgccccctcaatatcggcggcaggatttctttccgcgtagccaagcttttgtgccagggccaaagcgtcctcgaacttcatattttcccggatcatcttggtcaggataaaattagtggtaccattcaggatgccggcgatttcaatcacatcattggcggccaggcactggctgattggccggataatcgggataccgccgcctacgctggcttcaaataagaagtttacgtttttctcctgggcgatttttaaaagctccgcgcccttggcggcgaccagctccttattggaggtcaccacgctttttcccgcttccagcagagcctttacataatcgtaggccgggtgaagccctcccatgacctccgctacgacccggacctccggatcgtttaaaataacggcaaaatccttaatgaacttgctttgaaaaggactatccggaaaatcccggagatccaggatatatttaatatcaatctcctcttttgcccgcccggcgatgctgtcataatggtcggtcaacacctgggctaccccggagccgaccacaccatatcccataattgctacttttaccatattctcacgcctttcagctttactgttcgcctgtaatgttttcaatggtttgaaccccgtcgacttttctcagggaatccagcagaaaatccaccggaatttttacggtatccactctggcggaaatggaaaccagcgccgcacccatcaccgggatattttgattcaccgttaggatgttggcgccggcgtcataaaaagaggaaatcagcgccatcagcacaccgggacgatcctccagcactgcgtgaatggtcaccagacggctggcccccttgctttgatagggataaacggaatccttgtatttgtaataggcgctgcgggatattcccgccattctagcggcctcggaagtattggcagccgcgcctgacatcaaatactgcttcgcttccacaacccgccggaacacctccggcaaggcatccgccgacaccaacaataattttgcctggttcaaaccgtccacctctcagatacgattgtgctgtcacgaaatacagtttaccatcttacggcaatgctttcaaacagggttatcggcaaaaattcgaggttattcgaaattatctctcaaaatctcaggatttctcatgtttactcctgattactctcttttatcataacacaaaatacagaaaaagggaaccgccagttttttgggaaccaatccattacaaaaaagcggggagaaggattctccccgctaaagcctgcgattcctattcacttggatccgttgcggaaccatcttccgaggatgatggctcactggatgttccctcagagctggaaggctcagaggaagacgacgacggatcttcactggaaaccggctcctcagacgacggttcttcactggatggaatatccgatgggatagacgacggtacggacgagctggggatagacgctacctggctgctgttcaggtcagaagagctggaattcggatggacgccgtcacaaaccgccggcagattactgatatcatagtaacctatcccggtatcagagcacttatccccggcaagcttgccggtctgcttgcaataggctctagacaccacattaggatcgtcgataaaatcgtcgttgggatccttatccgccaaatagcgggtcatgatttcccgccaaacggtttttgaataattggtttcatagccaatcggcgcgggagtctcataaccgcaccacaggccggccaccgcgtggcgggtgccgccgataaaccagttatattcattctcatccgtggtaccagttttgccgtaggtgagccagccgggcaccttcgccatgccgccggtaccctcggcgccggtggtaacgttttggagcaggtggcgcataatggtggcggtagtgctcttaatcgcctgttcgccctgcttgttccggttatccagcaccacgtttccgttgttgtcctctacataatagtacatatacggctcgttataaacgccgccgttaccaaagatctggaacgccgccgtcatatctcggacaggaacgccgtggtatccggctccggtagccatcgcggaataggtcaaatcctccggcgccttcaaagagtctagatgcagggtgttggtaacaaaatcaaagctgttttccaagcccaaaaggttgaccgtctgcgcggcggccgcgttggatgaaatctccaaagcgtactctaccggaatttgtcccttatagccggtataccagttaggcggccactcgccctcggtacccgggatatttttcaagggctgatccagcaccaggctggaatagttcaaaaggcccttatcgatggctggagcgtaagcgctcagcggcttaaagctggaggccggcagacggtcgtcgctggtggtgaagtcccacagctgatttccttcctttttgccgcgctggcccaccgaagccaggactctgccgtcgtattccatcattacatagccgaattggatatcctcatctggaggcatcagctccggagtggacagcacctcctccgccattctctgggtctccacatccatggcggaataaatcttatagccgttgtgcatgagcatgtacatagcgttgtcctcatccacattgagggcctccgccaaatcctccgctacatcgttgagcatcgcctccacataccaatcgtcgataggcacattgtccaccacattgtcatcggtatatccaacaaaggtcatggcagcggattcctgcatagcctggtcgtattcttcctgtgtgatcattccttgctgatgcatctgatccagaatattttccctgcgctctttgttgttttctggataaactagcggcgtataccaaaccgggttgttgggaatggccgcaatagcggcgcattgggcgatcgagcagtctttgatatccttattgaaatacagctttgccgctgcctgcaccccgttagtgccgctgccaaagttaactacattgagataagcctccagaatttcagatttgctgtatcttttctcaaactccaaggcgctgaatatttctgttaccttgcgggtaatgctgacgtcattccggttggtcaggttcttaatgagctgctgcgtcaaggtggaaccgccgcccgcgccggaattaccgccgccggtagctaggtttaatacagcgcccccggtgcgaatccagtccacacccttgtggtcgtagaaacgcttgtcctcaatagcgataatcgcgtttttcatcgcttcgggaatgttgtcgtaatccacccaaatccggctttccccagcgtaaaccgactgatattccaccggattgccgttttcatcgttgacgtaaataaagctggtcagatccagctttaaggtatgcaaatccacatccaccgtattatcggccatcttaaagatgttaatcagcaccgaggagccaacgataattccggtaaaaaacataatcagcaagaaagacccaatgattttaaaaatcgttgagaacacaattcctgctgttttctttgccgttgttcctgatgaagggtgacgtccattgggaaccggagctccggtataccggctgatatccgtttttcgcaacgactttcgcctcctatttcctggctttgccaaaatttaatcttttttattataccacagtttagaaataaaaaaatagtttccggttaattttgcataatttaacaattccttcaaacaatatttgtcgaggtgatgcgtttatgcaaaacgccagtaaagtgatcgtgggggtcgtttgcggcttggtcgccttaacttttgtatgcgttttggcgctttctccccaaaattccgtacaagcccccgtaaattctgcccctactgcttccagcgaaaaagccagttctcagattccttcctccgtccccgaagccaatgcaaaggtgacccgctatatcattaagagcgagggcaactctctttgcgtatactgtgaaggggaagacgctccgattaaaactgtagagctcgatgtgtccgccctacccccggtggaccaggagcttttagaaaaggggatccgcgtcagcagcaaagaggacttaaaccagctgctggaggacctgtgcagctaaatgggaggatagtgaggctatcctcccattccttatggctggtttacccttttgccgacagcttccggactcaaggctgatcaacgcaaatatggatgtagtcttatcgttgacaactgccgttaataagctttttcagatgtttcattatcaggcaaggacatttatacgaaccgcaaatggtcatggagaacggctgagaggcctgccttttccccggcctgtacgctctttttgacctatatgcttctttatggcaaaagctgttttttgccaatcagcatgggtaatttatatactaaaagtatattttatttatcaaaatacaaatagtgccattttgagacactttaaaagctttccttaacggctctaaccggaacgccggtcccggcctgaacgaaagcaggagcccgagtcctccaatgagggctcgggctccttaggatttacagctttatcaaagcaaaaggttcggtttcccgaagttatttcatgctctgctcgtactgctggatcattttcttaaccatctggccgcccacggaaccagcctgacgagaggtcaagtcgccgttgtagccctgcttcaggtttacgccaacctcagaagcagcttccatcttaaacttgttcatagcttccttcgcttcaggaacgatcacagaatttctagccattagaaagtacactccttaatttgtttgtttttgttttcaaaatttctttttctcgcgtttgcaatagtattgtgtgtaccttttcattttttagtacagaaaaaaattggcaaagcatttggaaaatatatggctaaaaataatagcttccttccacgccggaaagcagaagaatcccgcacgccgccatcagaggataagccggcgttttctgcgacaggcctacaatgatctccatcggctccaccacgctgccatccagaatccgcaaatcacgctgcaggctgaccgccgccctttcgtaatccaggctggcgatgcttagcgttcctctggcagagggcgaacaggttacggcgatctttcccgtgcctttcaaagccttggccgcctccttattttctccttccagaatgggaacaaagccatcggaaaacgcgcggctggcttcctgagaatacacaaagccattgtcaaaaaccaagattcccgctcccgaggtaatttggggaatgcctgtgcactcataaagcaggaatcggggcgtttgatccgggcaggaaacagcggcgccgtcgaaccattgtacgccgccgtaggcggacagcgcccgtctaagcactctgctcataatcccgtttttatttttcactccgcaatgaacaatagtaatctgccccaagaaacgccctcccgtcgtttttactcttattcacattattggcagattttactggaatatcccaacaaaaagggcgggattaatttcccgccccaaattttcgaaatctttgatagcgccgctccagcagctgctccaccggaagctttttcgcctcctggaaggtctcgtaaataagatttcccaggctttcataaagccgtccactatccgccgttttcggttcccggataatcttctcaatcacattcattttataaaggtcgtgagaggtcagcttcaaacactcggcggcgtccgccacctttgaggaatctttccataggatactggcgcagccctcgggagaaatcacggaatacaccgcgttttccatcatccagacctgatcggccacagccagcgccaaagcgccgccgcttcctccctctccgatcagcagggcgagcaccggggttctcagcgtcatcatttccatcaggttttcagcgatagcctggccctgtccccgctcctcggcccccaggccgcagtaagcgccggaggtatcgatcaggcacagcaccggccgttgaaatttttccgcctgcttcatcaggcgcagagccttacggtagccctccggatgtgcggagccgaaattgcgggccacgcgctccttgacgttcctacccttttccagtgcgattaccgtcagcggcatcccgttcaggctggcgatgcccgccagcacagctttgtcatctccataccgccggtctccgtgaagctctaaaaagctttcaccgaacatacggcgtatgtattcaattgcagtgggccggttctgatcccgggccgcgcataaccgctcataggccgtcatgttccggttcctcctttttgtgaagctgtaagatatgcgctaaagtctttttcatttcccagcggtggacaatcgcgtccacaaagcccttctcctcaagaaattccgattgctgaaagccctgaggcagcttctgccggatagtctgctcaattaccctggggccggcaaaggctaccaaagcccccggctccgccagaataatgtcgccctccatggcgaagctggcggttaccccgccggtggtgggatctgtgagcaccgtgacatacaaaagccccgcgtctgaatgacgctttaccgcgccgctggttttggccatctgcatcagggaaaggattccctcctgcattctggctccgccggaggcggtaaacacaaccgccggcagccggtggtccgcagcgtattcaaaggcacgggaaatcttttccccggtaatggttcccatgctgcctgccataaagttgctgtccatgacgcacagcacgcatggattcccatcgatttcagcggttccccagactacggattccttctctccgctgttcttcctagcgttttccagctttttgtcatagcctggaaaatcgatcaggtttacagactccagctccttatcccgttcgtgaaagctgtgccggtccgtcaaaatccggatgcgctgccgggcggtaaccttgaaatgatggccgcacttccggcacacaaacaaatcctctcttaaatcggaggaaagcagcatggttttacaggcgggacacttgatccataggtcgtcgggaacactgggtccctgagcctgctgctctccctccagctcgtttttcggctttttgaacagggaattcagcgggatgctgcttaaggtattggaaatggtctgagatatggaattggatatggtatccgtcaattgggtaaaatcactgggtttcacagcattttccctccttttatcataaccgtatacgggaaaccggcttacgaagccggctgtcaaattcccggaattttttaagctgggcagctcctgacggcgtgccgcggaaaatccgggcgtccgccaaggcaatcggctccttggctttgcagcttctcagaactgacctgcgtcttttctttcggctgctttcgaagcttttggttccccaggctttttccgccgcgggaaagtcctggctgccgtcccggtatttgctcaggccttccgttccttctcccgctgggccatcagcccggtggtgtaggtcccatccacaaatctcgggtcccccatcagctccatctggagctccgcattatggctgattccctcgattaccagctctccgagagcggttttcattttccggatcgcctggtcccgggtatctccgtgaaccaccagcttgccgatcatggaatcataaaacggcggaacaaaatagccgggatacacggcggtttcaaaccgtacgcccggtcctccgggaatgtgcagaaattggatctggccgcagcttgggcggaaaccgtgagcaggatcctcggcgttgacacggcactcgattgcgtggccctttaattgaatgtcttcctgagaaaagctcaactcgattccggccgccacccgaatctgccactgaaccaaatcgatgcctgtcaccatttcagtaacaggatgctccacctgaagccgggtattcatttccataaaataaaaatttccgctttgatcatataaaaactcgatggttccggctcccacatagccgactgttttagcggccttggctgccacctggatcatcctttgacgagtatcctgcgtgatagccggagaggggctttcctcaatgagcttctggttttttcgctgaacggagcactcccgttctcccaagcataccacatttccgtactggtcgcaaaggatctgcatttcaatatgcttgaccgggttcaagtatttttccatataacaggcgccgtctccaaaggcgctctgagcctcgctggaagcagaataaaaggcgttttcaaacgcgtccggagacgataccaggcggatgcctctgccgccgccgcccgcctttgccttaatcaaaaccggatagccgattttctcggctaccgccgccgcttccttgatatcggtgatgatgtcgcagccaggcgtcacggggaccccggcgtttctcatggttttccgggccatatccttatcccccatttgggagatcatttgcgaggttggtccgataaaggcgatattgcacttctcgcacagggaaacaaatttggcgttttccgaaagcaggccatagcccgggtgaatggcttgggcgccggtagccaccgccaccgttaaaatcgccgccatgttgagatagctgtctcctacctgggggccgccgatgcagtagctttcatccgctaggctgacatgcagggcgtttttatccgcttcggagtagaccgccacggcggagatacccatctcatggcaggcccggataatccgaaccgcgatttctccccggtttgcaattaaaattttagagaacaaggtgtcacactcctttattcttccggctttaccagcgcaaaggaaaactccgcctggacgcacacctttccgttgacgctgcccttgccctcggcaaaatagaaggcgccccggttcttggtcatggcgcactcaatttccagggtatcgcctggcagcaccggatgcttgaactttgcgttttttatgccggtgaaataagggatgctcccttgcaccttatccgccaggatcacggcgcacgcctggcccatcatttcgcacagcactacgcccggaacagtaggcttgccgggaaaatgcccctgcaaaaaccactcgtccccttttacggtgtaggagccgcggcagctgttttcatcctttttttccgcctcgtccaccagcagcataggcgggcggtgaggaataatccgcataatttcttcccgattcatcttccatcttcctttcaggaaagtttaaagagggtttggccgtattccacaatctggccgttttggacgcagacctccacgatctggccctcttcctcggcggcgatctcattcatcagcttcatggcctcgataatgcacaccacatcgccttttttcacctgagagccctttgtcacgtaaggctccgcctccggtgcggaggaggtatagaatacgcctaccataggcgctttgatctctttatagaaagcgttctccctggccgcggcctgcggctctgcggcggcaggctggacaggcgcggcagacgccgccggaacggcttccggcgccggggccggtgcggccgcaggcacggaatataccggcggctgaagcacctccgccacgctgccggttccggcgctgcgctccaggcgaagcttcagatccggaacctcgatctccagagcagtcaggctgctgtcttccataatccccaccagggttttaatctcttttacgttcatgctttactctcccttttcctcaacgcgtttgaataccaggcagccgttgtgcccgccaaagcccagagacgtggaagccgcgaagtccaccttcgcctccaccgcctggttgggcacgtagttcaagtcgcactccggatccggctcctgatagccaatggtgggcgggatcacgccctccttcagcgccatcacgctggcaatagcttccacggcgccggcggcgcccagcatatggccggtcatggatttggtggaactgatatagatatcataggccttgtcccccaaagccttttttaccgccatggtctcgcctttatcgttcagttctgtgctggtgccatgggcgttcagatacaggctgtccgtttccttatggaagcccgcttcctccagggcaagcctaatggcgttgctggcgcccttgccctccggatggggagcggtgatgtggtaagcgtcgtcggtattgccgtagcctacgatttccgcatagattttcgcgtttcttgccttagcgtgctcatattcctccagaatcaggataccggagccctctcccaaaacaaagccatcccgccgcttgtcaaagggaatagaggcccgctggggatcgttgatggtggacagcgccatgcagctggtgaagccggcgatagccagctcattcagggtggcctccgcgccgccggcgatcatggcgtcggcgtagccgtagcggattgcgtggaacgcctcgccgatggtatgtgtgctggtggcgcaggcggttaccacgcacatagacgggccctgagcgttatgcttaatggcaatggtgccggcggcgatattggcgatcatagaagggataaaaaacggagatacctttttcgggccgccgtcaaacagctttttgcagttttccacaaaggtggtcatgccgccgattccagagccgacatagactcccagccgttccggctccacagtgccgataatgccgctgtcctccacagcctgggacgcggcggccagggcgtactgggtataaagatcggttttccggatttctttcttttccaaataaagagtggggtcgaaattcttgacctccgccgccaccttaaccttaaattcctccgtatcgaaccgggtgataaagccgatgccgtttttgcccgacttcatccccttccaagtggtttgggcgtcgttgccgataggggtcaccgcgccgattcccgtgactactactcgattcactctggctcctccttacattgcatagccgccgtccacccggatgacctcgccggtaatataggaggcttcatccgaggctaagaacagggcgagattggcgatatcctccggggtgccgggacgcttcatggggatctgcgccttcatggcgtcctttaccttgtcggatagctgctgggtcatatccgtatcgataaaaccgggagcgatagcgttgacagtgatgtttctgccgccaagctctttggcggtggatttggtcaggccaatcaggccggccttggaactggagtagttggcctggcccgcgttgccgttcaggcccacgatggaagaaatactgatgattctgcctctgcgcttcttcataaagtgggagtaggtgtgcttgatcatattgaaagcacccttcaggtttacattgataaccatgtcgaaatcctcttccttcatggagaggatcagcttatcccgtacgatgccggcgttgttcaccaaaatatcgacgccgccgaattcctcgataaccttttccaccacttccttggaagcctcgaagctggaaacgtcgcagacatacatcacgcacttgaccccaagggcctcgatttccttttgggcctgctccgcctccgccgggtcgcctaaataggggatggcgatattggcgccctgacccgccagctttaaggcgatggccttgccgattcctctggatgcgccggtaatcagcgcggtttttcctgttaaatccatcattgttatttccccaacgcttctgctgccgcgtcgagtccctccttattttcaatttgatataccgttacctcgggattaatctttttaatcagcccagctaacgtctttccgacccctacctcaataaaggtgtcaacgccgtttgctatcatattctcaatagttttctgccaccgcactggattttcgcactgggccgccatggtttcctttttatcctccccgtagggctcggcggtaaggttagcgtataccggaagcctctcttcccttagggaaaccgaagccaggtattctctcaggccgtcggcggcggaatgcatcagcggagagtggaacgcgccgctgaccgccagcttgaccgccctgccccgctgggctgaggccgcctccaccacctggtcgatggtatcggccgaagccgccaccaccgtctgcttgggactgttgtagttcaccggccaggcattttcaatcggcccgcagagcgtctccacctgctggggagaaagcttcatcaccgccgccatagcgcccggattcttctgagccgcctcgttcatcagctccgcccgtttgcacaccatggaaaaggcctccgcctctgtgagcataccgctgaacgcgacagccgccgcctctcccagagagaagcccgccgcgcagtccggctggattccccgttcctgggccgctttcgccgccgccaggtcgcaggcgaacaggcaaggctgggtattgatcgtgacgttcaattcctcctgggtgccctcgaagcactgctgggaggtgccgggacggatgctgtccgccaggtcaaacaccgctttcgcggctggggagcagtcatacagctcctttcccataccgggagcctgcgccccctgtccggaaaatacaaacgcgattttactcattttatccctcctgacagctgagctcgtcgataatatccacaagctcgcctaccgtttcaatcgtctcatcccgctcgatgatgatgtgaaaagcctcttccaaatcgatcaccagatccacggtatccagagaatcaatgccgatgctttcaaaggtcgtctcccgggtgataaggctttcgtcgatatgcttgtaattagctaacagctttttaatcgtttccaacgccatcgatatcactccgcattccatctcagcacggcgcttccgctggtcaggcctcccccgaaggcagccatcgcgatataatcgccctttttcagctttccggcccggttggcctcatccagcatcatgggaatacaggccgccgacgtattgccgtaacgggtgatgttataaaaatatttctccggcgcaaaggacagcttagccttagccgcctcgataatccgcatgttagcctgatggggcatcacatggtcaatgtcgctttccttcagccccgcggcggccactgcgttctgcagcccggtaaccatggcgtttaccgcgaatttataaacctcccggccgttcatgtggagcaccggccgttccgacggatgccggtacatggggcaggcgttttcccctctgggaattctaagatactcataatctcctgtggtagtcagctcaatagacagcagatcgctgccctcggcaagcactgccgcgccggcgccgtcgccaaagagcacacaggtcgcccggtcgttccagtcagagcagttgctcacgttgtcagcgcacacgaccagcacctttttcacccgtttccgggcaaaaaagccggcggctacatccatgcagtaaagaaagccggagcaggccgcgtttacgtcaaaggccggacatctggcgcccagctttttctgtatcacgcaggcctcggatggactgataaactccccccggatggttccgcagataatcatatccagctcctcgggagcaaccttcgcgtcctccaaagcgtttttcgccgccgttaccgccagatcggtgatggtttccttggtgcagattcttctttccttaatgcctgtgcgcgtgctgatccattcgtcgctggtttccaccatggtggaaatttcctcgttggtcaaaacgtattccggaacacagcgccctgttccgatgattcgaaaactcatttgctggcctccattttttcaattctgtgctgtaaaaaattgttcaaccggccaattcccttcagcagcacctgtttttcctcttccgaaaagccctccaccatgttgtgggcgaggctttggtgaaacctgcggtagagacggtccacccgctctccctgctctgtcagcctggcatataccacccggccatcccgctgggccttggttttcagaacataccccttgcgggccagcttattcaccgcgatggtcacagaggacaaggtgatataacgctctgccgccaactcgctgatcgtcctgcctttttccttatttttcccaatcgcctgtagcatatgaacctcagccaaggagagatccagcttttttgcgttttccaccatttcctcctccacaaccgtgatgagggtgtaggcttcctccagctcctcaactaaattctggcagatcattacgtcacctcctgagaacaagccgataattagtttgacaatctaattattaattataaggattttgtgatagccttgtcaagaaaaaaatacctcccgaacagcgttcaggaggtatttaacaaattgttcaagttatgttcacagttaacccgcggcatactctgctccgaatatttacagcttacagcacgtttaaccacggcgttttatttcgatcttttctgccgctggtccgccaaaagcagatccaccatacggccgtagctttgtacgccatcctcctggctgttggcctgcagataggtattgttcaccgttctggaaacctccgacagccggccttcaaaccgttcccagtaagcggaattgtaagcccggtccctgcggacgccctcttccatgccgtcgaaaatctcctgggccgcttctggatcctgccggtaaagctggttggttgcatgggtgaacgccagcatggcggcggagtaccgcagatccggatggctgctttcccggcagcaaagatagcccaaaaagttagcttcgtcctcccgcatatagccccgcaggtggctcagctcatggcccatagtggcgggaatggaataatccggcacgtccacgttcacgttggcctcgaaggtataggcaaaaaacactcccgtaatatctagataagacattccccgtgacgccagcacggccttaggaggcccatagccgctccgcaaggttggatattggctttccagtccgtcgtaggcctgtctgaccgtctccgccagctcccggtcgctttcgaagctcagcttcatcacaccgttttcatcctcccgcaccagccggcgctctctgttcacatcctccagcagggtttggcacaggctgatcagttcttcctctgacgagggctctaccggcagtccgctggcctgagcaaaggtatccctgtggtagttgatgccgcaattcacggtaaaaaagaaaagcaatacccccagcaggcagcccacattaacagaaaaccttttcaggagttttccccttcttcctttcccgccgatcatacgggcggcaaaccggatcaggaaaaacagggccgccggcaccgccagataaaccaggaattccgccagggaaaacggcagcagagaggtgacaaaattgacgcccctggaccacaccggataaacggcggcggcgtagccctcggcaaaaccggggacattttgtgccagaagcaggagcagcgcccctaacggaatcaggcacagcattacaatagtaagaatttttttcataatctcctccaaatgaactgatagtcttttctcaacagcgccgaaacaaagcggataaagcctccaaacggaaacggctttacagccgatttctcagccggaaaacaaggcttagaaagccctagaccgccggtctccctctgccgccgcagccgttcactgctccttaaattttttgcgattcttttttagaattcttttatcacgcttaggaagcattgtaaatctgcgcaaaccagtttttccggccatctgtagactatttccggcggttgtgccagaaaaaggataaaacggttgaactattgaattgagttttagtatactgcccctttacggattccgcaaggtatgttataatcttaacacagcctaactatgaggcggcgcgcgctgtgccctgccgaatggaaaggccttgccagaaatcgtactgaacaatagggcgctttggcgtcccgactgcaaaggcgacgggaatcagaatgcttttacgctttagctttattgctttacaaaggctatccccgcgctttcgcgcggggattttttatcttcgccttattttcaggttacaaaagcttcctgcggcactcaaaagcaacaggaaagacaagctgaaaattatttttgcttctattccattgaaggctgataaaagccaaaacgcgcaaaatcgtattaaaaaattgaaacggaggccttgcctatggaaaccagaatcgctctcatcggcattatcgtagaggatccggactcagtccagcaaatcaacgctgttctgcatgaatacggcggctatatcgttgggcgcatggggcttccctatcgggaaaaaaaggtaaacatcatcagcgtggtggtcgatgcggaaaacaacgttataagctctctttccggcaaactggggatgcttccggggatcagcgtaaaaaccgtttattccaaggcaggcgcccaatgaatcggcgggatctgatcgacgcgctgaaggccgaggatttctctccctactaccgcctggcggataaaatccgttttcaggaaaaaggaaattatgtggatatccgggcgatcctggagttttcgaatatctgccgtcgaaaatgcgtttactgcggactaaactgtaggaaccaagccctgcaccgttaccgcatgacgcctgatgaaatcgtagacgcggcttctgctgccgcccgtgccggctaccgcaccctggtgatgcagtccggagaggatccatggtttacgccgaaaatcctgggcggcctggtgaaggagatcaaaaaaacaggaatggccgtcaccctgagctgcggcgagatgccggaggaggcttacgcgtatctgcgggaatgcggcgccgaccggtacctgctgaagcacgaaaccgccgaccctgaaatttactccgctcttcatccagattcctctttacagcagcggatagcctgtctaaaagtcttaaagcgtctgggttatgaaaccggcagcggatttatgatcggcctgcccggtcaaacagcggaaaccctggccgacgaccttctcctgcttcaggagattggctgcgatatggccggcatgggaccctttattccccatcccgacacgcctttgcgagagctttccagcggcagcaccgaaaccaccaaacgggttgtggctctcgcccgcatcctgcttcccaagctgaaccttcccgctaccacttctcttggcattctgagcggcagtgaaaaaaacgatgtgttctcctgcggagccaacgtggtaatgcgaaaggttactcccactaaatataagcggtattacgagatttatccggcaaagctcggagaaacccacgtaatcgaggaccgcaagcttttagaacagcagattacagcgttggaacgtgttccccgctgacaaatcatatttccatccaaaatatttttgaaagaaagaagatagagcgttatgtatgatgtaaaatccagcaaagcggaagaatttatcagtgacgaggagattttagacactctggactacgcggagaaaaataaatccaacaaggagctgatcgaagccctgctgcaaaaggcagcaagcctgaagggcttgacccaccgggaggcggcggtgcttctggactgcgatctgccggaggaaaacgagaaaatgtatcgtttggcggaacaaattaaaaaagatttctacgggaaccgtatcgttatgttcgccccgctgtatctgtccaattactgtgtcaacggctgcacctactgcccctaccactacaaaaacaagcatatctgccggaaaaagctgacccaggatgaaatccgcagggaggtcatcgcccttcaggatatgggacacaagcgcctggctctggaaaccggcgaggatccggtgaacaatcccattgagtatgttctggaaagcattaagactatctattccatcaagcataaaaacggtgccatccgccgggtgaatgtaaacatcgccgccactacggtggaaaattaccgcaagctgaaggaggccggcatcggcacctacattttgttccaggaaacctacaataagaaggcttacgagcagcttcatcctaccggcccgaaatccaactatgcttaccacacagaggccatggaccgggcgatggacggcggcatcgacgacgtaggctgcggcgtcctgttcggcctgaacctctaccgctatgattttgtgggcctgctgatgcacgccgagcatctggaggccgctaagggcgtcggccctcacaccatcagcgtgccgagaatccgccctgccgacgacatcaatcccgacgaatttgaaaacggtatcaacgacgatattttcgctaaaatcgtagcggttctccggatcgccgtcccctacaccggtattatcatctccacccgggaaaccaagaaaacccgggaaagagtgctccatctgggcgtttcccaaatcagcggcggctcccgcacctctgtaggcggctactgcgaggaggaggaagaggattccgcccagttcgaggtcagcgacacccgtaccctggaccaggtagtcaactggctgctggggatggggtatattcccagcttctgcactgcctgctaccgggagggccgcaccggcgaccggtttatgcgcctggtaaaaagcgggcagatcgccaactgctgccagcctaacgctttaatgaccctaaaggaatacttagaggattacgcgtcgcccgataccaaggaaaagggcttaaagctgatccaaagcgaaattcccaagattcccagcgaaaaggtccgccaggtggtgctgaagcacctgaacgaaatggaaaacggcatgcgggatttccgtttttaagaatatcccgcagctttccccatgccgcggtggttgaataatagcgataaaatccctgccggaggagcagctgttctttcgcgaaggtccgccgcccttcggggagctgtaataccactaatgccaaaaattttattgcaaatagcaaaacgcatgagcagcggcttcgctctttgcccgcgcaccaaatacaccgtgtatttttgaaaggaggctccagccatgagcctgtcaagcaccccaagcgccaaccgcgtccatatcggtttatatggtaagcggaacagcgggaaatcctctctgatcaacgccatcaccaaccaagagaccgctttggtttccgattacgccggcaccaccacggatcctgtttataaggccatggagattcacggcatcggcccctgcatgctgatcgataccgccggctttgacgacgagggcgaactgggcaggcttagggtggaaaaaacccggcaggctttggagaaaacagacatcgctgttctggtgtttgacggccgtcccgtcaccgaggaaaaagagtggctttctcttttgaaacagaaaaaaacgccgattctggccgtggtgaataagctggatcttttagagaacccccaagcctatgcggacgccctgaaaagggattacggcctttcccccgtactggtcagcaccaaaacccgggaaggcatcgacaaggttcgtgaggagctgatccggcttctgcccgaggattacgagcaggagagcatcacgggacatctggtgtctcagggggattgtgtgcttctggtaatgcctcaggatatccaagcgccaaagggccggctgattttgccccaggcgcagactatccgggatcttttggatcacagatgtctggtgatgagctgtaccacagacaagctggatgaggctctttccgctttaaagcagccgccgaaatggattatcactgattctcaagtgtttaaaaccgtttacgacaaaaagccaaaagagagcaggctcacctccttttcggtgctgttcgctaactacaaaggagatctctccgagtttgtccagggcgcggctgccatcgagagcctgacggaacactccaaggtgctgatcgctgaggcctgcacacacgctcctttatcagaggacattggccgtgaaaagcttccgcggatgctgcgaaacaaggtgggtcaggggctcgcggtggacgtagtgggagggcccgcctttcccgaggatttatccggctatgacctgattatccactgcggcgcctgcatgtttaaccgccgccatgtcatgtcccgtattgaccgggctaaaagccaaggcgtgcctattaccaattacggcgtggccatcgccaagctctctggtattttggataaaatcgatttgtaagctgagtcttaaaacaaaaagcgtagggaggatcagtttttactgatcctccctacgcttttcgcgtgctttcaccaaaaggcctatggtaatggtaaaatcggagatctgactttatttcagttatttgacgataaacctcctgatgattacagcattttgttaaacgcatcttcaaaattctaagccgcggggcgctacggctgcgggacctgcctgccctcatggtccacaaggtaggaaccggacagcagcagctgggaaaccggtacaatttgatatccctctccctggatagccgctatcgcggcgggcaaggtttgaaccgtggcctctgcgccgttgtgcagaaggatgatggagcctggcttcaactgggacgagagcctgtttttcatgttttccggagaaggatcctgccagtcgtagctgtcaatattccactggatacagtacattcccaggtcattggcggcttccaccaccgaattatcgtaatcgccgtagggcgcccggaataaaataggactaagtccggtgatctccttaattttttcattgcattcggtaatttccgccagctgctgttcctttccgacctgaggcatatggggatgtgtgtcggaatagttgcatacgtcgtgtccctggccgctcatcgctttcaccatttccggatattcctgggcccattcccctgtgacaaaaaaggtgcttttcacttcgtattgctccagaatattcaggatatcctctgtctgcccgtttccccaagcggtatcgaaggtaagggaaaccaccttatcctctctttgtacggaataaatcgggcttttccgcggagacgccaccgtctgcaaaatagcgcccgccccttggaatccgatcattaccgccagcgctcctaccagcacacagcatccaaaggctaacagcttctttttggtcagcacaaaaaatctcaccgcaatccccccttagtgaagcttatgccttaagcggcattcttatgttttgaaaggcaaaaaaagccgccggattcggaatccggcggcttaagctttttctaattcttgtttttcatcaactggtttaattcctccaggaaggaattaatatccttgaactgccggtagactgaagcaaaacgcacataggctacctcatccacctctttcagcgcctccatggcatactccccaatcagagtggaggaaacctcccggtcgagagaattttgaagcttcgcctcaatatcatccaccattttttcaatggcggcaatggaaatcggccggttggcgcaagccctcagcaggccgttaatcagcttattccggtcgaacacttcccgggacttatcctttttaatgacaattacaggaaccgtctcgatcacctcataggtggtgaagcgcttgccgcagcccaggcattcccgtcttctgcggattctttccccgtcgtcggcgggcctggagtccactaccctgctttcctcataaccacaaaacggacacttcaaaactctttccctcctttaataaagcgcgtgacaaaaatcaatttcacgataaaagcgaaagcattgctacaattgtagtataacacacagtttctttccccgcaagaaaatttatccaaagcaggactcaaagccagcggattgaagaaagcggtaagcgtctgccagctcggaaatctgagcaaaatccttccgatacacctcgataatgaaatcccctcgataatggttctctctgagaatactcagcagccgcgcgtaatccatttccccgcgtcccggcagcaggcagtcgcgtccgggcctgttgtcattaatatggatatgaactaagttttttcccatagcctcgcacatttcatagggatcccttcccgagcggacggcctgcttcacatccagcacaaagcttgcgtcttcttttaaatattcccgcatattccgtataaagccgcagtcctggctgcggaaggcgtttacgttttcctgagccagcgtgacgccgtattctctggcgatccgggaaaggattccaaaccggtcatagtattcccggtcattcaggccgcttttttcaaagctgcggtcaccgtgaatcactaggattttcgctcccagccgccgggccatttcaaaatacctgcggtaaaaggaagcgccatcctgaaatcgccgctcgtaattggaaaacaacagataagattcaaaccctgaggtaaatggatgtaaggacttcacccggcatccctgaggcttcagcttttcttccagcatggtcagaaattccggctccatctcggaataggtattgataaaaatttcgaattcccgaaatcctgaatcgatcagggtctgcaggctgtcctccatcgccataggataaaggcaggccgttgaaattcccagcgccaaagcttttcctcctttcaaaaaggccatccgcgcgccgcgaatggccttttcaaattctctatgttagctttaccggatttatgctttttttgcatccaattttttcgcgcggtaccggcgccataccacccaaagagggccggtaatacaggtgctggaatagcagccgcagatgataccgaacatcagcgggagggcgaaggttaccacagaagacaaattgtataccaggcccaccacgactacaacgcctacggccattacagtagccacagaggtattgatggtacgggtcagggtctgattgatgctggtattgaccagttcgccgatctcggctctggggcccataatcctcctgttttcacgaatacggtcgtaaatgatgatggtatcgttcagcgagtagcccagtatcgtcagaaccacggcgatgaaattgtcgtctaccggcatccggaacaccacaaaggtaaagtaaataaccgccacgtcgtgcagcagcgcgataacagctaccacgccggcggaccagccgccgattttacggaaccggaaagcgatataaataatcatcagcacggcggctaagcctaccgcgcaaagacatttcagcaggaacttttccccgttgaccgggtcaaccgagtcagactccagcttttgaaagccgttatccggatatttttcctgaatcgcgtcctccatagccttttggccctccagggacaaggcgtcgttgccggcaaactcgatagatacgttattgttaatcgtgccatcctcaccagccacaatgtcggtgctctcattgacattgacgctttttccggtagtttcctctaccagagctgccagctcgtcggtattgatctctccggtaaaagagtagttcacgatcgcgccgccggtaaactgaatatccagcctcgcgccgaagatcacattaaagattacgccgatcagcaatacagcgatagaaatcccgaagaaaatcttcttattttcta

SEQ ID NO: 763 - DNA, 21225 bp, unidentified
  source 1..21225: mol_type = unassigned DNA
  misc_difference 16124: note = a, c, g, or t
  misc_difference 16125: note = a, c, g, or t
  misc_difference 16126: note = a, c, g, or t
  misc_difference 16127: note = a, c, g, or t
  misc_difference 16128: note = a, c, g, or t
  misc_difference 16129: note = a, c, g, or t
  misc_difference 16130: note = a, c, g, or t
  misc_difference 16131: note = a, c, g, or t
  misc_difference 16132: note = a, c, g, or t
  misc_difference 16133: note = a, c, g, or t
tgtcgtccttgagcaggatgttgtatcggggctggtggcgcttgatgagggagttctccagtaccagggcctcaaactcgctgtccgccacgatcacgtcaaagtggtcgatctgggacaccatggcccgggtcttctccgtgtgagaggcggagtcctggaaatactgggacacccggtttttcaacgccttggccttgcccacatagatcaccgtgtttttggcatcctgcatgatatacacgcctggcttcagaggcagggcgtgggccttttccttcaattcgtcaaatgtcatagggggcctcccggggagatgttaaaaaaggcaccgcgcgaagcggtgcctttcggatctgcgctgtgtggctcactcggaaaaatcggaagagatcatcttgaacagagcctccaccgcttccttctcatccggaccatccgcaatgagcttgataggagtacctttgacaatacccagggagagcacgcccagaaggctcttggcgttcaccttgcgctcgtccttctccacccaaatggagcttttgaactcgttggctttctggataaagaacgtggcgggtctggcatgcaggcctacctggttattgacgaccgcttcctgactatacatatccgtacctccgcactcgatttgtgtgttactagcataccaaattcatcccgcatccgtcaatgacatttttcacaaatctgccttcttttctcaacaaaaattgcgggaggtccacggcattcggcggcagatgcccttcttcccggtctccgcccaccgctgggccggccgtgcgcgcttctgtccccctggaaagagggcccggccccttaccgcagctccgccacggtgacgccgtcctccccctcgccgtagcggccggggcggaaggatttgatatagcggctgcgcttcaaatgctcccgcaccgccttgcgcaccgcgccggtcccctttccatggatgatggtcacgctctccagcttgcccatcatagcagtatccaggaagcggtccagcaccgcgatggcctcgtcggtcatcatgccccgcagatcgatctcagagggggctgcggcggcgcgcagggtgtgctgggcccgctggacgatgcgcctggcctccttctggctctgggtctcgccctccaccacccgcacctcgtcctgcttggcggtgatcttcaagatccccgcctggagctggagggtgccgtccttgtttaccgacaggacgctggctctggtccccatggataccagctccaccgtatccccagcccgggccggccgggtggggggcggggcctccggctcctgcgccgccccgccgatggaccgctccgcctcgttgagcaggcggcgggcctccgcccgtccgtcgttcacctgctgccagtccaggtcctggcgctttttcagctccttcagttcggagagggccaggtcgctggcgtctctggcctcctggatgatggcccgggcctccgactgggccttctccaccaccttggagcgctcctcctccagccgcttccggtactcccgggccttgcccgcagactgctccatctccagcttcagccgccgggcctccgcccggtccttctccatctcctggcgctgctggtccagcttggtgagtacgtcttcaaagcgcacgttctccgcatccagccgggcggccgcccggtcgatgatctcctccggcaggcccaggcgccgggagatagcgaaggcgttggatttgcccgggatgcccattaccagccggtaggtgggggccagggtgtccacattgaactcgcaggaggcgttctccaccccgggggtggtcatagcgtacaccttcagctcggcatagtgggtggtggccgccaccagtgcccccagctcccgggcactctcaatgacggccgccgccagggcggcgccctccaccgggtcggtgcctgcccccagctcgtcgaacaggatcagggtctgaccgtccgcctccttcaggatgcccacgatgttggtcatatgggaggagaaggtggacagggactgggcaatggactgctcatccccgatgtcagagagcacccggcggaagacccgcaccgtgctgtccgacttggcagggatgtgcagcccgcactgggccatcagtgtaatgaggcccagggtcttgagggtcaccgtcttgccgccggtgttgggaccggtgatgaccaaggtgtcgaaccggtctcccagctccaggtcgttggccaccgccttctttttatccagcagggggtgccgcgctccccgcagcctcaggtaccgttccgacaggccgggctggctggcctccatcttcagggagagctgtccccgggcgaagatggtgtccagcaggatcagcagggtatagtcctccccgatatcctccttatgggcggcgcactgggcggacagctccgccaggatgcgttcaatctcctttttctccctggccgccagctcacgcagctcgttattggccttcaccacccccatgggctcaatgaagaaggtggagccgctggaggacacgtcgtggaccaggccggggatggcgttcttgtgctccgccttcaccggtaccacgtaccggtcggagcggatggtgatgatggactcctggaggtatttggactggttggaggagatcagccgctggaggatgtcccgcaccctggcctcggtggagcgcatgtgccgccggatggaggccagctcgctgctggctgagtcggcgatctcctcctcactgaggatggagttggtgatgctgtcctccaggaagcggtttggggtcagggaacggaacaggtgggagatgacggtcttctcctcgctgtccccgtagtcccgcgccccccgggcgcaccgcagcacagaggcgatgtccagcagctcccgggtagacaggctcccccccatgtccgcccgctggaggctggccgacaccggcttcaccccggagaagccggggctcccccgcagaatgagcatctttaccgcggcggaggtctcctcctgcgcccgggccacgtcgtccagatcagtgaggggacgcagtgccaggcagcgctcctttccctccagggtggccgcgcagtcggcaagaagagccagcacctggggcagctccagggtggccatagatttttcaaacagttcactcatatacaaaactcctggatcgttggtcacattccattttggcggttcaaggaccgccgtacacgttttattgtctcataaaagcctccggttgacaagccccgggcctcgctccctgtattttttgcccactcccgccggccgagctccacatacgcccgccctgtcaccatggcggcagggcgggcgtatgctatttgacccggtcccagccctcctggtccaggtcctccactgcactcacccttttgcagtaccaaccaggccctctcatagcggaaggtccaccgcagaagggaaaggccaaggaatgcctccatgagcagggaacatgaccacagcacaatgcttcccgctttcatgacagcggcaccgcccccgtcagatccgggggctttttcagcacctctgcatgagtaaaatacaggcggtcccgcgcgggataccagaaatactcggcccccacccagccctgctccagcagctccatcaccacccagacgtgctcgccgtcctccgcgacgcaccagacctggagggccaggatgggccccagtcccagatcctgcctcacctgatccatcgtatgggccaccagggtgtccacagtcccgccccctctttcccaggtgagcagcgcgtcctccgccagccccccctgggtggggccgcccaggaagaagaggaagagcagcaccgtcgtcagccaggagaggccccgccaggctccccctgttcgctgcgggcgggccgctgtcttgacccgcaccgctgtatcgcactccccgaagcacaatggcgtgctccacaggctccgcccggcccccatctccaccagggtcctggcgtactcccgccgttcctccggctccagctccttcagaacagccgcgtcgcatgccagctccaggtcccgacagaaatatttgtagcccagccagatcagcgggtcccaccaatagagaaatacccccatgttggcccaccccttgaaccagaggtgccccagcctgatatgctccagctcgtggcgcagcaccagggctcgctgctccggggacagctcccgctggaggcagatcacatattccaccgaccccagccatcccctgctggtgaggaagctggtgggcagtccctccaccagccggatctggatcttccgcgtctcctcctggaggacatgcttggtcagagcctcctctccgcccagcagctcccccctgcgcagcagctccttcagccgcctgtcctgtcggcaggaaaaaacgatccccagcaccaggacgcccagacacagcagcgcggccgccccggctatcccctccccgatttccaccggcaccaccgccccgccgggcagggacagatggtacacccccgccccgtggtaatccatgggcagataggcggggattgaggtcgtccatccgccgtcctttacccgcccggtgatcaggtcacggaaggtgacgggcaggatgtggaccaggctgagcaggccgtaaaagctcggactgtacaggctgatccagcccaccacccaaagggccacccgctgccccggggagagtatccgcaccagcagggggcgcagcagaaacagggcggcgaacatcattcccactgccagccccagattgatcatcataaacatgcccacaacaaaaaatcggccgatcatatccgctcctctcctttctctcaggctcagtccacgggataaaactgagtgcagtccgccaggtcatggggccggccctcctgccggagctggatcatccccatcttgccgctctcccccagcacgcaccggaacgcccgccaagtgcccacgctggtctccagatagatccggcctcctgtgccctcccacttccaccagccggcggcgatgctcaccccggagagcaggtcccccttctcctccagccgccggatcagctcctccaccaccttctccggcgcctcctccatctgcgtcaggtttcgggagagatcagtctctgtcactccccccggcacggccggcgcccccgcaaagaggaggaacaccagggcggcacagaacagcccggtgaggcggcgcacaggggtcaggggacgccaggccaccgccgcccgcacccgcagggctccgtcgcactccccaaagcacagcggggcctcccacaggcgccgccccgcccccagctccaccagggtcttggcgtactccttccgctgctccggctccagctgatccagggtcctctggtcacaggccagctccatatcccggcccatataccgaaatgccagccacaggatcggattccaccagtggagcagcaggcaggcgcccctgagcccggagaagtacccatggcggagatagatgtggttcagctcatggcgcagcaccagggaaagctgctctttgggcagctctgcctggaggtacaccgaatcccccatgacaaagctagtgggcagcccgggggtgatccacgcccggatctttccgggctgcatccagagctccagccggtcggcccccagggccaccagctccttctcctccagctcgctcccctgccgcccccagcacatcagggcgaaggaccggtgacaataccacaggagcagccccaccgccaccgcggcccacaggagggacagggccagcagcggaccgctgttcagctccaccgccgcagtttccccgccgggcaggaccacggggtactcccccggcccgtcgtaggcgggcggcaggaaagccggcgcgccgaatatcccgcccggccggggtcccagcaggtcccagaccgttaccggcagcacccttaccaggctggtcagcccccacaggttcccaaatatgccgatgctccacgctacataccagactgccacccgctgctggggggtgaggagccggaggagcagagggcgcagcaggagcaggacggccaggacgacccccagtgccagccccgcgttcaggtgattcaaaaatatggtgagccacgtgttcagtccgtccacggtcagtcctcccaggtgtgctggtcgatcaggtccttcagctccagtgcctcctccatggtcagcttccgcccgctgaaaaaggcgttgaggaagggggccatcccccccgccttcaccgccagctcctccccttgggctcggatgacctgctcccgggtcagcagcggggtgaccaccgcgcgctcgtttctggccgcccccttccggcacagcttgcgcagcaccgtataggtggtgctcttggtccagcccagctgctcccggcacagagtcaccagctgggtggaattcactggtgcactttcccacagcacctccatcagccggtattccccgtcaaacagcttttccaccgtccgtccccctttaggtttattctaataaacctctctttcactgcaagtttatcgtaataaacctctcttgtcaagagcctgatttccctatcggactccggagcgggcagcggcacaccctgcataggcccgcacaggctcgcccgtctcatccctgaaaacgatttacgggcggccccgcggggccgcccgtaagcgaaaggatcttttttgttcaagctgattcggtaagccggagccccccgtctccgctcctgccgcgcgttccagtcaaaagctctattgtttcctctccagcagctccagcagcaatcgctcgttctcccgggccgcccggctcagggcggcggatttcacccgcaggcgttccaggctcccctcatagtccgccatcaggcggtccgcggcggcgatggcctcctcccggcggaagtgatgcacatcaccggcggagggcatgtccagctccttcagatagctggccaccttgggatcatagaccaaccccagcacagggaccgccatccgggcggagaaaatcagggtgtgcagccgcatagccaaacacagcctgccctcccccagcacggccatcagctccctcggggtgcaggtggcgtccagcagatgggaggggcactccatagcgctccgcacctgggcggtggccgcccggtcccggcagggctgcatcatcaggaacaggatctccatcccgcaggtccggtagagatggtcgcacagggcggccagctccccggcgaagctgcccgtatccggccagtcccgcaccgagaccgccgcgaagggagtgccccgctccagcccggcggaccggagcagttccccggcccgctccttgggggcgggatccaggttgaacaccgggtcggccgtgacgtggagatctggacgctccacccccatctccaccagttcccgggcggagctgtggtcccgcagggtcaccagagcggcccgctccactgcccgcttcacccggcggcggttggccggcttctgcaccggcccgatgccgttggcgtagagcatcaccggcttccccatccactcggcacagcgcacgatggacagatagtagaggagggagcgggtggaggtccggtcctggagcaggctgcccccgccggacagcagagcgtcgcatcggcgcagggcaccgaacaccttccagaaacggaagcgggggatggcattcatgccgtagtgccgctgggtctcgcgggggtcgttggacagcacggtgacccccacctccccactggcctccagaatgctctggtggatggcctccaggatggcgtcgtcccccgcgttggaaaagccgtagtagccgctcatgaccacctggtacttccggcggcgcacctgctcatacatggccagacagtccgctgccatccggcgcacggagtaatactggaagatcacctcccggccgtaggcccccgccgccgccttctgctccggggagagggacaggacggcggccatatcggccagcagacgctccggagtggacatgggcagtccccggcagcagaagttgcccagtcgggcctcctccagcttctccggaccgaagaggccctgatacccctcgtttcccgccacgatgacgggcttggcggcggacatggcctccagcgccgaccgggacacccctacgaagatgtcccccgctgccacgatctgattgatgtcggtgcgtgggccggtcatcaccacgcaggtgcgtcccagccgggcgttcaccgcctccgcctgctctttcagctcccggaacacgttgccccctccggcgatgagcagctgcaccccgggcaccgcccggtccagctcctccgcgatctggattagctgtcgggccaccagggcccggtcctcgtccatccggctcacataggagaccactggcctggaccggtccaggccgaactcctccaccactgactggccggaagtctgtggagaaaacttctctgtatcgatgccgttgatggtcacagagatgtgctcctccggcaccccgtattcccggatcagatacgccttgatgtcatcggagacggcgacggtccgctgcccccagttggtgaggtagcgcagcccgcccttggtggtgaacacccagtgggcggtggtgacgaaggggaacttcatcgttctctggagggtgccgcacaggaaggcggggatgcgggcgtgggcgtgcaccacgtccggcctctcagtacggatgatctccttcagcagctttcgggagcggagcatgcatccggcgtcccgccggtgcatggggacctggtagtggcggatgcccgcggccacgatctcagggacatagacaccgccgttggaggccaccacgatgtcgtgtccctccgccttcagctccttggccagctctacgatatgggtctccgctccgccgatatccaggcccatagtggccatcaggatcttcatgtctgccgcccctttttaaaaaatctctgtcactgtgccgatgaactccgcgtattttgtgcagaaggtccgggaggagttgacccccagctcatacacccgattcagggtatagcgtcccgactcgctcaccaggccggtgccctctacggtgatcagcatgtccacgccatcctccaccgtggcggccgccacggtgccgtcgtcaaactcggccagcttggtgccgggcatgagctggatgtcggtgatggtgcccagggtgccgccgctgctccggtccgggtcaaagagctggtcgccctcccgcactgcttcggccacataggtccgtatcccactggccaggatctggtaggtgatggtctggtccgccgtgttggtgctggtgatggccatctgggtgttcttggtgtacagggcaaagcccatcaccgccaccactacgatgaccagcaggtcgatgacgctgatgaagccgaacaggcggccgttgcggtcgatgatctttttcatccctgctcccccctctcaatggaaaccacgggcccgctgcccatatagccggagccccggacataggcggtcacgcccacccgcagcttgaagcctccgcccagcaggagggagtcctctccctcggtatagggggcctccactgtcaccaaagcgtcctcgtaaccctcgatcccagcgaggacaaaggccttgtcctcgtgatcctggatcagagcctgggccggcactgtctccacagacaccactgtgcccagctcgtagttcttcacggtgtccaccagctggtccccgggcttgatccgctcgctggctccctggatcatcttctgaaatcggatggtgtactgcaccgtccctgccgcggaaacggccccttccgccggtgcggccgccggctttatggcgctccacaccaggaatgcccccaccgccagggccagtacaaggacgatgctgtcaaacaggttcagtcggaagcggaatttcggcttatttggttccatgagatactcctttcaggacgtcccggtagacgtcctccacatgcttggcaaagatctcgccggtatagttttcttcaaaggaccgtttggccccctctcccagcctgcgcagcagggcggggtcatccatcagccgtgccacacagccggccagggcctggctgtcccggttggggaagaccaggccgttctctccgtcctggatcagcagggggttgcccccgatatcgctgaccacggcgggcaggccgaagctcatgccctccagcagggagaggctggtcccctcgctctcggtggaggcgttgatctgagcgtccatggcccacagggcccgctccacccgctcaataaagccggcaaaaaacactgtcccctgggggaaggacaccgcccgcagccgcagggcagcctcggccctgccctctccggccaccagcaccttcacccggcggccctgactgagcagctgctccgccgcatccagcagcacgctgtgccccttgtactcctccacccgggccaggatgcccaccacgaagtcctccggcccaaagccgtactccgcccgcagtgcggtccgctcctcctccgtaggggccgccaggggagccacaccgttgaagagcacgtggatcttccgatccggtacgccggactggagcagcagctcccgcaccgatgggctcactgcgatggccccgtcggacaggcaggcatccagcacatggcccgccagacggcccaccgggctacccatcacccgccccagggggaagacacagtgcttggtgtagatcacctttttgccgcacagccgggcagccatccgtgcggacatggaaccgtgggtgtggaccagatccgggtccaccgcccggatgacccggcgcaggggagccaccgccgacagatccatggaccggtccgccatggcgtcgatctcatggaccggcacccccagcgcctctacaggtcctttcagggcgctgccccgtgggagcaccacctgggactggaactggctgcggtcctgacagctcagatagttgagcaggctgcggccgccgccgccgatattggtgtcactgatgacctgtaaaatggtattcaccggtcctccacctcctgttccgccagccgggcaaagctggctcccagggccagcaccgcgaagaagagcagggccaccctgtagttataaaatgtgtagtcggtcatgctctgggccatgaacccgcccacgccgccgatggcgccagccagatagcaccgggcccgccagctccggttccgggagagtgccgagcagatcacccggcagaaaatgaagatgatcagcaggaacaccaccagggccaccacgccgccgtccgacatgatctgcaaaaagaggttatgggcgtgctgagcattggctgcattgtagctgtatgccgggtagaccagattgaaagccccggtgcccggcccgatgccgcacagccagtagtccttcagcatggctatggtgcccatccagatggacacccggtaggacgtggaggtgtcctccaggtttccgatgctggtgaagcggctgatgacggtatccggcagcacaaagtagagggccaccagcgccactgggagcaccaccggcgccagcaccagcacccgggggttgaggagcaccaaaaagatcatccccgcgatcagcaggcccagccagccgccgcgggacatggtgagcaccatgcacaggcacatcaccccgcagcaggccagcagcaccagccgtttcccggtccccttggcggtgagcagggccgccccgcccagggagatcatcaaaatcagatactcggccagcacattggggttctggagggtggagtagacccggatggtgaccgaggagaacatgtcgctgtccacccaggcggcatcccccgtggcgcccagcacatactggcccacgcccagcagagccaccacgcctcccgccagcaccatgagaaacaccagctgttccgcccgctcccagctgtccacggcgttctccaccaccaaggcgaaggccatgaaaaagaccatcagtaggccggggaacagactctgccggggcgtgacggaggtggccgtggccgccagatacaccgccgcgtacagcaggatataccggttgaccggggagtaggccaggggccgtgcccggtcccggaccagattcagtgccagggaggcgaaagccaccgccgccagagccagtaccgccatagtgggcagcaggggggccagcaccaccgccgcagaacaccagagggtcaggcacaaaaagatgctccccccgaacaggcgctccagtcccagcctgcggtacagggcgcacagcccgccccggatcaggtcccacagtcggaaaaagacactggattccgccgcctgtcggcccgccattggggccacgaaggcccggaccacccgacttctctgccactgtccgctgaaccacagacagatggcggtgagcacccgccccagtatgctgctgttccagatctctatcgctcgattcattgcatcagcctcgtttccacactcgtttcaccatcttcagggccagctgcccctcgtccaatctcagcagcaccgccgccgggaagtagacggccacgccagccgccgccgaagcccccagggtgagcagctcccccgccttgccgggcagcaggccctctgtcaggccggccaccgcccaggcgcccaccgccatcagcgcggtggccagcgccatcttccccaggtccagcaggaaactccggctgaggaccccctccccccgcagctccagggggatgtccagcaacagggcgtagacggtggaggatacagcggaggagagggccagaccagccacccccatcctctgggccagcgccatgcacagcaggacattgaccaggatggaggccgcaccggccgccaggggcaccttccccttctgccgggcgaagtaggcccggctgaggatattctggaccgcgtatcccgtcatccccagcgagacccagaacagtccctgggaggtgatggagacggaaaaatcatcaaaagcgcctcctccataaataaaggagatcagcgggcgggagagcaccatcaaccccgcggacatgggcaggacgaagaacagacagccgtgcagggtggtccgcagcgtctcccggaactccccctcctgctcccggccggtgaggcgggacagcttgggaaatatcacattggtgacggacaggacgaacaccccggcgatcaccagatacaagttggtggaaaactcgatggcggacactccggccccctcgtacagtcgggacccgaacttggagttgatagtcaggttgatgggctgcacccaggtggagaccatcactggcagcatcagggcaaagaccttccgcatcccctcggagcgcagctccagccccggccggtagcggaagcccagccggcgcagtgagggcacctggaccgccgcctggaggaaccagcccaccagaaaggcaacggccaggccgtagatgccgaactgctggtccagcgtcaggtaatagagaatgatgaccaggttggacaccacgctgatcagggcagggacattgaactcccccagggactggagcactcccacaaaggagaaggccaccccggtgaacagcaccgtggggaacatcacccgggtgagggagacggccagctccgccgtctgggcatcatatccgtcggcaaacaggctgaccaggggccccgcgaacaggatgcccagcaccgacaggaccgcagagagcagccccatcacggtgatgaagcagcccgcgaagcggaaggccggctcccgccccttccgggtgagatactcgctgaacaccgggataaagcaggccgagatagcggaggcgaacaccgcatcaaaaaacacccttgggatccggctggctgtattgaaggcgttagccgccatccccgtcccgtagtaaaccgccagcagatggtcccggtacagccccagcaccttgcccaccagggcgatgatcatcacgatgctgatggtccgtgtggcatggtcctgccgctcctccatcgcgccacctcctatggatccccaataaaatcgttttattttacaccacccctccgactttttcaaccgttggcccgtgtgttcataggatgttcacattttcccgaaatctgtacacttttttccattgaaagtgccctgctccactgctataataaggaattagttttgctgtccccaccacctgtcctaaccatgtgaaaaggagtatccatgaaacatcgtcatttcacccaagctgcccgccgcctcaccgccttgacgctggcgctgctgctggcactgccctcggcctacgccgccgcaggctccccccagctgcgcaccacccgggagctggctgacggcctgacctattccaacaccatcaccagccactccgccgcgggccgggtggagagcttctccctggaactctctccggatagccgggaggtggagcccatcttcctccaggcatccggcaccgcctacggggccggctccatcaatctggcggtcagctatgcccagagcctgggctaccacgtgctgggcgccatcaataccgacttctttgctccctccaccggcgtgcctctgggcatctccattgaggacggcatttataaatccagcccggaggccgaggccgccgtggtcatcaccgacggtgaggtggagctggtagagcagtcccaggtcaccctcaccctcaccaacgagtccaccggaggccagaccgttctgacccacctgaacaaataccgggccgactccggcgggctctacctgttcaactacgatttttccaccgtctccacccacaccagcacccccggctggatggtgcgcatggagctgaccgatcccgacgacaccctctccgtctccggtcgtctggaattggaggtcactgagctgctccgcaccgacacctcaatggtcattggcgagaacgagtacatattgactgccgccgacgccggcggcctggagtccgtattccagagcttccaggtgggcgaccgggtcaccctccgcaccgactgcacctcctccaccctcgaggacgcccagtgggccagcggcgtgggcgatgtgatggtccgggacggacagatcactgactccactgcctggacctatgtggaaaagggccgcgacccccgctccgccctgggcgtgcgggaggacggcaccctggtcctgtacgctgtggacggccgcaggagcggctactccggcggactgagccagctggatctggcggaggagatgctctcccagggctgcgtctgggcggtcaacctggacggcggcggctccaccgccatcagtgtctgggtccccggccaagagggcccctccatcgtcaacatcccctccgatggcaagccccgggcctgcgccacctacctgctcctggtctcccgggatgagggtgacggcgatccggaccggctggtgctgaaaaatgacgggctggtggtcctcaccggcacctctgtggacctgggggagacggccgtgctggacagcggtctgaacatccttcgggatgacccaggcgaggtggagatctcctccctggacgacctgggccgggtggaggacaacatctacaccgccggcagtgacgcgggcaccgataccctggagctctggtccccggatctggatgtggagggcaccgcccagatccacgtagtggaccatctcaccggcctcaccgtctcccgggagaacagcaccgacgccctcacctccctcaccctggagcctggagaccaggtccagctcactgcccagggtacctactggtcccgggctgccatgcgggacgtgggagccatctcctggacggtggagggcagcatcggctccatcaccgaggacggactgttcacnnnnnnnnnntccggaaccctcaccgcctctgccggcgggcagagccagaccatcatggtctccctggagaactcccacgaggacgtgcccgaggggcactgggcctacaccgccgtggactactgctatgccaacggcctggtgggcggcatctcagacactgagttcggccctgacctgcacatccgccggggcgactttctgctgatgctctacggcgcggcgggtaagccggccgtcacctcccccgcctcctttactgacgtatccccctccgactactactacaccgctgtgtcctgggcccaggccaacggtctggccaccggcgtgggggatggcaccctggctcccgcctctgatgtcacccgggagcaggctttcaccattctgaaccaggccctgcctctcctgggcatcacctgccagcccggcgctctcaccgttctggatcagttcggcgaccgcgcctccctctccgactgggctgcccagcacgctgccaccctggtggcctatcagatcgtgggcggcgacaccgacggcaacctgaatcctcaggctttcctcacccgcgctgagatggccgctctgctgtataagctgtccaactatacgcctcctgccgatctggaccccggcgacctggtccagccggaggaggaccctcagccgggcggcaccgccgcccccggccaggcagagggcccgggccaaactgctgatccggaccagccggaggacccgggacagaccagccagccggaggagcccgctgtccccgtggagggcatcaccctggacaccggcgaactgaccctccaggccggctccagctatcacttcacccccacgctctcccctgagggagccgccggcaccgtcgtctggaccagcagcgtgcccactgtggcgccagtcaccagcgacggcaccatcaccaacctgaacaccaccggcgggcaggtgagcgtcaccattaccgcctcctgcggggacgcctgcaccagcgctgtggtcctctgcgacaccgccgcctccgccggcaccgtccgcggggcggagaacggcctgaacgtccgttccggccccagcacctcccactctgtggtgggctatctgcgggaaggaggcagggtcatcctcctcgctccgccggaagacggctggctccacgtctcctacctcacccagtccggccaggccgctatcggctatgtctccctggactatatcgtactggactgatctcaaggcaaataaacagcagaaggccgccggcgatgccggcggccctctgtgctttcttatctatcctctctgtgtccagctccgctgccttcttcagaagaacagcgccagcactgaggtgaagatcccacacacgcagatggcgatggaactcatggccccctggagggggccgatttccagggccttggaggtacccacggcgtggctgctggcgcctatggctactccctccgccaccgggtcggtgatgcggaagcatctggcaaacagaggggccagcatggctccttccactcccgtgatgaccacggcggccgcggtgatgccggggatgcctcccccgctctccgagatgcccagcgcgatggctgtggtgacactcttaggcagcatggaggcagcaagcatctcctcggcgcggaacagccggcacagcagcagcacggagcccatgctggcggcgctgcccgccagacaccctgccaacacggggagaaagtgttcccgcagcacctgccgctgttgatagatattcagggccagcaccgcggtggccgggcccagcatcagctttaccagcccgccgccggcattgtagcactccagggggacgcgtaatactgtcagcgccccgatcaccagcagggaggccaccagcactgggttacagatcagcagtcctgtccgtctctggagctccacccccaggcaccagcaccccagggtgagggctaacccgaaaaacggggaggaagtcaccgcttcaaacatgacgccctgcctcctttctgctccgccgcatcagcagctggaccgtccaggcggccgccagatagaccaccggcgtagtcagaaaggtaacggccagaaagggcagggcctgggccctcaggacctctacatattccatggtccctactaaggaggggatgaaaaacagccccatgttggtcaccaggaagcgggagactgtctggatccgccgctccttgaccacgccggtcaagagcagggccatgagcagcagcatgctgatgacgctggcggggaaggccaccggaagcagggcggcgatcccctcccccgccaggcacagggcaaagatcaggctgagttcagtcaggatatgcaacaaaatcacctcaacaagaagcactcaaatacaggaccgccgcggcacgcgcggcggtcctgtctctcgatctgtggtctggggagctcactcccacactgcggtggaaaagtagtcctccggggtctccgcccggcggatcaggcgggtggagccgtcctggcacagcagcacctcggcggagcgcagccggccgttatactggtagcccatggcgtgtccatgggcgccggtgtcgtggatgaccagcagatcgcccatgtcgatcttgggcagcatccggtccaccgcaaatttgtcgttgttctcgcacagggccccggtaacgtcgtacttgtggtcgcagggggcgtcctccttgcccatgacggtgatgtggtggtaggccccatacatggcgggccgcatcaggttggctgcgcaggcgtccaccccgatgtactccttgtagatgtgcttctcgtgggtggcccgggtgaccagacagccgtagggtgccagcaggaagcggcccagctcggtgcagatggccacatcccccatcccggcggggaccagcacctcctcataggcgcggcgcaccccctccccgataacggcgatgtcgttggcgggctgctccgggcggtagggcacccctacgccgccagacaggttgatgaaggtgatgtgacagcctgtctcttccttcagctccacagccacccggaacagaatccgggccagggcggggtaatagtcgttggacagggtgttggaggccaggaaggcgtggatgccgaactcctccgcccccagctccttcagccggcggaaagcctgggtcagctgctcccgggtcatgccgtacttggcgtcccccgggttgtccatgacctggaagccctcctcagactcccccagagtgaaggtcccgcctgggttgtatcggcaggagatccgcttgggaatggatccaatggtgtcctttagaaagtcgatgtgggtgatgtcgtccaggttgatggtggcccccagttgggaggccagggcaaactcctccgccggggtgtcgttggatgagaacatgatctcctctccccggaagccgcagcggtcggacatcatcagctcggtgagggaggagcagtccacgccgcatccctcctcccgcaggatcttcaggatctgggggtttggggtggccttgacggcgaagaactcccggtagccggggttccaggagaaagcctggtacaggcggcgggcattctcccggattcccttttcgtcgtacaggtggaatggggtgggatactgctctgtgatggcctggagctgctccagggtgacaaagggctttttcacgggcagacgctcctttttcaaatctgtcaggcggtcccgggccggatagcccgccgccccaagaaaaaaatcgtttttattgtatcgtatcccccatacgttgtcaatcaacacaacctccaacctgttcccccacccgggccctcctttggtgattccggaaaaaaagacgaaattcggcaataagacttgcgtgtctcccgctcttctggtatgattgttcggaaatggaagggaggggaggtccatgaccgtgctgtacgggtcgctgtatcgggtttgggggcctctcttctgttccgcaggcgggcaatcaccggtgtgattgtctttttttgtgtgtcagagaaagtgagaagggagttttaaccatgaatccaaacgaacccatccgcgacgcccggaagctgggcacccccaagatgctggtgctgggcctccagcacatgttcgccatgttcggcgctaccatcctggtccccatcctggtccagcagtacggtctgcccctggacatccagaccactctgttctttgccggcatcggcaccctgttcttccatgtgtgcaccaaattcagggtgcctgcctttctgggctcctcctttgccttcctgggcggcttcagcaccatggccaatctgaacaccggcatctatgcggacatgtctccccaggataagctggcctatacctgcggcggcatcgtggttgccggcctgctctacctggcgctggccctggtcatccgcctggtgggcgtgaagaaggtcatgcgcttcctgcccccggtggtcaccggccccatcattgtgtgcattggcctgaccctggccccctccgcggtgagcaacgcctccacctgctggcctttggccctgatcgccctggccaccatcatcatcttcaacatctgggggaaggggatgttcaagatcatccccattctgatgggcgtggtggtctcctatatcgccgccctcatcatgaacgcctgcggcgtcactgtgctgaacgccgcaggagaggccatccccctcatcgatttcaccgccgtgcgcgaggccagcatcctgggcctgccccccttccagatggccaagtttgacctcaccgctatcctggtgatggcccccatcgccctggccaccatgatggagcacatcggcgacatgtccgccatctccgccaccgtggggcagaacttcattcaggagcccggcctgcaccgcaccctggtgggcgacggcatcgccacctccctggccggcatgttcggcggccccgccaacaccacgtatggcgagaataccggcgtcctggtcctgtccaaggtccatgacccccgggtcatccgtctggcggccg

SEQ ID NO: 764 - DNA, 15177 bp, unidentified
  source 1..15177: mol_type = unassigned DNA
ttcttttcataaacctataaaatcacgacttgcgagaggacgcttatatctgcccttcaagccctaagaaagcaccgcagaatctgcaacactacgcaaattaaactccggttatgcagacagcgcgtttttcttgacttgagccaaagcctttgcaacaggtggcagactgatcacgatcaaagtagcgatcgcttccggtacgatataagttgcattgtaagttaaagagtacacaatggcaggtgttccttccggggcatatgcaccgaagaatacgacaccggagatcactgcaaatacataacgtccaaacacggcaacgatataaccaatctgcagcccgtgttttttgtttgcaaaaaatccggcgagccctaaagcaccaaatgccagagggtagtctaaaatcatctgtggaacggtatagaaaattggctccataacaaactgaacaagaccgtaggcaacggcagtcataagaccaacataaggaccgtaccagtaaccgatcagtgcgataaacaacatgctgaataaagtaacggaaccgcccattggcagattcgcaaacttaatcatggagcatactactgcaagcgcaatcgcaacggcagagtagacaagctgttttgtggtgagaattgtttttttctctgcatttctgtggcggatcactgctgcgacaacaacgagaagtgcgataatgactactacaactgcgattccaggtgcagtaagacgtacagagccatcatcccaggctccgatcgtggtagtaaaaaattctttcataaaataaaatcctccttgcgtttcagatcttttgcgccaggaggaaaaaactctatattctatcgtctgatgagaaatatcataaaagcttccttacgccggtattatccggttcaagtaataagggttgatgaaaaatcatctctcagcgttggaatgtctggcaaatgcagcattttttgcgcccctagcgtttttgattctgttataaatactgttaaggtctatgatgccttaacgagtatcaatatagcaagatgcagcgggaaagtcaacctgaaattttcataaaagttcttgaaatcacaaagactcacaaagatcacaaagattccaacaatttgtgggcaaagcaaaagccgcagaacaaaatctgcgactttcttttcagatataaagatcgatattacttccaagatatggtgtgacggaattctccatcatctgaaccatgccggcacctaatgcctgtgtcatatctaaagattttccgagcattgcaactccgatatcttcctgtaatgtaacagggcttgtggaagaaccgatgtcatatgcagaaaccgtacttaatgctgcgtctaaacctgtaatatccataaatcctacctcactttcatttccaatttttgcatataaaatgcaatcattcatgactcattgaagcacttttaatatagcacagatcggtcgttctgtatatagaaaagaaaaatgttactgttcacacagcagtaaaacacttgctgttttgctgcgtaagaaagtgattcagaaaaatcctcttgacaaataaaacagaaatgcatatactttgcctatcaaatagtttgataatcaaataattagaaagtcaaacaaacatgaaaaacaacaggcgaaagccaggaaagaatgaggaaaagcaaaatgttagaaaagatgaaaccgattattgcagaacagttaaatgtaaatgaggcagagatcaagccggaaacaaaattcaaagacgatctgggcgcagattccttagatttatttgaaatggtgatggctctggaagaagagttcggaattgagatcccatcagaggatcttgagaatattgtaacagtcaacgatattatgggttatctcaaagaaaaaggtgtggaagcttaagaccatttacaaatattcaaagagaggcaggaaacaatgaaaacgagaattacggatttgcttggctgtcagtatcctgtgatccagggcggaatggcatgggttgcagagtatcatcttgcagcggcagtttcagaggcaggaggaatcggactgatcggtgcagccagtgctccgccggaagtagtcagagaacagatcagaaaaacaaaagaattgacggataaaccatttggagtcaatgtgatgcttttgaatccaaatgctccggaagtcgcaaaagtggtcgtggaagagggcgtaaaaattgtgacgacaggagccggaaatccgggaaaattcatggagatgtggaaacaggcaggcgtcaccgtaattccggttgtagcaagtgttgcgatggcaaaaatgatggaacgcgcaggggcagatgccgtggtcgcagaggggatggagtccggcggacacattggttcacagaccacgatgacgctggtaccgcaggttgtggatgcagtgaccatcccggtcattgccgccggaggcattgcggacggcagaggaatggcggcagccatgatgctgggagcggaaggtgtgcagatgggaacaaggtttgtggtcgcaaaagaatcgatcgtacaccagaattataaggaacgcattatcaaagcaaaagacatcgattctgaagtgacaggtatgagtaccgggcatccgatccgggtactgcgaaaccagatgacaagagagtatctgaaattagaaaaggaaggtgcctcttttgaggagttagagcagttgacacttggctctctgcgcaaagcggtgatcgaaggggatgcagttcatggaagtctgatggcaggacagagcgccgggcttgtgaaaaaagagcagacctgtcaggagatcatagaggaagttgtcacaggtgccagagcgctgcttgcaggaagaaaatgacctgacatgcgcagatttgaagatttgagaaaggtgtggttatcaggatgggaaagacagtatttatgtttccgggacagggatcccaatatattggcatgggaaaagaattttacgaacagattcctatttgtaaagaagtgtacgatcttgcttcagaggtgactggattggatatcccggcactgtgttttgaggagaacgaaaaattaaatatcacagagtacacgcagatctgtatgctgactacggaagctgcaatttatatggcgttggaacagaacggttatcagccggatgtcacagccggattgagtcttggtgagtatggagcgttgatcgcatccggagtcatgactgctgaggaagcatttgaacttgtgcggaaaagaggcatttttatgcaggaagctgtcccggccggtggagcaatggcagcagtgctaggactggatgcagcggcaattgagaagatctgcagagagacagcagagcagacagggagcgaggtttccatagccaattacaactgccctggacagatcgtcatttccggtcaggaggaagcagtgcatctggcaggagaaacatgtaaggcgtctggggcaaaacgcgttgttccattgaaagtcagcggcccgtttcattcgaaaatgctgcagggcgcaggagaaaagttaaaagaagaattaaaaaaagtagagatcagtgattcatttgttccttatattgcaaatgtaacggcagactatgtcacaaaaaaagaggaagtgaaaccattgcttgccagtcaggtatcttcttctgtgcgctggcagcagaccatagaacggctgcttgcagatggtgcggatgaatttgtagagatcggaccgggaagaacattgagtggatttgtgaaaaaagtgaaccgggatgtaaaagtgagcagcattgataaaatggaagattttattcagtttatcggaagtcatgtggaggcgggagcatgttaacagattctttgaaaaataaagtggcacttgtcacgggagccggccgcggaatcggaaaagagattgcaaagacactggcatcatgtggagcgtttgttattgtcaattataacagttcgccggacgcagcagaacagactgtaaaagaaatcataaaacagggtggaatggcagcgcctgtacaatgtgatgtttctgattttgatgcctgcggaaaaatgatggaaatgatcataaacaactatggacacctcgatattctggtcaataatgcagggatcacaagagatggactgatcatgaaaatgagtgaggaagattttgacagggtacttgatacgaatctgaaaggtgccttccatacgatccgccatgcttcgcgttatttcctgaaacagaaatccggtaagatcattaatatttcttctgtttccggtgtcatggggaatgcaggacaggcaaattacagtgcaagcaaagccggagtgatcggtcttaccaaaagtgtggcaagggagcttgcgtcgagagggatcacatgcaatgcagtggctcccggatttatcgaaacagagatgacagaggctatgccggaggctgccagggaaacggtaaaaaaacagattccgcttcagcggacagggcaggtgtcagatgtggccggtgtggctgcatttttagcatcggatctggcagattatatcaccggacaggtgatctccgtggacggtggcatgcacatgtaaagaatatatatcatgaggagaacaatatggcaaaaagacgcgtagtggtaacgggaatgggagcagtcacaccgatcggactgagtgtggatgaattctggcaaaatgtaaaagcacagaaaaccgggttttctgaaattacaaaattcgacaccactaattataaatgtaagcttgcagcagaagtaaaagagtttgatgcaaaaaattatatggatgcaaaagaagcaaggcgcatggaactattcagccagtatgccgtggcggcagcgaaggaggcaattgaggatgccgggcttgaaatggatcaggaagatccgtatatggcaggctgtgccattggaagcggcgtggggagccttcaggcgattgagcgcgaacatacaaggctgacagaaaaaggaccggggagagtgggacctttattcgttcccatgatgatctccaatatggcagcaggaaatgtttccattcattttggattaaaaggaaaaagtatcaatgttgtgacagcctgtgccacaggaacgaatacgatcggtgaggcattccgtgccattcagtatggtgaggcagacattatggtttccgggggaaccgagggaagtatctgtccgaccgcaatcgctggttttacgtcactcaccgcactcacagcagaaaccgatccggagagatgttccattccgtttgataaagaacgcagcggctttgtcatgggagagggcgcagcggtggtcgtgttagaggaattggagcatgcaaaacgtcgtggcgcaaagatatatgcagaggttgtcggttatggctgttcttcggatgcgtatcatatcacatctccggcagaagatggcagcggcgcagcaagagctatgttaaatgccgttcaggatgcagggatcacagtggatgaggtcaattacatcaatgcacatggaacatccacgcaccataacgatctctttgagacgcgtgcgatcaaacttgcatttggggcgcatgccggtgaaatgaaggtcaattccacaaaatccatggtcggacatatgctgggagctgccggagcgatcgagtttatcacttgtgtgaaagagattgaggaagactatattcatgccacagttggctataaagtgccggatgaggaactggatctcgattattgcaaagaaccggtttcgatggaggtacagtatgcactgagcaattcccttggatttggcggccataatgcaagtattctattaaaaaaatacaccattgtatcggacaaagatatcaatggctgcagataaggaggcagcgatgtcagtattaaacattagtcagatcatggaaatcctgccacacagacagccaatgctgctcattgattcggtagaagaaattgagtatggtgtccgtgcagtggcgaagaaatgcgtcagtttcaatgaacctttttttgcaggacattttccggaagaaccggtgatgccgggggtgctgatcgtggaggcactggcgcagaccggtgcggtcgcaatccttggaaaagatgaaaaccgtggaaaaacagcttattttgcgtccatcaattctgcaaaatttaaaagaaaagtagttcccggagatattctcacgctggagacggaaattataaaagtgaaaggaccgatcggggtgggaaaagcgacggcaaaagtcggagatgaaattgcatgcattgcagaactcacctttgcagttgagtaacagaatagaaaggcattacatagaagctgtaacagaaaggaaatattatgccagcaattttgagaagaagaaagctgatatccataaaacctgaacgaaaaaatgcagtaacttaccgcaaagaggaagtgcaggcggaagttatgacaccaccacctgcagcggatcagcagaaaataccgggaagtacagtggtctgccccgcatgtaagagagaagtgaacaaggcggaagtggaaaagaataagtatgtctgctatgagtgcggaagctatttccgcgtgcggactaaaaacaggatccgcatggtggcagatgcaggaacctttgaaccatggtttgaatatctggaatcagaaaatccactggattttccggaatatacccagaaggtggaggcagccagggaaaagaccggactgcatgaggcagtgaccatcggacgatgcaaaatatatggggaagagacggttcttggaatctgtgatgccagattcctgatgagcagcatgggacatgtggtcggagaaaaaattgcgctcggtgtggaacgggcgacagatttaaagcttccggttattttgttctgctgctccggtggggcgagaatgcaggaaggtattatttccctgatgcagatggcaaagacgtccgcagctttaaaaaggcattctgatgcagggcttttgtatgtgccggtattgacagatccgacgacaggaggtgtgaccgcaagttttgcaatgcttggagatattatcctggcagagccgggcgcattgatcggttttgcaggaccccgcgtgatcgagcagaccatcggacaaaaacttccggagggatttcaacgtgcggaatttcagttagagcatggatttgtggatgccattgttgagcggaaaaatctgaaaataaccttaaaccgtattttaaaaatgcatcacagcagggaaggatttgctgattttgatccattgcgcatggatgataactacgagccgacagagttgatgcgggagcgcgcggcaagggcaaaaggactgacgccgtgggaaaaggtaaaagccgcaaggaaagtagacagaccttctgccactgattatatggaaaatatttttgatgaatttatggagttccatggtgacagatactttcgggatgatccggcaatcgtaggtggagtcgcatatctcgacggtcagcctgtgaccgtgatcggaatccagaaaggaaaagattttaaggactgcatgaaacacaattatggaatgccgtcgccggaaggataccggaaagcgatacgtctgatgaaacaggcagaaaaattcggacgcccggtgatcacatttgtaaacacagcgggagcatactgtggaatggaggcagaggaacgtgggcagggggaagcaatcgcccggaatctctatgagatgtcagcattaaaagtgccggttctctgcatcatgatcggggaaggcggaagcggcggagcgcttgccttagcggtcggaaatgaagtatggatgatggaaaatgcaacctattgtgtgctttcgccggaaggatttgcatccattttgtggaaagacggaaaacgtgcaaaagaggcaagtgagattatgaaaatcacggccatggatttaaaatcgctgggtgtcattgaacagatcatcccggaatatggtgtggcagacgcaaaagcctgtgaatcaatctcgcgctatctgaaaggaaatataaaaaagtttcttgagaaacaaaatggcaagacaggagaacagtttgcgtccgagcgctatgcgagattccggaaattttagcaaaatcacagcggctatgtgcacagagagtacgaatcgttttgtgaccggacagagaagagaggaatattatgaaggtaaaaataacaggaacgggaagctgccttccgaagcttcgcgtgacaaatgatgatcttggtcagatcatggaaacatcggacgaatggatccggtcgagaaccgggattattgccagacatattgcggtagaggagacaaccaccggtatgtccacagaggcagccggcaaggcgttgaaaaatgcagatatttcagcggaagatgtggatatcatcattgcggcaactgtttctgcagataaacatcttccgggacttgcctgtgaggtgcagaaaaatatcggtgcagaaaatgcagttgcgttcgacatcaatgcagcgtgttccggttttctttttgcactggatactgcggcactgtatttggaacatggcggatatcagcatgcgcttgtgattggagcggaaacgctgtcgaaaatgatggactggacggaccggagcacctgcgtgctttttggggacggcgcaggggcagcagttctttcagcaagtaaagaagatggcattttatccatggtgcagggctcggatgggttcaggggcgatgtcttaaactgcatggcgagaaaagtgaacaacccttataaaaaaagtgacacggcactttcctatgtttccatgaatgggcaggaggtgtacaggtttgcagtgaagactgtgccaaaggcggtcacagacgtagtggaacaggcaggcttacatctggaagagattgatttattcctgctgcatcaggcaaattacaggatcattgaagcagtttcgaaaagacttggtcagcctatggaaaaatttccgaccaatctggaagaatgtgggaatatttctgcggcgagtgtgccgattttgcttgataatgtcaataatcatggtatgatgaggaaaggaatgaaaatcgtgttggcaggatttggagcaggcctcacctggggagcaacggtgataaactggtaaaatcaggcgctgaccgcagaaataggagtagatcggatgacaacagatgaaacattaaacgaattattggtcagattgtttaaagacatcatggagattgagggaaaatgtcttgtgacagaagaattcaaagatctcagttacaatgatttccacgtgatcgaggcaatcggagtcaatgaaccaaaaacgatgacaacggtggcaaaactgatgggtgtcacaaccggaacgttgacaaaggcaatggatggactgaccagaaaagggtatgttatccgtgagcgcagtacgcaggataaacgtgtggtatgggtttatctgacagacaccgggaaagctgcttacaaacatcatgaagagtttcatcacgagatgatcgcacagatcaaaagccagcttaccgagcaggagacgccaatcctgatttatgcgctggcgaaacttgccgattattttcaccttgtatacaagggtgaaaaagaataaagaacagaggtcattgcatcgaaaaactatttttttatgcgatgacctgttttgatataagttgaaatgataataattataacctgaaaatataaaaagtaaaattcattgattttttttatgcaaaatgaataatttgaagtcgaatcctgcaaaaaaatagactaatcattagaaaacttcactaaattaaaggaataaagaaaaaaatattgcgtccgccgtcattttataataaaatgtacgtgttgatgagaaatctgcagccggaatcaatgccggagcatttaaaaaatgccggatatctgatttcacatggttgtaaatatatttttaaaggagaaaaaaaatgggatacgttgatgaagtactcgcaaaagtaaaagaaaaaaatgcttcagaacctgaatttttacaggctgttgaagaggtattagagtctttaagacctgttattgatgcaaatgaggaattgtacagaaaaaatgcaattcttgagagaatcacagaaccagaccgtcagatcatgttccgtgtaccttgggtagacgataacggacaggttcaggtaaacagaggttatcgtgtacagttcaacaatgccattggaccatacaagggaggattaagacttcatccttctgtaaaccttggaattatcaaattcttaggatttgaacagattttcaagaattcccttacaacacttccaatcggtggtggtaaaggtggttctgactttgatccaaagggtaaatctgacagagagatcatggcattctgccagagctttatgacagaactttccaaatacatcggagcagatgtggacgtaccagcaggtgatatcggaactggtgcaagagagatcggatttatgtttggccagttcaagagaatccgtggttctttcgaaggtgttcttaccggtaaaggacttacatacggtggatctcttgcccgtacacaggctacaggatatggtttattatacctgacaaatgcattgtggaaagatcacggcatgagccttgaaggcaagactgctgcagtttccggttccggtaacgttgcgatctacgcaattgagaaagcacagcagttaggtgtaaaagttgtaacatgttctgattctacaggatggatttatgatccggaaggaatcgatgttgcattattaaaagaagtaaaagaagtaaaacgtgcacgtttaacagagtacgctgctgcaaaaccatctgcagaatatcatgcaaaacagaatggtgagcacggtgtatggcagtacaaagtagatttagcccttccatgtgcaactcagaatgagttagacattgaggatgctaagatgttagttgcaaatggtgttacatctgtaacagagggcgctaacatgcctactacattagaggcaacaaaatacttacaggagaacggcgtattattcgtaggtggtaaagctgccaatgccggtggtgttgctacatctgcattagagatgagccagaactctgagagacttcactggacattcgaagaagttgatggaaaactcaaaggaatcatggagacgatctacgctaatatttctgatgcagcaaagagatacaatgcaaccgttggcggacagacagactatgttgccggtgcaaatatagccggatttgagaaggttgttgatgctatgcttgcacagggtgtttgctaatcgtgaatttctaagataaagattatattgagaagtcctggaaatattgaatttccggggcttttctttatgtattgaaatgacaaaagaattgtcagaatattcataaatagaagataatttacgttattttgaggtcgttatatacacgtggtacacaagtgatatacaggtggtatacactcgtttttactgattttggatgattttttgaagcatttcatccggtgtttttcaagatgattcaagctgaatatgagtgtaatgttaataataagaaacatcataagtgtatctagcaatcagtctcgatttattgttttatatcttgttcacttctgtaagaagttcttctaaagtcttatgggtgtacgttcccttggtggtgtcgtttttcatactgtgtcccataatcaatttgatacatacgtcatttgctccggcgctgtccatgagtgaagcaaaggtgtgtctgccatcgtggggcaggtgtttcattttgagttttcccatgcacgtattaaaattgccgttcatgtaggttccgtaggtgtaatgattaccaacagctcggttggtcgcaatccggtgtaaatcataatcaggataatatctacattgttgatttcatatagcttcgaccagagtgttttgatttcttcatcggaatatctgtcatgtatctgctccgtagagtttgtccattcataaaccagaccttctgttaaatccctgtctatgtattcattcaatttagcgtattgatatatagccttcaggacggctcgcatggaagaaatcgtagtctgcgatatggcagaagtgaagacgattatggaacaggtgtggaagtcgcagaaggcgatgttgaaaaagcagccgttgatacatgatgagtaagttgagttctcggtgcaggattgtatagtgcgggaagcattactctaaaaagcagaaaaaagtagtaattatttgtttgaacataatataaacgcaggtgcggaaaatagttatataatgaattacagaaagtagaattaagtgagctattgtgggtatttgaggatgaatggtaaaaaatattaaaaactcaaacttcgcacattaaaatgtgcctatgcaccttgaaaattcaataataactggcataaaaatagcatgaaaccaatggttttggtataattgagttgcaaaaaaacaattacaaaccggaggcttatgctatgaataaaaagtataacacaagcgactcaaaatgataagcagatttctaaatctatcaaacgattttttacaaggtttcatatttcctcagccttgaaagctgccaatgcctataaaaggaaaggcgctccggtaacggagatttttcaatacatgtttgcaccccttgagattaggcacttaacatgtagatatatctttttatccttgcatgacataaaatatagctaagttaattaatgtcttctttttcaaaacttttgcaacaacacctataactaatgaaagccattaaaagtattattgctaaacttatgtaaacaggacatatcatttctcttgttctcccattagaaataaaatatgctgctgaccacgggaaaaaacctgcaaaagaagaatttgataaaatgacatttactaatgcaataacagcagctactatcattgaaacgataattcctcttgtgcgaaatgcaagatatgccattggtgtaattgtaaaatataacaatattcctcccacaacaattttaaataagaaaaaaaacgcagttccaatattaaattgatctactccaacaaatatattacaaattgtacataatatcaaaaccacaacccaaaaagtcaacatcaatgtaattgtacaaataaataatgtcaaaaatttacaagacataaatctctttttcgatataggaataaccattatcgtttttaatgttttacccgtatattcccggctaaacaaataagctgctatgacagaaaatattaatggtccaaataaaagcatcaaaaacataaatgcattatcatataatgtaaacaaagatattctatactccgggttaaaaatatagcttcgtatactactaaacattgataaaatcggtggtgaacaaatacctagaaaagcaataatttttatttttgtgcgtttcaattttagaaattcacaatatactaattcacccaatttccccacctcctattaattccgaaaaataatcttctaatttttcttcttctatcctaatttgtctgataggaatgttattttgtaaaagataactatttatttcttcaatcctgtgcatctctttgccaaataatcgtatgcgattcttactatcaatcaaaatttcagaaacatccaatcgttcctttaataatgaaaacacatactctacattagacacttcatactccgcatatctacgaagacgtttatgtaaatccgtaatactttcttcttccaataatctgccatgattcattacccctatcacatctgcaatttgttctatttcacttaatatatgacttgatataaaaacagtggtattcccctctttacaaaggttaaccaaatatttcctcatctcgtaaataccaatcggatccaaaccattcattggttcatctaaaatcaaaatttcaggtttgtgcataattgctgctgcaataccaagtctttgtttcatccccaaagaatatttttcaaaaatttttttatcatttttatccaagttgaccacacttaaagcctgatcaacactttctatactattaagtcctctcaatcttgctataatttctaaattttctcttcctgttaagttatcataaaaaccaggagtttcaatcagtgcacctatacggctatacgcttttgaagcatcttctaaatgaatatcattaaaaattttaataaatcctgatgtgggttttaccaaattcaacaacattttcatagttgtcgtcttcccagctccatttctccctaaaagcgcatatatttttccttttggcacatgaagacatagctgtgctacgcagacttgctctccataacattttgtcaaatcatttgtttcaattacaagatcattcattataacctcacattctcagcacactaattgctgtctattttttcaaacaattctttatatgtcatgcattcatttaaaagtttttcatgtgtgccctcagcaacatttttcccgtcacaaataacaattattctaggtatttgcattattgtagttgccctgtgtgtagtcataattactgtatgattttgagacaatctaaaaactgtttgtacaatatttctttcagtcaatccatctatatttgaggttatctcatccagcaaaaatatttttgtatttctcaataatcctctcgttatggataatagttgcctttgacctcctgaaagctttgtacctccatctcctataactgtatcaaacccctttggcattttaattactcaaacttcgcacactaaaatgtgcctatgcaccttgaaaattcaataataactggcataaaaatagcatgaaaccaatggttttggtataattgagttgcaaaaaaacaattacaaaccggaggcttatgctatgaataaaaagtataacacaagcgactcaaaatgataagcagatttctaaatctatcaaacgatttttcacaaggtttcatatttcctcagccttgaaa

SEQ ID NO: 765 - DNA, 12540 bp, unidentified
  source 1..12540: mol_type = unassigned DNA
ccccgccattggctgcactgccgcagtcggctctgcactggtgtctgtatctgccggctgggtgtccggctgggtatccggagatgctgtgctgctctccggtacagtaccagtactgccgccggtagtgccggaagaagccggttctgtttccgcgggggtgttattggcagggtcataggagaacgtaccgcccacctgcaacgtgccgtaccacgttccgccgccggagatctgcacaccaccgtcctcggtcaccttgatgttctgtcccagtgtccagtcaccggtagtggtcagctgatcgccgcgtaccagccagccgtagagcacgctgccgctctggtcatacaccacgaaaacggcacactgctttgctgctttcagctgctccagagctgcctgtgtcacaacggtctgaccggtgcaggcaaactgatagggatcatccggcgtgccggtaccggctgccgcctgtgtcagagcgatcactgctgccagtgtatccttgggagaatccggtgtatccggcgtgtccggttcgtctggttcgtccggctcatcggggtaatccggatcgtccggcaccaccggtgcttcttctgatggacgcagctttttcagacgttccagctctttctgagcctgccgcacattttcctgtgccaccgccagtgccgtctgtttctgggcaacttccagccctactgctgtcatatcatagtccagcagcggtgtacccttggtcacatggtcgccctcttttaccagcacctttgcgatcatctggtcgtcggagggcgtgacattctgcacatcaccggaaaccacctgcccgtccatagagagatcatctccccaccagtactgggtcagatttgccactggcaacacatctacgcggttctttttcgtctgctgtgtccggtaaatcaccgtaccgccgacagtgccgccggcaacgactgccaggcaaaccgccactgcaacgatcttttttccttttgtcatgaagcatcgccctcctgttctgtccggcgttctccgaagccgccctgctccagcatgccgtcccgaatggtcacgatccgctgggcatgccgggcgatctccggttcatgggtaatcatgacaatcgtcacgccctcgctgtgcagctgggcaaacaattccatgacctgttcgccggaacgggtgtccagtgcaccggtcggctcatctgccagcagcagacggggctggctcaccattgcccgtgcaattgccacacgctgtttctgtccgccggaaagctgagtcggcttgaactgtatccgttcttccagccccacacgtgccagcatttcctttgcccgttccagccgttcctttttccgcacgccggcatacaacagcggcagtgccacgttttccagcacagactggcggggcagcaggttgaagttctggaacacgaagccgatcttctggttccgtatcgtggaaagctggttgtcgctgcactgtgccatgtcctgtccgtcgaagaaatagtccccgctggtctgcttgtccagcagcccgataatgttcatcagcgtggattttcccgaaccggacggtcccatgatcgccagatattccccttcttccacctgtagctgaatgtggtgcagaacggggacaggttcttttccctgcatataggatttacagatgtcccgcaaatcaagtaccatctgccgcaccgccttccgctgtatctgctccggcttcgtctgccggcatctcgtcaacaccgtcgccggcatcttctcctgctccggagatcacgctgtctgcggtgtcgccgtctgcaccgtcgcctgccatgccggcttcatcatctgctccgccgatcacgccttcgtccacagggtttccgttttcgtcgtaggaaatatcctcattgctgttgtcgtccacggtatcatctgtgccgtcatcttccggtgttgcttcgtcagggttggtcgtggttttcataccctcctgataggaatccgacgggaatgcgatcatatcgtcctccgacagaccgcttttgatctcgcagtcgcccatggtgtcgtctgtctgtcctacttctacttcccgcttttccagacggtctttcttatcggcagcccagacataggtcttgccgttttcatcagtctgtacgtagtcggaatacagccagatgccggttttttcaatgctttcatcggctccggtatctgccgaaaccagcaaatgctgccccagcatcagcccgtcactggaatccagcgtcacataaaaaggatacttggaagcggtggtcatctcatcgctgccgccgtagtacatgttgttgttctggctgttgtcggcttcggtagagatctccgaaatagtgcccgtccagctggaatcgtctacgcgggagtgcagcaccatggcttcatctttataaatcgactgtacattctgctcgctgatcgtgcacttcacacggaattctccgtcggacatgatcttcatcagcacatctgtgccgtccgactgaagctgttcggtcgttttcagagactgcaccgttccggcgatctccgcagtcactgtggcattgttaatggtattctgtaatttttccagttcgatcttcttggtcttgatgtcgtattccgacttggcaatatcggtttgcagggactggatctgcgtggtataagtcagcttatcgtctgcactggcacttttcttttccgtttccagctggctgatctgctgcttgttggactcgatctcattctgcatgcgttcgatctccacattgccctgctgcaattccagctgcatggattccacatcataggtgaacagcgggtcaccggcgttgacatggtcgccctcctgcacgacaatgctggaaactttcttggaggtgtccagcttgacttccttggtttcctgcggttctaccacgccggaaaactgcaagtcggaaatcgttgttgccgcagaattcacatcttttatcggcatcacgtatgccacaccgtccacatcactgcccctgctgtagtgccgccacaccagcacgccgctgacgcataccgccgcagctgtaacaccggcaactgtgccgattatgattttcttggattttcccatattccttcctcccagtccatgctccgcagcagtgcgttctgccggcggagttttttgaagcagtcctgcacaaatccagggcaataccgcacaaagagcgtctggcgactttgcatgccatctgcttgcagtgtttccctagatgctgatttcatctttttggcagctgtttcaactgttgtattcctcatgcaacggattgcctttagtataccacacctcttgacggttgtcaagaggtttttcaaaatttctgcggaagatttatttgggaaatttgtgcaaaggtgaaaggcgggagagggttgtgcggtgttctcttaaaacggagaaaaatcacctcacaaaattcgcatatcattatcgtgtcacgctctcctaaacagatgctctcacgccgaaatccgacaataccgttccccttccagcacctgctgcatgtacttttccggtgttgtcatgcagacagcactctgaaacgtaaaaggactgcagccggacaccagcactgcaccggtatcgtctttcttcaccggaaactgccggtttctgctgcacacgttccagtagaccaccgcaggcagctgataccctgccgcctgatatgcctgcttcatctgctggaatatcgtcacgccgttgccggactgctcgtcgaattccatgtccgagatcacatagatcactttcggcagttcctccggcggcacgtggtgctgaactgcactctgaagtatcagacgaaatactttttccagatcggtattgctgacttcattataggacatacagtgctccaccttttgaaaaatgtcctcccctttcagggcaatcaagcgggggttgtcggaaaaggtgatgaagtggttgtggaaatatccctcatttcgttcggcacagtaaatgcccagcgaaacggcaacatgaatcggcagcacatcgctgaaatagttccagtacatggaaccggaaccatctaccacggcaatggcattctgttccggcatataatccggcagggacttccatgtcacgtccagtatccgctgtttttgtgcaatgtcatcataaaacattgcgttttcctccaactcgatgcagtcccgaacgatctcataggggaaaagctgacctgctttcaacaatcccttttcctgctctgcccgttccagaaactcggagtaccgctgtccgtcatgcttgcagaatgctttctgatacttgtacaaggctctggagggcagtttggcatagtcaaaggtgtagtccttctggcaaagccgcttttccagcacgtccgcataggtgcgaagctgggagagcattttccggtaagccttttccgaaagatgcagccgcttacagagcagctttgcctgccggcacacgttctgattggaggtgtgcacagagggcagccacttcgccagcagagagatcggcttttcttccagcatgtcctgttggtcttgctgtagctgcttctggatcagctgtatcagttccggctcacagggcgtgttcagcaataccatacaatcgtcaaaccgcccgtactccggaatccactgcaaatttttccggacactttcgggatagatcgctgccgcatattgcagcagctgccggaacacgctccgttcacccaatccgccgcgggtatcccgcaggtaaaacaggatccgcatcgcgtataccggattctctgcatatgccgccaagaacatgtctttcaggcgttttgcagaagcttcccgcaacgcaccggctgtggaaaacaggttcagacacgcatcgccggtatcgtgatacgccagtgctccgttttcggtgtttgtccagttcagttcctctgataatgcattcagcatgaaaaacacgtcctttcttgttatgtactgtacgattgttgaaaaagccccacacgaaaccggtttcatggcttcgtatagggctgcctaaatgctccacgatgctgtttcgatggagaacccatctattcaattttaggcaataccgcacaaagagcgtctggcgactttgcacgccatctgcttgcaaatttcccgtcatatttcacaaaaatgctcgtgaatacatccagtattcactccgctttttgtttcatctgacgaaaaatttgacgacgcatctgtcgcacaatctttgtgcggtattgcctttaaaaaggaatcgcaaaaaaacgccatacggctgcatcataagaatgacgcaaaaacaaaaataaacaacattcataaaatattgctgtaagcatcgttctgagcgataatttaagctgcacacagtgcagcagtgtcggtatatttcttctgttttttctgagctttcagtttggttttctccagcaactgcatgccgtgttccgcttccagataccgcagcatcagaatgattcgctcctgaatcttctgccggtgcgtgtcccgactgttgcggaaaataacgtccagcggctttccgccggagaattcctgacagatcttcttggaataataccgtgtagaaaacaggtagaattcctctgcacctacaagcagataaaactgcattgtgccgcgttcttggttgcggcagatcaccttgcaattgctgttctttctcatgtaaaatcctcctttgaaaatgataatacacatggctgtgcctggcttacttctatcggaacgtcacccaatgccgaaacttgtccacgatgctgttttgacggagaacccatctatttaattgtaaagggaatcgcaaaaaaacgccttacggctgcatcataaaaatgacgcaaaaacaaaaataaacaacatttataaaatattgctgtaagcatcgttctgacaagggaaacacggcacaaaaccgtcaggcgggcttgatgcagcgttttccaaggtttccaacgggattttctcttgtgctgtgcacaatttcggcagcaggtacgcaagtctgacgaccgcaatgcatactatctgctgcatcaaatctttgggtgtttgaggcgtgatatgcaattgtcaagatgcaggaaggaataaaaaaaggaatatttatttaaaagcagacataacaaacccgtaattacactagggtttcatcacgtcattctacttttaaataaatattccttctctcgcattccttcctcgaatttgagattgtttttattatatcacatctcgaccgatttgtcaagccttttttcaaattttttggaaaaaaatcgaaatggctcaaattccggagaatccaagccattctgtttctcgattttgttttcgggtgtgttgacacgaagcctgacacgtgtcttttggggtgaccccctagaaattcgatccattccagccccagtgttctgtcatggcatagctgacatatacccgatcggtgggaattttcagcgtatccagcagaataccggtaatgtggctggtcagtgtttccagagcattggcggaagcgttcccgtacaggctgacttctgcaatcgctgccggttcatttgtaccgcggaaaaacagctggcggttgtcctcgacctccaccatcagccagtctgcgattttccccggaattgccgtgatcgcaagaccgagatgcttctgtatggtgtccgccgttgcagcgggcacggcacagttggttttcaacttgataaatggcatagcttttcctctcaatctctgcggaaaatatctctggtatagactttgttctccacatcgtccagacaggcatcataccggttggcaatgatcgcatctgccgccgccttgaatttttccagatcgttgaccacaacgctgccgaagaacgttgctccgtcctgcaatgtcggctcgtagataatgactgtagcaccctttgccttgacacgcttcatcacgccctgaatcgaggactgccggaaattgtcactgttggatttcatagtcagacggtacacgccaatggtaacctgcttttccgtgccggcattccagtcgttgttctggctgtaatcatagtaccctgccttttccagcacgcggtcagcaataaaatcttttcgtgtccggttggattctacgattgccgacatcatattctgcggcacatcggcatagttggcgagcagctgtttggtatccttgggcaggcagtagccgccgtagccgaagctggggttgttataatgcgttccgatccgcggatccaagcatacgccgtcaatgatctgctgcgtgtccagtcccttcagttccgcataggtgtccagttcgttgaaataggacacgcggagggcaagataagtgttggcgaacagcttgactgcttctgcttcggtgaatcccatgaacagggtgtcgatgttctccttgattgccccctgctgaagcagtccggcaaaggtgtgagccgcttctaccagtcttgcatcgtccatgtccgttcccacgatgattctggacggatagaggttgtcatacaacgccttggactcccgcagaaattccggactgaagatgatgttcttactgccggtcttttcccgaatgctcttggtataacctaccggaatggtagacttgatgaccataatggcattcggattatactgcatgacaagggcaacgaccgcttctacagcactggtgtcaaagaaatttttcttgctgtcatagttggtcggggcagcaatgaccacaaaatctgcatctcgatatgccgcttctgcgtccagcgttgccgtcagatccagttccttttctgcaaggtatttctcaatgtaatcgtcctgaatcggggactttttctggcggatcagttcgaccttttccggtatgatgtctaccgccgtaactttgttgtgctgggcaagcagtgtagcaatagataatcccacatagccggttcctgcaactgcgatattcatggatcagaatcctcctcatttctgtactgtgtcacctatatagtataccactatttttttacattttcaagaagtttcccgcattctcatgaaaattcgtttcaaaacgcccccagctgccgtctgatccacgccgtttccagcacatcgtagacatactgattgggagaaccggtttcaaaatacctttcggaattgccgcccagcatttccacagcaaaggctcccacggctctggaacgggattgtccgccgtagcagtgcaccagcagcgtttccacagaccgatgtgccagaacaaatgcaataatctgatctgccatttcatcggtaaacaaaactgccccgtccacctctcggataatgtcatcaaagtacagcgtcagaacacccttgcagaactggttctcgcaaaactgaaatccgaatccctgcgtgtgcgtatcctgaatcgaaatgactgcatacgtatcctttcgttccgccatatccgcctgtccgaaacagtagaaatgctgcataacatattcaaaggcatcatatacagactttaccagaacccgtttcatgctctgttcaggctttcaaacaccatggttgcctgaatgcggtcaccgcccagaaatcccttgcttccggaagaagaagtggtgatcgtgtgcagacggtatcccttggcagcctgtgcgttgatgaccttttccagttcagacagatttccggaaccggttccgatcagcttctccttcagaacgacctgcaaaacaacataatttggcacataaattctcctttacaaaaatatagatatattataacataaaactccgcatatgtcaatattattatttgcatttttccgaattttgtgctataatatacatatcaaatttattgcacaggaggaatttccaatgtgtaccgctgcaacttatcagacaaatgatttttattttggcagaacgctggactacgaaagttcctacggggaagaaatcgtcattgtgccgcggcagttccggctgtcatttctgcacatgggcgtatctgcacagcactacgccatgatcggcactgcacacgttgcccagggctacccgcttttttatgatgccgtcaacgaaaaggggctttgcatggctgggctgaactttgtgggcaacgcctgctacgcctcccgacctgcagatcattcggacaatgtggcacagtatgaattgatcccgtggattcttagccagtgctccagtactgccgaagccaaggaaaaagtggaaacgctttgcctgctgggcacgccgtttcacgaaaaaatgcctgcggcacagctgcactggctcatcgctgacaagcaccaagccattacagtagaagccactgccgcgggaattcaggtctatgacaatcccgccggtgtcctgaccaacaatccgccttttccggagcagatgttccgcctcaacgactttctgcacctctctcccaagcagccgcagaacaacttttcggacaagctgccgttgcagacgtacagcagaggcatgggagcactggggcttcccggtgacctctcctcccagtcccgctttgtacgagcagctttcgtgcgggcgaatgccgtttccggcagttctgaagcggaaagcgtcagccagtttttccacattctcggagccgttgaccagccacgcggctgctgcgaagtgaaagacggacagtacgagatcaccatttacacttcctgctgcaatgccgacaagggcatctactactataccacctatgaaaatcaccagatctccgcagtctgcatgcatcgggaaaatctggacagcgaccagttatgccgctatcccatgcagaccggagaacagatctgttaccaaaactgaaaggacaacatcgatgtcaaatgtaaccaaacgtgctctggaacaatccctgaaaaatctgctgctgaaaaaaccgctgacaaaaatcactatcggcgatattaccgaggactgcggcatcaaccgcatgaccttttactaccatttcaaggacatctacgaccttgtggaatgggcttgtctggaagatgccagacgggctctggacgaaaaaaagacctatgacacgtggcagcagggacttttgcaaatcttcgaagcagtacaggaaaacaagccgtttatcctgaacgtctaccgctgtgtgcatcgggaacaggtggagaaatacctacagccgctggtagaccaactgctgctggacgttatcgacgaggaagccgcaggcatgactttgcgggacgaggacaagcagtttatcgccaaggtctacgcctatattttcattggcgtgatgctggactggatcaagaacgatatgcgggaaaatccgcaggagatcgtcagccggctgggaaagctgctgcaaggctccgtcaccgcagccatttcgcggttccggttataaaggaaacactgattttatcattttcgcatttttgatagaattttttacacttttcggctctgtgatgaattttttatcacggagccttttttgctgattgtgaattcctgaaaatcgggtataatagaattataccaatggcaataccacaaaaaattatttttataactatttttattttataaggaggcattgttatgtattattccgcaggaacttatgaagcattcgcacatccagaaaagccgaaaaatgtggacaaaaaatccgcgtatatcatcggcaccggtcttgccggtcttaccgcagcattctatctggtacgggacggacagatgaagggagaacatatccacctgttcgaaaaactggagcttgccggcggtagctgcgacggacgcaaggacatcaccaagggctttttcatgcgtggcggacgggaaatggacaaccactttgaagtcatgtgggatacattccgcgatgtcccctctctcgaaacgccggacgtttccgtgctggacgagtactactggctcaataagcacgaccccaactattccctctgccgtgcttccgttgaccgcggcaaagatgctcacaccgacaagaaattcgctctggacaaggcatcggctctggcactttccaagctgttcctgacaccggaaaaagatctggaggacaagaagatctcagatgttctgccggacacattctgggacaccaacttctggctgtactggcagaccatgttcgcctttcagcgttggtccagtgcgttggagatgaagcggtatctgtgccgctatgtgcaccacattgacgggctgccggatttcagtgcactgcggttcaccaaatacaaccagtatgagagcatgatcctgccgctggtgaaatatctggaagcccatggcgtacagatcgaatatggcatggacgtgaagaacgtcatcattgaaaccgtaggcagcaaaaaggttgccaagcagatcgtataccggaaagacggcaaagaacagaccattgacctgatcgaagacgatctggtattcatcaccaacggctgctgcacagacacctcctgctacggcgaccagacccacgcaccggatctgtcccacctgaaaaacggctgcggagaatcgtgggatctgtggaaagcgattgcggctcaagcagttcacggcgaattcggcaatccggaagtcttttgcagcgacattgatgcgacaaactggatgagtgccaccgttgccaccgcagatgaggagatcattcaacatattatcaacgtttgcaaacgggatccccgtgccggcaaagtcaccaccggcggtatcgtcaccgtaaaggacagcaccgacaactggtacctctcgtggacgatcaaccggcagccccagttccactcgcaggacaaaaacatggtgctgatatggctgtattccctgaacaccaataaagagggaaactatgtcaaaaaggcaatgcgggactgcaccggcgaagaagtttgtcaggaatggctgtatcatatcggcataccggaagaaaaaattgcatcgctggcgaaaaacgcctgcaacaccacgacctgtttcatgccgtatatcaacgcctttttccagccccgcaaggaaatcgaccgtccgcgtgtggttccggagggagccgtcaacttcgcctttatcgggcagtttgcagaaacacctcgtgacaccattttcaccacggaatattccatgcgtaccggtatggaatctgtctacaccctgctggacattgaccgcggtgtgccggaagtctggggcagcaagtacgacgtgcgggaactgctgcgtgcctgctattatgccattgacaaaaagccactcaccgacgaagaactttcctttgtggaaaagaagctgctcaagatcgttctgaaaaaagtcaagggcacggatattgaaatcctgctgaagaacagcggactgatcgaataa

SEQ ID NO: 766 - DNA, 12022 bp, unidentified
  source 1..12022: mol_type = unassigned DNA
cacccacctatgagcaagctcatgtgggcttagaccttttgaccctggcatcatagcatgcaagtatgttattcaggaaagctctggaagagcgattttgcgaatggggttctgaatagttaatgttatttttaagagcgaatcgcccgggaagggcgatttgctcttttataaaagtggaggtatgcgtggcaaagctgaacatagcaaaccttaagaaaactctatattatttgcaacgcaacggcctgagggaaacctggatctctgtaagggaacgcctgacagagacagaccgctatttttatgtgccctgtccggaagaggaactggaaaggcaaagttgcagaaaatgggataatccggttacactcagcattgtggtgccgttgtaccgtaccccggaaatctatctgaacagaatgataacaagcgttatgcaacagagctatcctcactgggaactgattctggcggatgccacagaggatcacagtgtggaggagacgttgacaaatcagggattcctgacagaacggctcccggaaaatgcggaaactattgcagcggatgcaaggatccactatatacaccttacggaaaatgccggaattgcggcgaataccaatcaggcattaccctatgcaaggggagaatatatcggcctgctggatcatgatgatgtattgacaccggatgctctgtatgagatggcagatgctattaccaaagcaaatgacagaggtgtcagagttgcattcgcttattcggatgaagacaaatgcaacggggatgagacaaaatattacgatcccaaccataaagaagactttaattacgatttaatcctgagtaataactatatctgccattttctggtgatggatgcagatctgatgaagaaactggcattccggccagaatgcgacggtgcccaggactatgatctggtgctgcgggcagtgtcagaggtgctggctgaagatggccgctccggtgaggagagaattcttcatattcccagagtgctgtatcactggagatgccatgaagcatctacagcagccaatccccacagcaagaaatatgcttacgaagcggggctgcgtgcactgcaggatcatgctgcagaacgtgggatcccggcaaaggcagaggagaccagacatgtaggattttatcggttacaatatacagaggtattacaggagagaccggatgtggctgccgtaggtggcagagtgctgtccgggaaaaaccgcggcaggatcgccggcggcagaatgactgcggacggaaaggtgttctatgagggactgccgaaggactatggtggttatcttcatcgggcggagctgtcccaggatgcagaagcgttagaccttcgctgcatcaggatccggtcagctgacagggaattgtttgaaaaaatcgtgggagtgccttatacggaagtagtaagaggtccggaacaacagccggtatttgacagctccacactgcctgccggggcagatatccggcttttaagtctgcaattatcggaagcattacgaaaacggggaagactgctgtatctgccggagtatccggagaaatgggagagactatgaaggaagtaaccgtcgttatacccaattacaacggaatgaaatatttaccggaatgcatggcttccctgtgtcagggacaggaaaatgcaccggaatatgaagtgctgatcatagacaatggttctgctgacgggagcgtggaatatctggacagcgaatggtgtcgcaaaaaagaggcaccggcagaagaggggggaaaaccgcaggtgcgtctgatcgccctgccggagaacaccggcttctgtcatgcggtgaatctgggaatccgggaggcacgaagcccctatgtgatcctgttgaacaacgataccagagtagaagctggatttgtgaaaggactgtatgatgccattcggaaggatgaaaagatcttttccgtcagcgccaaaatgcttatgtgggataagccagagctgctggatgatgcgggagaccgctactgcgttctgggatgggcatattcccggggaaaaggccggcctgctgtggattatgacaagaatgtcagcatattctcagcctgtggcggagcggcaatttacagacgtcaggtatttgaggagatcggctattttgacgaagcgcattttgcttatctggaagatctggatatcggttaccgtgcccggatctacggctatgagaaccggtacgagccgacggcatccgttctgcattacggcagtgcttctacgggatcccgctacaattcccggaaaacggaactttcttcttccaataatatctatgtcatcggcaaaaatatgccgctactacagtggatcctgaatctgccgttctttttgcttggatttggcataaaatttctgtttttttgtaagaagagaatgggaaaactatatttaaagggattggccgaagggtggaaacgtaccgtgggtcctgtgggaaagcaggcaaaggtgcactttcaatggagccatctatggaattatgtgaagattcagtggcaattatacctgaatgtttttcgaattcttatgaaatcttaagaaattgcttcataaattcttaagttgagaaaaaaccaccgttattgtagaatgaaatcgttgaaaagaagcttttcggacttaaagattgggtgacccgtatgataaaagacaaccagaaagtctttaacaggcttcttgtgataatagatgcgctgatcacggcagcatcttttgtccttgcctattatatcaaattttatatcttaaatgacggtccggggatcggtgtcctgccggtgcaggattattatatgctgcttccctttattgtacccggttatatgttcctgtattaccggtgcagtgtgtattccccgaagcgtacggttcgccgtagacatgagatctacagtatcctgcaggcgaataccattggcctggcggctttgatcattattttgtatatgatcatccgtgagatcaatttttcacgatccgtcatggcaattttttatgtcctgaatgtttttctgacttccgtattccgtatcatcatgcgcaaggcattgcgttccatacggaaaaaaggatacaatctgaagcatattttgctggtaggttattcccgggcggcggaggaatatattgacagaatcctcagcaatccccaatggggatatgtagtgtgtggtattctggatgagcacatcccgggcggcacgacctataagggagtgaaagtactgggaacgcttggtaatctggaatacatccttccggagaacaagctggatgaaatcgcaatcacactttccctgaaggattatgattatctggaaggtgtggtggatatctgtgagaaatccggggtgcacaccaaattcattccggattacagcagtctgatccccagcagaccctatacggaggatctgatggggttaccggtgatcaatatccggtatgtaccgttgacgaatacaggcaatatggtgatcaagcgggcaatggatatcgttggttccattttcggtatcattattacctcaccgatcatgctcatatcagcaattctggtaaagctgtccagcccgggaccggtgatctttaagcaggaacgggtaggacttcataataagccgttttatatgtacaaattccgcagcatggcaatgcagacggcggcggaagagaaaaagggctggacggtacgcaatgaccccagagtcaccggtatcggtaagattctcagacgtaccagtatcgatgaacttccccagctgttcaatatcttaaaaggagatatgagtctggtcggtcccagaccggaaagaccgcagtttgtggaaaagttcaaggaagagattccccgttacatggtaaaacatcaggtacggccgggactgaccggatgggcacaggtgaatggcttgcgcggtgattcctccatcaagaagagaatcgaatatgatatttactatattgagaactggaccattggatttgatatcaagatcattcttatgacgttctttacaggatttatcaataaaaatgcttattagtacaaggagaagacaagatggcaacaaattctaacaacaatggcggcaatggtcagagacctgccggaagcggaagaaaaccttccggaagcgcacagagacctacaggacagagacccgccggaagcggtcagagacctgccggcagtggacagagaaccggagctgcgaacggacagaagagaatgtctgccaaacagcgtgcagccaagaagagaaaaaaggttatcatctttggcatagagatcgtagtgatcctgttcatggtagcattattgtatctggtaatgactcataccaacaatgagggccccaaggtaaccgttctggagacagaagaacttcagattcccgaagaggtgcagcaggatgaaactatgaagggctatatgaacattgccctgttcggtgtggacgccaccaaggaaagcctgttgtacaagggcagccgaagcgatagtatcatgatcgccagcatcaacatggataccggtgatatcaaactggtcagcgtatatcgtgatacgtacctgaataccggtacggattcctaccagaaatgcaatgccgcttattcctatggcggagcagagcaggcggttaagatgctgaacatgaatctggatatggatattacgaactttgtgaccgtaggctataaaggactgagcgaagtgatcgacggtctgggcggtatctatattgatgtggactctgaggagatcaagcatatcaacaactatcagatcggtattgcagaagttttgaaatgcgattatacaccggtaactgagaccggtatgcagctgttgaatggtctgcaggctactgcttactgccgtatccgttataccgctggtaacgactttaagcgtgctgcccgtcagcgtgaagtcattcaggcaatcgaagatcaggcaaagaaagcagattatgcaacattgtccaaggtattcaacagtgccatcgacgacatttacaccagtctggattccaaggacatcctggatctgctgggcaatatttcaaattatcgcatagtggacgaaggaggtttccccgaagagaccatgcgtgacaccggcaatatcggtgcaaagggaagctgtgttattccggtaaatctcgaaagcaatgtagtatggctacatcagttcctgtttgatgatgccaactattccgtaaccagcaacgtgaaggaatacagcaataagattgaatctgacacatcaccttatatgaataagtaagaaacagtgtatagagtaaagcaacaggaatacaagggagtcttccggaatctgccggggctcccttgtgcattacccagaaggttataagccttttggacagtaggaaaaggcttgtgccgcaataagagttaaagtataatgaaccagagattggaaaagtgaggagcgctctgacatggagatagatgtgatcattcccctgtataagccgggaaaagaattatttacattattggataaactgggcagtcagagcgtaccggtacatcaggtgattcttctgaatacggaagaaaaatattttgaacagctgatctacggaatcagatttctggaaacctatcagaatatcaaggtataccatgtatccaaaaaagagttcgatcatggcggtacgagacggatgggagtaaaaaagtcttccgcggatgtcttcgtgatgatgacacaggatgccatgccgaaagatgacaggctgatcgaaaaactggtggaacccctgcagggggaagtggcggtggcctatgcgagacagctgcccagagaggattcgacaccggtggagagctataccagagaatttaactatccggcaaagtcccggatcaaatcggcagcagacctggacagcctggggatcaagacctttttctgctccaatgtttgtgcggcctatcgccgggagctctatgaggaactgggcgggttcgtcagacatacgatatttaatgaagatatgatctatgcggcaaaggcggtggaagcaggatactctgtggcttatgcggcggatgcgcaggtggtgcattctcataattataccaacgggcagcagttccacagaaactttgacctgggagtatcgcaggcagagcatcccgagatttttgcagcatatccttcggagtccgagggaaaacgaatggtgaaagatgtgacggtatatttgcgcaacaaccatatgtctgccggattgccccatttttatatgcaatgcgcctgtaaatatgcaggttatttactgggaaagaactatcgcaggctcccgaaaaaatgggtacttgcttttacttccaacaaggaatactggaaacagaacagaaaggatgtatgactatgtgtggtattgtaggttatattggaacagaacaggcagcaccgatcattctggacggtctgtccaagttggaataccgtggatatgattccgcaggtatggcgatttttgacggtgagaagatcaacaccagaaaagcagtgggaagacttaaggttctggagaacctgacccatggcggagagaatatgaaaggaacctccggtatcggacatacccgttgggcaactcacggagctcccagcgatatcaattcccatccgcatatgaacaatgccggaaccattgccgtggtacacaacggcattatcgagaactatattcccctgaagaaaaagatgcaggataaggggtatcagttcgtatccgagactgataccgaggtattggcacatctgttagactattattacaagggaaatcctctggaagccatcacgaaggtgcttcatcgtgtggaaggctcttatgcgctgggaatcatgtttgcagatcagccggataagatttttgcagcccgcaaggacagcccgctgatcgtaggaaagagcgacaacggcagctttatcgcttccgatgttcctgcgatattgaaatataccagaaccgtatattacgtagacaatcaggaagttgtggaattacagcagggtagtctgcgtttcttctccgtggatgaggaagagatcgagaagcagccggtgaccattgactgggatgccaatgcggcagaaaaggctggatatgagcacttcatgctgaaagagatctatgagcagccgaagaccatcaacgataccatctctccgagaatcaaggataatgatattgtgatcgaagagctgaacatgagtgatgaagagatcaaagagatcacgaagatccatattgtggcctgcggctccgcatatcataccggagttaccgcaaaatatgtgatcgagggtctggcaagaatcccggtagaagtggatgtggccagtgaattccgttatcgtgatccgattcttcagaagggtaatatggtcattgtcatcagccagtccggtgagacggcagatactctggcagcactgagagagtccagggaaaggggcttcaaggtactgggcattgtcaatgtggtgggaagctccattgccagagaggcagacagtgttatgtatacctgggcaggtcccgagatcgcagtggctaccaccaaggcttacagtgcacagctgacggcactttacatgttggctatgaaattcgccagggtacgtggtactattgatcaggagaagttcgccggtatgctgacagatttaagatgcctgccggatcagatcgaactgcttctgggacagaaggagaagatccagcattttgccaaccgttacgtgggagcaagagatatcttcttcatcggacgcggtattgattacgcgatttcactggaaggatccttgaaactgaaggagatctcctatattcattccgaggcttatgcagctggagaactgaagcatggtacgatttctctgatcgaagatggtacgctggtagtggctttggcaacccagccggatctgttccagaagaccatcagtaatatggtagaagtaaaagcaagaggagcctttgttatggcagtcaccattgaaggcaacaaggccattgagaaagcgtcggattatgtaatatacatccccgagaccaatccgtactttaccaattctctggcaatcattcctttgcagttgttctcctactatgtggcagtgggacgcggctgtgacgtggataaacccagaaacctggcaaaatccgttactgttgagtagagtgtaataacttacccatagagagactgaggactgcttgcaggcagaacagactctctgttttttcaggattcataattgcttcagaaagttatcacaattcggacacaattgacggatatactgtgttcataaggtgagaggaagaaatgaaacaggtaatggtaaaaagagttctcacttgcaacaggataggaggaagcaatatgtacgagaataataatttttccggttacggaaccggcaatgaaaatacaaccggtacattcagtggagcagatctgaatgagacaagaacagaaaacagttatggctatgaaaatcatagtactacccagagtgcagcaggaagcaccaatggttacaccacttatcagatgggcggaaccacaggcagcaacaatacggagcctaagaaaacccaaaaacatggcggttacttccggaaggcaatggtaagtgtcagcctgggattgttcttcggactgttcgcaggaatcggtttctatgcagtacagcagggaaccgggatgtttacgaccagcacagataccgcagtggtagatgagatcgcttctgaggcaacgacagaaagtacccagagtgcacagctggctaccaatgttacttatgtagagtccgatgtatccaatgtggtagaaaaagtaatgcctgccatggtatccatcgtaaataactttaccgagacagccaatgtcttcggacagcagtacacacaggaagaagcagccagtggttccggtatcattgtaggtaagaccgatgatgaactgctgatcgtatccaataatcatgtagtagagagtgcagatactctgaccgttacttttatcgatggcagtgaagcacaggcacaggtcaaaggactggattccgacatggatctggcagtgatcgcagtatctttaaatgatctgagtgatgataccaagaatgctattacagtagcaacacttggcagcagtgatgatctgaagcttggtgagccggtcatcgctatcggtaatgcccttggctatggtcagtctgttaccaacggtattgtaagtgccctgaatcgtgagatcactctggagaacggctctaccggtctggagaacggctctaccggtactttcatccagaccaacgcagccatcaaccccggtaactccggcggtgcactgctgaacatgaatggtgaggttatcggtatcaactccaacaagatcggtggtactgccgtagaaggtatgggatatgctatcccgattacttcggcaagtcctatcattgcagatctgatggagcgtcagaccagaaccaaggtagctgaggatgaagtcggttacatcggcatctccctgcaggaagtaacttcccagatctcccagatgtacaacatgccggaaggtatctatgtagtatctgtagaggaaggcagcgcagcagccaatgccggtatcatgaaaggtgatatcattaccaaatttgacggcagcagtatctcttcctactctgatctgcagaaaacgttacagtattatgcggccggtgattccgtaaccgtaacggtacagagacctcagaacggtgaatatgtatccatcgagctgaatctgacactgggcagcagacctgcaagccagaaataaagaaataacaggtaaataaaaggaaatggaaagagacccgggcgagacatatggttttgcccgggtcttgtaatatttaccaaaatatgaatagttataaatggtttagaaaaacttaacttgtgccccgctacttcattgagtataataagcgtaggcaatgagaagtgtcagacacgggtattatgcaatatgactgcttgcaggcattattgcgtaatggccggggatgatagggcgaagcccggatatcgagggaacacgaagtgttgccgagatacactgcgaagatgctttggagccggggatgatagggcgaagcccggatatctagggaacacgaagtgttaccgagatacactgcggaataatggtaggaaacaaagaggagaataacatgacagataattataatgatgattatagagaagtgatccctaaggaggaaaaaacagagaccgatgtgagtgaaactcaggataacgaaaaaaataacggaaacacacaggtggcggatactgcaaaagaaaattccaccgaaaaaaagtcagaggacaaaaaggacagcagcgaatacgaagatgtctgctttatctgccgcagaccggagagcaaagccggcagaatgttcaagctgcccaaccatatctgcatctgcgatgattgcatgcacaagaccatggagactgtgagccagttcgattatcagggaatgttgaacaatcccaatgatttcaaccagtttaacggacagaacggattccccaacatcagttttgtgaatctggcggatcttcagggagacggcggtattcccaacaagcagaaactcaagaagaaaaagaaggcggaaggtcccaaacctgtattcaatatcaaggacattccggcacctcataagatcaaggccagtctggatgaatacgtggtaggacaggaaaaagccaagaaggtcatctccgtagcagtatacaaccattacaagagagtggccactgacactatggatgagattgagatcgaaaagtccaacatcctcatgatcggccccaccggttccggtaagacctatctggtaaagacactggcaaaacttctggatgtgcctctggctattgctgatgccacctctctgactgaggccggttatatcggtgatgatatcgagagcgtggtatccaaattgctggcagcggcgggcaatgacgtagaaaaggcggaaaaaggtatcatcttcatcgatgagatcgacaagatcgccaagaagaaaaacaccaactcccgggatgtcagcggagagagtgtacagcagggtatgttgaagcttctggaaggtgcggaagtggaggtgccggtaggtgccaacagcaaaaatgccatggtacctctggcaacggtgaacacccgtaacattctgtttatttgcggtggtgcgttcccggatctggacgagatcatcaaggagcgcctgaccaagaccgcatccatcggtttcaactcggaactgaaggataaatacgataaagataccgatattttatccaaggtgactgtggaggatatccgcaagtttggtatgattccggaatttatcggtcgtctgccgatcatttgtactttacagggattgtcaaaggatatgttggtgaagatcctgaaagagccgaagaatgcgattcttaagcagtaccagaagctgttggagctggatgaggtaaaactggagttcacagacgatgccctggatgccattgccgagaaggcaatgaagcgtgataccggtgccagagccctgcgctccatcatcgaggacttcatgctggatatcatgtatgagatcccgaaggatgataacatcggaagggttaccattaccagagagtacattgaaggaaccggcggccccatcatcgacatccgcagcaatgaaattctggaacaggtggagaacctgaagcagattccggtggaagagaaataaattgagagttagtgaaatacattggcaaaatccacgaactcccggagcatgcgata

SEQ ID NO: 767 - DNA, 54693 bp, unidentified
  source 1..54693: mol_type = unassigned DNA
cctttccaacaagaatatctccggctcttacctcagcaccaacgcggataataccgttctcatcaagatcctttacagcatctgaacctgttgaaggaagatctcttgtaatctcttcaggtcctaacttagtatctcttgcttctgtctcatattcttcaatatgaatagatgtatacacatcatctcttacgagacgctcactaagaagtacagcatcctcgtagttataaccttcccaagtcatgaaaccgataagagggttcttaccgagggcaatctcaccattagatgtagatggaccatcagcaataacatctcctgccttaacctcatcacccttgaaaacaataggtctctggttatagcagttactctggttacttcttgagaacttagtaagcttgtattcgcgcgccttgccatccttttctctgataacaatcttgttagattcagaagaaagaacaacaccatcagcctctgcaactacacatacccctgagtcaacagcagtcttattctcaataccagttccgataacaggagcttctgtcataagaagaggtacggcctgacgctgcatgttagaacccatgagggcacgtgtacagtcatcattctgaaggaatggaatcattgatgtagcaactgagaataccatcttaggagatacatccataagatcaatctggctcttatcgaactgagaagtttcttctctgtaacgtccagatacagtatttcttacgaaataaccattctcatcaatctcagcattagcctgtgctacatggaaatcatcttcctcatcagctgtgaagtaacgcacttcatcagtaactcttggattcttaggatcagacttatctacaatacgataaggagcttcaacgaatccatattcattaattcttgcataagatgcaagagagttaataagaccaatgttaggtccttcaggagtctcgataggacacattctaccataatgagtatagtgtacatctcgaacctcgaaacctgcacgatctcttgaaagaccaccaggaccaagggctgaaagacgtctcttatgagtaatctcactaagagggttattctgatccatgaactgtgacaactgcgaacttccgaagaattccttaatagcagctgttacaggcttaatattaataagtgactgtggagatattccgctaagatcctgtgtagacattctctcacggacaactctttccattcttgagataccaattctgaactggttctgaagaagctctcctacagctctgatacgtctgtttccaaggtgatcgatatcatccttagtaccaacaccatattcaaggtgcatattataattaatagaagcaagaatatcttctactgtaatatgcttaggaataagatcagcaatattcttagtaatagcttccttaatatcctctaaagattcattctcagcaagaatctgtgcaagaacaggatagtatacatactctgttacaccaagctccttagcttcttcttcgctgatatcaacccatttagtaatatcaaccgcacggttagaaagaatcttaacaactctgtcagatactgtaccatcagcagccttaacttctacagtaatgaatactgaaggaacagctgcatcctgaatagcctgtgctgattctcttgtaagcttctcacctgctgttgcaataacagttccgttctcatcaacaacatcctcagcaagaacctgtcctgtaattctgctcttgaaagaaagcttcttattaaacttatatcttcctacgtgtgcaagatcatatcttcttgggtcaaagaacatacctgaaataagtgcttcagcactctctacagataatggttctcctggtcttaacttcttataaagttcaagaataccttcctgatagttagtagaagtatccttctccatagtagcaagaagcttaggttcctcgccaaaaatatcaagaatctccgcattagtaccaaatcctaatgctctgataagaacagtaataggaaccttcttattacggtcaaccttaacatagaatatatcattagcatctgtttcatactctaaccatgcacctctgttaggaattacctgacagctgtacaagaaaatcttaccatacttatctttctgtatatcataataaataccaggtgaacgtaccaactggctgacaataactcgttcagcaccattaattacaaatgtacctgtcttagtcattaatggcaggtctcccatgaaaatctcatgctcgctgatgctttctgtctctttgttatgaagtcttactgtaaccttaagaggcgctgcatatgtagcatctctttctttacactcttcaattgaatacttaacttcgtcttcacataacgcaaaatctacgaattccagacttaatcttccattatagtctgcaattggagatatgtcatcaaagacctctttcaagccttcattcaaaaaccactggtaagaatccttctgcacctcaataaggttaggcatctcaagaacttctttctgtcttgagaaactcatacgcattgccttgcccgacgttattgggcgtaatctgtttttctccattgacgtttcaccccttagttttcttcacattaatatattacattatcagtaaatgtgcaaagaataagcacaatttaccacaatagtgcattgtccatagtacatcaaagatatatatatgtcaagggatttttgaaaatttccatgaatattcagaattgtataaagataatagtgtttctgccatagctggcataataaaataaagatgtgatttatagaaaaaagaaaagacaggagccgtgaaggcccgctgtctttcttattatattcattagaacaatcaagtgaattacttaagagtaaccttagctccaacttcttcaagcttcttcttgatttcctcagcctcttccttagaagcctgctccttaacaaccttaggtgcgccatcaacaacgtccttagcttcctttaatccaagacctgtgatttcacgaacaaccttgataaccttaaccttctgatctccagcttctgtaagctctacatcaaattctgtcttctcctcagctgctgctgcgccagcacctgctgctgcaactacaacgcctgctgctgcagatacgccgaattcttcttcacaagccttaactaaatcgttaagctctaatactgataaacctttaataacttcaatgatttcctgtgttgtcattattataatctcctttttaatattattctaaaattgaaagagtatctatgctgctttcatagttaattcagtgttaaactgattaagcaacttcctcgttcttctcagcaatctgcttaataacacgagcaaagtttgtaataggtgactggatacttccaagtaactttgaaagaagttcctctcttgaagggatagtagcgattgtagcgatacctgctgcatcgtagaatgttccttcaacaacgccacactttaactcaagagcattagctgtcttagcaaagttagctaatattcttgcaggtgctgtagcatctgtcttgcagaatgcaatagcattagttccttcaagagcatcagtaattggctcgaactctgttccagcaacaactctctttactaaagtgttcttataaaccttataaaccacaccagcttctcttaactgcttacgaagctgtgtatcctgttctactgtaagaccgctgtagttaactacaacaacgccctgagcgccgtcaaagttatctttaatctcatcgatagtagatgtcttaaggcctacattctttaaaatagccatgaataattacctcctgttagattcttgcttcatatagaagcgattttgcctaagtgaagattattcgtctatagtttccctacaaacaaaaccctctctgccagcgacagagagggaataattaatcaaatccttaaatcctcggtaggcgtgttacctttaaccatcatcagtaatactgaatccggacctgctgtctacggcaaaatattatgttaacagcaaaatgctgctcacaagctgatagtatactatcaaaatatattaatgtcaaccgtttttaatcaaaaatctgattaacccacatacttggctgtgcttaacttaacaccaggtcccatagtagaagtgagaactacacttctaagataagctcccttaagtgaagatggcttagccttaacgattgcatccataatagcctggaagttgtctgataactgctcctctgtgaatgaagccttaccaattggcacgtgaatgatattagtcttgtcaagtctgtactcgatcttaccagccttgatatcattaacagcttttgttacatccatagtaactgtaccagccttagggtttggcattaatcccttaggtccaagtacacgaccaagacgaccaacaacacccatcatatctggagttgcaacaacaacgtcgaactcgaaccagttatcgttctggatcttaggaataagctcctcgccaccaacgaaatctgctccagctgcaagagcctcatcagccttagcacccttagcaaatactaatacacgtacagtcttacctgttccgtgtggaagaacaacagctcctctgatctgctgctcagcatgacgtccatcacaacctgttctgatatgtgcttcgattgtctcgtcgaatttagcagtagcgttcttctttactaatgagatagcgtctgctgcttcatataatgtctggcggtcaatattcttggctgcctcaacgtatttctttcctcttttcattataaacctcctagtggtaatatcggaaggattttatctttcctcccacaataatcatgaatcaaatgtagattagtcttctacaacgatacccatactcttagctgttccttcgatcatagaagtagctgcttcgatagatgcagcattaagatctggcatcttaagctcagcgatcttctgaacttctgctctcttaatagtagcaaccttagtcttgttaggtacgcctgatcctgacttaatgttgcaagccttcttaagaagtactgctgcaggtggagtctttgtaataaagctgaagcttctatcagcataaactgtaataactacaggtatgataagatctccctgatctgctgtcttagcattgaactgctttgtgaattctacgatgttaacaccgtgctgaccaagtgctggaccaactggtggagctggtgtagccttgccggcaggaatctgtaatttaatatatcctgttactttctttgccattttggcacctcctaaaaataaatgtggtaattggcgaccatcataatattaccctgctatccatccttcaagaattgaccatcgtgcaattcttgtgaatgaatttacacagtaaattcattctggtctcccacgtcccaggatcgggactgcttcttacaataacttcacatctgtgaaatcaatctcgaccggtgtttcacgaccgaacatctcaacattaattgtaaggcactgcttgccctcattaatattggtaatctcaccaactgtatcttcccatgcaccagagaggatcataaccttatcgccgaccttgccagcgaactggataacaggcttaacttcctgttcttcctcaaggcttatgccgagattcttaatttctgttggtgtaagtggtactggctttgatccaggaccaacaaaccctgtaacacctcttgtgtttctgacaacataccaactatcgtcgttcattaccatcttcacaagaacgtatccaggaaacattttcttctgagcagctttcttagagccatccttaatctccactactgtttcaagtggaacgataacttcaagaatctgatcgtgaagatttctgttttcaactgtcttctcaatgttagccttcaccttgttctcataacctgagtaagtgtgaactacataccattttgcgtcatccatacaatcacctattccttattttacaatgaactcaattccaaagcggacaattaaatccacaactgcaatgattacacctaataatacggacacagccaatacagctacagtttccttagtaagcgactgacggtctggccaaataatttttgaaaattcagcttttaaacctttgaaccagttctttttctgcttcttagcttttacagtatcacccatgaaatactcctcactgtactaattactttgtttccttgtgtaatgtgtgtgatttacagaacttacaatacttctttgtttccattctgtctggatgagctttcttttccttagtcatgttgtaattgcgctgtttacactcagtacatgccaatgttatctttactcgcacaacttccacctccaattattatttttgtaggtgttaaaacaccaattggtttctttgcccgcctaatcaatgttgggttgttgaaattcaggcacgcaaaaaagaccgcttccatagccgttctaatatagcacagtacattccaactcgtcaacaacttttttaaagaaaatatagtgacaaaaaatgaacttcatattataatatttgtacaaaaacatacgatatatataaggaaatggatttccttacattttctaccgattattacagacaaggaggtgactgttatgatcagcagcgtgtacagctattatcttgcccagtatggacataagactaactcaaagtacgatacacacactaaagcacaattaaagaatacatatggcagagttctgaaatctaacagtcagactcctacatataagacagatatgtcagaggccgcacagaaatatgcaatcgaccttaaagagaacgccagagaattaagtaacattgccaacgagctttcaggaagcgacggtcacggcatggtatttaagaaatcagcagtatcagacaatcctgatgcggtaacagccacatttataggcgacagctcatctgccgatgatacaagccttgatatagaagtccgccagcttgcaacaagccagattaataccggacattacctgcagcctaacagccgcacagttaagccaggagattattcatttgatttgaacatcaataatctgacctatgaattccagtttaatgtagatgaggaagagagcaattctgacatacagaacaagcttgccagacttattaaccgttccaatatcggacttaatgcttctgtaagtgaagacagcctcggcaatactgcgctgaacattgaatcagacatgacaggtgtaagtgtaatcaagcctacaatatttaacatcaggcctaataacgatattcagacagacaatcctgatttcgtggaaggttttgatgagcctactatggagaagaacactaacttcattgaaacatatggtcttgaccgtgtaacacagtatcctagcaatgcaatcttttctgtcaatggagaagaacgctcatctgcttcgaatgacataacaattaacaaaacatttgcaatatcatttcataatacaactgacaagccggcaaccatcagtcttaaagatgatgctgattcaatcacagaaagcattacagaacttgtttccggctacaacagacttgtttccatcgccgcagataaagataacgataagtttgagggcaatgccaagttaaagaaagaattttcaagaataatgaaggcttaccagccacagcttgaacgcaatggacttacagtaagtgatgagggttcgcttgaagttaataaggtggttattcagaaagctgcttctgacggcacactttccgatgtatttaacgctttggattcattcaagaaatcaatccaaagaaaggctgatgatatctccatcaaccctatgaactatgtaaacaataagattgtcgcttataagaatccacataagcctgtgaatgacccttataatctttctgcctactcaggcatgatgttcaatggctatatctaactaccataatataaaataaggcatccgtctggttcatgtaatacataaaccggcggatgcctttatgtttcttattattcattaatcagtctgcttcctgcatcatgtaactgcttaacaaatgtactaagccttacaagcgctttagaaacagtcacatcatcatcagcctttacagcctctgaaagctccttaacaccagaattagcttctgcctcgtcaactgccccagcctcaataatatccttagttccattatatacttcaaaaagccagttaagcccttcaataataacattcaccgcatcatgagtctctggaaaaggaactcctgaaagttcttctgaaactttctctattgctccaataagcttctcgctgtaaggaacagcttccttaagtacatctatctgctgctgtctgtaatcatccatgattctaatcacctttctttatgaacttatagaatatatatcggctggattggtggaaagttaatattaatcaccaataaactcgcatacagcttcctcatcaaccgtgccatcagactttcttggcaaaggttcttttcttaacacaatcttctgaatctcccagcggtaaccttttttctcgttatacttgtcaatacgtctcttgaatatatcctcagttgcactcttatcaataggcacaataaccgccgtaagcctgttattgtaaaatattataaaaccttctgcaactccattaatagctgtaatctgttcattagttcttacacggcttatcttctcacctgtaggcaacagaataatatccggattgcgctgcaacagaacaagtctgccggcattgttaatccttccgtaatcacctgtatgatacataccgtcttttaatacattttcagtagactccacgtcattataatagcctttcatgacacatggtccacttacaataatctctccatcatcagcaatagatactgcattattatcaaaaagagtatacgaaccatcgtaaagctcattaacccctacacaacccgaagtctctgtcattccatatatattataaaccttcaaatcactgtcacagagattctcaaaaagtctgaacgggcagcttgcaccacctatgataatagtattgagttctttattaaacccacttatagctcgctgatagtcaatcatagaaggagtacctataagaatagttggattataataataagtatctgcatcaacatgtcttaagcctctgcctatacacaccatagcaccattatacagaggccatatgaggctgtatataaatccaaattcattatgaagcgaaatctgtgcaagcacaatatcatcacttgtacattcaaccctgctgtttatagccataacagcattaagaatattatcaacagacagaacaaccggcttatcacattcattagctgtagccgtaaacatgataatatcgccctcctgcgtattctcatcatatataagtccgtcaacattatccttctcagcacttgatatgataatagaattctcatcagagagaatatactggttagtagatgtcagtgtataattaacttccgtcttcttaagaaggtcaaccctcgaatcatgaggaaggaagaaatcaacaagtgcaagctcctttcccgcaacaatcgttccgaacatattaacgatccatctatatgaagccggcccgaatattgcaatcctctttccttcaaatttctgaaaatgtaatgccttcttagttacatcatcaaatagcttcgcataagtaaccttcatcgtatcataaacgacagccacagcgtctggctggctctcggcattactctttaacatattataaaatgtattcttatctgtcatgattttctccgttctttaaaaaataacaacattgccatatacatattacacttttctaaaattgtctgccacctgatataatatatcaggtgtaacatcacaatccagaagttcaactaatagctgataaaactctttcatgcttgtcttaatatatggattattaacacatcctggcattgcctcaagtacatcattctttaactgaatatacatatcatatggaggtttttcataccttaaacaaatcaccttcatagtccctagataccatgtaaacaacaaatccagttcaagttcatcatgaaaacaatcccacactcccctttccttaagttgtttatacaaaagcatattagaaatcataatatccttatgatattcagcattcttagatagtacagttgacttaggattgacataataatgataaaaaattctgtctacaaaggcaattcgtctggcatatacatgaagcagcgttccataatatatatcctcataagcaatcccctcgggaaaaacaatattattgtttaataacaaatcccgcttaattatcttatcccatacaacataactcatttcattggttacaagcagctctcttctcttactatccatatctatatatattttcttcactgaaccagttccaggattatcaattatgccattacctgcatcacgcattgatcggcatacaacaatatcctgattacctgcatacgcctcatcaagcaatgttttatacatatcaggttcaacccagtcatcactgtcagtataacctatatactctcccgaagcataagaaactccaatatttcttgccttacccatctttccattctcatcacaatgaatagccattataagttcagggaatctctgttcccaatcagtaatatgcttccaagtatcatcagcagatgcgtcatcaacaaggataatttcgtactctgaatgtgaaagcgtctgattaaccaaagaattcacgcatctgtcaatatatttttcaacattataacatggtacaacaatacttagttttttcactccaattcccccatattatctgaacacattataaactaattaaaattataacatttgccatagcaattgccaacctagttaatatataatagtttacataaatattttgtaaaaggggatacttatgaaaatatacatatacagatatggcagtctctgtgagcctgatataatagatgcctttaaacgcatcggattagagattgttgaagaaagtgctgagatatataataaatcaatcataccatccgaaagtgcggcacttgcctcttctgtgcttactaaaggaggattcgcatttgcattcacaatcaacttttttccatggctttcagatatatgccagcttcttaacataacatatataagccttatcgttgacagtcctgttcttgaattatattcaaatgctatttccaatcctgtaaacaggatatttctttttgacaaaatgctttatgaagaattcgaacagtacaacaaaggacacatttttcatatgccgctcgcagctaacacttcaagaaccgacgaaataatcagtctcgcttcttattctgataagaaaaaatatgccagcgacatatcattcatcggctcaacctatcaggaaaaatgtccatttaataacgctgtactttccgattatgaaagaggttttgttgacggaattattaatgcacagattggtgtgtatggttttaattttatagaaagcatgctaacagaagatatggcagaaaaacttcttgaaagcatacctgaccattatgaatttcctgccagctcacgaaaaaacatcaaagcacttgttgcacaatactatttaagtgtaaaagttgccgaacaggaacgtttgagaatgttgcgcatgctgtctgataatttcaacgtcgatatatacaccggaagcgatacttcaggcatgcctgatatacataataggggttttgcaaaatccctgacagagatgccgcttatatttaataacagcaaaatcaatatcaatatcactgcaaaatcaatccgctcaggattatctcttagaatatttgatgttcttggctgtggcggtttccttataaccaattatcaggctgaacttccggaattctttgaaattggcaaagaccttgtagcttatgaaagcgaaacacatttgaaagaattatgttcatactaccttgaacatgatgacgaaagaaaagaaatagcaaggcatggttacgaaacaattaaaaaatatcacacatatgatatccgtgtcctgcagataatagataaagcgtttcctgcccattaatgggtagaaaacgctttaatgctaattgaacacaacatcaaacatttctttaaatcttacatcataagtatgaaactctgatatctttccatatccattcgctgctatctgttttctctcattgtcatgtgagagataatatctgcatttatcgctaagatcatctacagattcatacataaccatatcctctcctggaacaaaccagtcataataatcagcctgataattagacataagaaagccacctgctcccattacatccattcctctgagtggaattcctgatttaatacttctcaatgtaatattaagattaattcttgtattattaaatatatatggcatatcattataataatcaacaggtcccctgttattcacattcagcagcattggtgtttcattaaatgtaaacagattaaccatgtattcttttccaaaatcccgtccaagccttgacataatctctgtcctgtcatcattagccatctttcttgcaagaaaataatcagcatacagatattgtattgtttcaactccatcgttatttggctccagtggcagactattaagcatatctttaagaatctctccattaagcacctcttcaagaaagaaatgcccatacacttttctctgtgcattcataacagaatccagatatcctcgtgtaaaatcagatataccatctaatttatcatacagattatgcttttcattatacattgctccaacaaatgctatatccccaccatatacctctgtgaatctgcttctattctgctcctgagcagcagacattctcttcattctgtctgtattaaccgctaatggaacataatacacagtatttataccctctttttttaattccatatattgagttttatcaaatataaacacataattacatgtattaattatcgtatacgaatacaacaaaacctgagggctgtcataaactaatgctatatatggaacatttcttgccttgcaattattagatataacagggctataattaaatgtgaatacgcaatcatatttctctccatttattccctcgctaaacttctcttcaaacaacctgtcaaattccggactcaccctgtttctatactcatctgtctctacaacagtatatttgtacccctttttttcaagacattctttaacatcttctgttccaaaattattatattcaaaaataagtatattcatcaggaaatttcctttcttaatatttccatcattttagaaatctgattatcatatgtaaacatttttataatcttatcctgtccgtttcttgctattctctttctcttctcatcatgcttaatatagaactctgctttgtcacaacattcctctgagtcaatgaatgttacatagtcatctccatcattcatatattcacttaactcataacaataattagtaagaagaaatcctcctgcccccattatatctaaagctcttaatggaatgcctgtcttaatatttcttaatgttatgttaagattaactttgctattagcaaacatcaccggcatctctttcatataatcaatatatcctctttttcttaccgcaggcagacattgcttcttagaatcagaatataatgtcacatcgcattttgaagatagtatttctaacattttgattctttccatagatgaaatattctttttaatcatatttaatgccagttccgtgtccttaataaaaaattctttttctttcgaaaaacttacatatctattcagtctttgattataataatcatcaaaaagttcttctatcaaatctgttcctggcattgtaagttgtgctaattccagacttttcatatatcccttttcataatctggtaatcctgctatactttcaataaaatccacttcatcattatacagatttcccataaacgcaacaccattgtttacatatttccagcttacagttgttgcttgtttaataacattgttcactctctcaatattcactgccaatggaagatgatatatatgtgaaaccccaagcttttttacccgttcaacttctgataaatcgaaatgaaacatataattataaggattgaataccatctccgaatacatagtcatacatgggctgtcatatatccaacagacatatggcgtcttatttctcaacgcaatcttagaaatcagaggtataaaattacacgaaaaaataaaatcatatccttttccagactgatttgccctatttaattcagattctaatctttcaagaaactcaacatcttttatataactttttaactcatattcaaaggaactgacttcatatcccatttttataaatgtctggattacatctgtttttattatctcattccatgtataatataatattttcatatattaattacctagtctatgctaacgacaatcccttcatatactcacttgcacaatactctaattctttatcagtcagattcagtttatcaatcaattcaaggcttttcatctcctcttttacccctggtaagccaatatacggattatttctgtaatccggtacatattcttttaccgtttttgccatatagcgcaacataacagctaacataggcatccctctgcctgccataaagtaaaacgtctccgcataaaaagaatgtataaaatacaagtcaatctcatctttatattcgttaaaaaaatccgattggagcattgttaaataaacattaagctgaacctgaagatgttgaaccattgtagaaggattattcatatatgataacattgtacctttttcattatatctgtaataataaagctttgtttctgtaaccgctaccttgttcacatagaatttcattggatatgtaaacatgggctcttcatatgcaactccttctgcatatcttacattagcacaatcaattaatgatttacggtataatttagttgtacatgattcattaagtatctgtgaatttaacaatttttcttttctattgcatgaataatctactatcttgtaatcaatattatctattgcacgagacatttcttcaggcttgtcttttgtttccatatatctgaactgtaccacatcacattcattcttattcataatatcaacaagtactttatacatgtcaggatgaatccagtcatcagaatcaacaaaacttataaaatctcctgttgcatatgataagccaatatttcttgctgttccctgcctgccattcttttcacataaaacaagcataatattgtccggatatttttcttcatattttttcaaaacacttacagtctcatctgcagatgcatcatcaatcagaataatctccagatgttcaagccctattgtctgagctacaatactatcaagacactctgataccatatccttaacattataacagggtataattactgatatcttttccccactcataaacttctcctatatttctaacaacgtctttaacctgtcatcaaaagaaaacttttcgcgaacctttctgtgaccattctctgctattctaatacgtttctcatcatgtttcagataatacataactttcataaccatatctttcatatcttcataaacaacaagatcgttacccacatcaaagtattcaaataattctggttgtacattagttaatacaaagcctccacatgccataacatcaagaattcttaacggaattcctgtctgaatagtacacagggatacattaagattaatacggctcttcctgaatatatccggcatctgtgtataataatctgcatatccacagaaattaactttttccagtcttttatcaacatctttagaatatacattaacattgcatctgtcctgaagcaatgccaatgctgtaaatctctgtcttcctgtaacttccttagcaagagtatatgaaagttctcttctagatgcattgaatacaccatctcctgccttactaaaatcaagattgatattattaaccagtttctcatccagcatctcatctattataaacccaccggatatctgactctgtgctgctattattccttcaaggtatcccctgttatacatacttaatccaccacataaatcagaatattccgacttatataattgtccaagcagtgatacatcacatacatactcatcataatatgagcgtactccaccaaacacttccgggtcagctgccaaaggtaaatactctgccccatctacaccctgaattctgaattcttccgcctgcatcctgtcaaaaaaatatatcttattgcatgaattcttcatagtatccagatgccttatatgcagaggcgaatcatatacccacgaaatatacctgattctcatcttctcacatatgtcagatataatcggcatataattaaccgataaaacacccgaataatttcctttctcaagcctgtcaataaatcttctttcaaatgcatcatccttatcccagttatcagctatatcataatacacttcatattcaattctaagcttctttaatgcattttccatccccttctgcataaatgcattccactgatagaataatatcattacattctccttatcaaaaaaggagccgaagctacgattattatcgttaagctccagctcctaaagtactatattctatattactgtaagagtgaaagaacaccctgtgtctgctgattagcctgagaaagcattgactgtccagcctgtgcgagaatgttgttcttgctgtactcaaccatctctgtagccatatctgtatcacggatacgagactcagctgctgatgtattctcagatgttgtatccaggttattaatagtatgctcaagtctgttctggatagcacctaacttagaacgctcctctgaaaccctattaatagccttctgaataagtgacatagactgcccagcaactgcattagagctaaccttaattgcattatacccaatgccaagagctgatgccttcatactcttaatgcttacgctgataacctgtcctgaaagagcaccaacctgaagactctttcctgtgaaatcaccatcaagaagattcattgtattaaactgtgtagtagagtagattctgtcaagctctgaagtaagctgtgtaagctcctgctgtatagcacttctatctgatgatgtgttagtatcattagctgcctgcgttgcaagttcattcattctctgtaagattgaatgagattcattaagtgcaccttctgcaacctgaataagagagataccgtcttctgcattagatgaagccttattaagacctcttatctggcttctcatcttctctgaaattgaaagacctgctgcatcatctgctgctctgttaattctataacctgaagataacttctctgtagacttagaaagggcacttgttactgttcccatctgtctgtttgtgttcatagctgaaagattgtgctgtactaccataatgtaattcctccttgataataaatctcctatataatatctaatctttactgtacagattaaatagtgattactaaataatgtttatcacttatgtattatttatcggagccatcatgaaatacttaacccctgttcataaaaaaatttgaaaattttaccacatcatcattaaactttgatttttcctgttttatctgatctatataatattcgaaatccttccttgcttcataaaagttatcacatatataatgcatgcaattctctataccttcataatctgtttcattctcaaatttatatctgtccggaatcggtacatcttcgtaatatccggcacttcccctgcggttagttattacacaacaaccgcatactgcagcttctcttggaatcctgtccttccctggatgtcctccaaaatcgatatatattctggcaatatgcatataggcagtcatgtcttcctctgtaagtcctataagtggaatccatttgagccatgacgaagttctctccataactggcttaattctgtccagtcctttcttgggattatacagaacaatattctgccttagaatctcgggtacttctgtcatatatatatcaccgatataatctgatacatacattatattcttctcatcagcacctacaacatctctcacatactcatatgcatactttgactgtaccagatgtagtacaacttcttttcttataacatcaatatccctgccatctgtattaataagataattatcaacactcatccaccagagtactttatggcaatgttttatcaagggaataagtcccgttgctccttcattaaacacaacaacactggtgtcctgttctatctcagataactgctttgcatgaaatgtattatatttaatatatttgtcgcttgcattcacatcctgaggattaatatcattagattttatgtaatacatatatgcttccaagcctgcatcattaagcctgtggcacatctgatgtgcaagctccggtccgccgctttcaatctctgcaggacatacattataaaatgtcatctcatatcctccaatattcttttgatattgtcaaaataattatctatattgtacatttcaactgattttctgcaatcaattctatcacacagtttaacttttccttcatatatctcatccaacaaatgtgcaagacctattgcatcctcatttttaaagaaatatccattctcaccatgccgtacatagtcaataaccccgtcaacaggagtagatataactgtcattcccatcgacaaggcttcggcacctgtcaacataaacccttcatattccgaagcacataccagtgcagaagcatctttacaatactcccatggtgaatccttccagccaagaaactgcacctgatcctgctgcttaagatatgctgcaatctccttaagttcatcttctgactcccctgaaccgacaatcttgaacttccacttgtgtcttgctctgtataaagcttcaagtataacatcaacccgcttgacatcctgaagtcttccaacataacacagagtattattatcaataggcttttctataaactcctgcatattaacaggatttccgacataatatgtaacagcatccggacataattccttaattcttcgctcattacttctgcttatacatatatgagcatctgccataagcatctccctgacactgccaaacccagattgttcatattcatctatgctgctatgaacccatgaaacaatcctgaaatccagctttaaaagtctcttaaccgcatctgccacaacacacattgctggccagttaacagctacgcatatatccggttttccatacagattaataaaccctgcataatttcttgtaaaatgtgtaagtcttgcattaatatccacttcttcgcatgcgtcaaatgcatatgccctatcatatccttcaagatattttattcctgaagacatatgaataactcttacatcatataattcacgcggcagattcttagtccatgctcttattacattctcaataccaccacatcttccacctacaggagaaagaatatctattaccataataacctctccagataatcattctatgatatacacataaccttcacataatcttccgatttatcacgcataatttccatccctttctgaattgcgtcaagcggatattcatgcgttataaactgttccggatcaatccgtccatctgcaagcatattaagcacataatgccagtcatcacctgattctcctgcatatgatgaattccacgttccactaagctttaactgttttcttaatatcttccagtatgtatcctttggtatattcatctcagaatatggattaccaactagcacaatatttcctgctggtgcagcaagttctattgccctgtttattgtctcattctttccaacacattcaaatacataatctgccacaacattatctacattataatgttcgtcatcaactccaagtttctgtgcaaaatgcttctgcatgtctttattaccctcaacataaacattttgtattccttcagctttaagaaacatcgtaagcagaagtcctattgttcccagtcctataacacacacagatgaatccttttctatataaaatcttctcattgcatgcactgcaacagccattggttccatcattgcagcctgcttgtaagatacattatccggaagttcaataagattccattctggtacagctgcatattcagcaaaaccgccgttacaccttgaaccaagataattataattactgcacatttcatacatctttttcttacagtttatacactctccacatggtatcagcggaaatattcctactctctttcccctccatgaaaaattgtcatctgctgtttctataacttcacctgaaaattcatgcccggtaacaattggatgaacatgtgcaccggttttatatattcttggaatatctgagccacatactcctgctgcctttacctttactaatacccagcctttctctatccggggcttatcagtctcttcataccgtatgtctcctataccatgtaatacctgtgctttcataattattgttctcccgaaaccttccttttacttcataactcttgctttaaatatatactgatatgcatcaaactgctctatatctgctgagcctgatatacattgtaatgcattaataaactgatttttttcttcatcagatacatctattcctaaagccttaccagacacaactcctctatattcagcagaatatcccgcctgtgtaagcatttcaacacacgacttcatagtaaacatcttaagatgagtcttatccagaataccctcatctgcatattccagattacctcttaacaaaggcagcataaccgttatattcataaaattaggaacactgacaataagtgctgcatcatttttcatatatcttctgattttctctaatactttctgtggttctcttaaatgctccaacacatctgcaaatataacataatcaaaataatcatcacgatatggaagcgcatccatctcttcaatatttccctgtattatatccaaattattagcccctatatctgccacagccccaataagctctatacctttaacttccgcatgtggccataaatatttaatttttgcaagtgtagccccacatccgcatccaatttcaaggacatgaataggcttatcttcatcatcttttataaattgaataatctcattccgtgattttgaataataatcaatatcaaatccccatttttctttaaaaacttttctattatttctggacagtctgtttttctcttccacatcattgttaaaactaaaagacccacaatgaaatataaaactgttatgacatacaatacattgatatccagccttctgtattctgattccaatgtcatcatcttcataatatcctttaccatatcttaaatccagcagaccaatctgatcaagtacatcacgctttataataaccgcaaaaccagccagccacactttgttctcgtatggataatattccggaatattatttttcgtggcataatatatgtactcagatacagaatcaaatacttctgtaatattctgaaatccaccattatttgacatacagcttgttgctccaatcctgtcattctcatacagccccatccgcatccagaatatagcattaggagatacaacagtatcattattcagtaaaaatatatcataatcaggacttgatgctttaatcccctgattacacgcagcaccaaatcccttattatcctgattctttattaatgtgatatcattctgactctctaaccactctgtaactccgtctgttgatgcattatcgacaacgacaatttcataacttgaagaaatattattgatacggatactctttatgcaggctttcattacatctttagaattatatgaaacaatcacgatagataaaggttttactttaatgccacatgaacttatttcagacataacccctgaaatatatgctctgtcatctttattatcacaataaaacaacgcattttcatagcacagatatgctttatcaatattatccttaagataatactctcccaaagcaaaatataattcataatcattataattatctttcagtcctgctcttatcacatcaaagctttcctgccatttcccctctgactgcagtctggctatatattcatatatattctccatcctcattacaccttatcccttaaaactctgctgtaaatctatccatatcaaccttcgttgttatcttgtaattattctcatctcccggaatcatcacaatatccattcctgccataattgcaggttccgtggaaccattaactaaaagaatcttatccggaagtaaagtctcatttgccttaatatatggttttaatctgaataattccggagcctgtccggcatatactttgttcctgttaataagagatgaaattgccttcccgtcttcactataatataccgtatccttcataggcagaaccggaagtaccccatcatgtccggcaactgcctcaacgcactcatgtataagcttatctgttagaaacggtcttgctgcatcatgaataagaacattaacatctttctgctcatccgataatgaagcttcaattgccctaagcccattatatatggataactgcctgttactacccggacatgcatatcccttaaatttattaattttcttaatgtgctgctgccacattttatctgcaacaatccacacttcatcaatatcctttgaatgttccattgtctcaagacaataatcaataatcatcctgccattgaccctaatatactgctttggaatatctgttcctagtcttgtaccagttccaccggcaagcactaatgctatattcataacgctcctttacatcttaaacaaaccatccgtaatatccttatacacatattcagacgccttaatcccattcttagaataataatccaattcttctaaaaatacagcttttctttcctttttcatataatcatttccattaattacaacatcattaacaaagctgtcaattcccatataatcatgtccatccactttgtaatgagccttaatcagagcctctccaagttcattaaacctctgttccggtcgttcaagaaacagcattggtttatcaacatacatatactctccaacaaaagatatagagtcattgataataccatcagaagtatcaaaaagtgccagataatccccttcttcacaaacagatgcattcggcatctttctgaattcgtccagatatgcctcatattcttcaattgatttcatatatccatccagaacaagggaatttctaagattaggatgaggcttgaatataaatgagacactgtctttatatttctttgccagatatatataaaaatacatattcttattaaatgttgaaaaagataatatattatcatctcccaatgaaaaatgtggtgtaatgagaatcttcttatagctgtatatatctgtcccctccggaacagaccatatacttctaagcctttcttctgaatagtcatgcttttccagaaaataatccatcttaatatatccgctgttaactacattctttgcttttagtgcctgatatttctgaaaacctgtataatccttctttgtttcagtatataccttccacataacattcatgaaatctttgttatacatgaatttttctgcatatcccctatcttgtgaattacctacagtaagtccatacgaaatatacacattaagcacatataaaggcaatctggcaatctgatagttctttgcaatatcactataccacggtgtaacatttatcaccacatcaggaataccacctatttcctcccagccaattatctcctcagtctggaaatcatatatttttttcacattataaccacctgccatgaagaaatcataagtctgtgaatatgtctttcctcgttcttccttagttcttcctattaacggaacaggaaccacctgcggctcaaatctgtcatcagcctctaattttctgtaaatatattctgccggccattctgctgctgatattgggagaaatgtgacctttatcttttcattggctgtcagcctgcgttttatattacattttgcacattcaatggcggcatcataacaataattatataacctcataccaccagtcattgcacgcgtcacataaaacatagctataagatgctcatatgtcagtacagatgactgataattttgaaaaaacagatttccgctattctccagatattcagtaaattcatttgccagctctataacattatcttctgacacctgctctggaacattatcaattatcataactgtcttatctcctttaatatatcagcatatggtcttcccttcccaaaaagtaatgtagttcccagaacaaaccccctcactcccataggagcaaatgtagatatcttatctgcaccgcatgcaccatcccagtacacttcaaaattcatctcttctctaatcttaagaagtctctctatcttcttgccaacatatggaagatacatctgccccgcatttcctggattaactgacattacaagaaccttatctacaatctgcagcatctccataacagtctcaatacttgtaccagggttaatagctatgcccggaataagccctgcatcaattatcttctgtaaagtagtagacggatgatattctgcttctggatgaatatacacagtatccccttccttaagtgaattaaggaacagactaatatgcgtattaggatgttcaatcataagatggacatctaatggcttgtccgttgcagagcggatataccgcatatcattaagtgacattgcaaaattaggcacatatcgtccatccatgatatcaatatggaacgaatcaattcccgctgcctctagttctttaacttctttctctagattgccaaaattggcacacatcatagatgctgttaattctgtgtacatatatattccttcctgtgtttcttccaactactcattatatttttactactttttactggttttaattacttttactactttttactggtttttataagttcttacctattcgttcccaaatcaaacacatacacgtgctcatatccacctgcattttccctcaatgcctcatcgactcctccacatccgccagatgcaatcaaagagttacactgtgataaaagattaattgaagcagcatattcagcccccagctcaaatccatttcttttcacttcttcacttctgtgaagctcactcagtaattcattctgcctcgttacatatctctgctggtcagtaaaaaacaccttatcaccataccgctccttgaagaattcacaataaacggcatcttctgtggctatatacacataatcaagattccaatcacgcaaagcttcatctatcctgtctgcaatcatctccttagatgcgtgaattggatgattatgcagatgtgtattaacaaaatccgttcccctggctaacacacccaatgtccgttgtggatatggaaggtatttattctttctctccgcaatatatccaatcaggttattattaaacacaccatgtttccaatctaacgaaattcctttactcatctggctcattatattgctctgaacacttccattataaaatcctggtgagaaaaatacatgtttactatgcattacatcatctaaagaataatcccctggctgattaaagaacttcccccatatatcatcaccactataatctgaataaaaactctctcctgatttaacaattctgacaacaggttccattcctttagataatgcatatctaagacatacttcaatctttgaacgaatagtaaaaagccccagatttccataataaccatccatcacaaaaaaatacttgtctggattactctcgcccaattctctacaatcagagaacataaatgtaaacgacatcacctcatcataatacataactccctgttcataacgttccatgctttcttgatgtggtatgccatatgtcacatgaagacatttgaatccattcataagttctgtaaatctgttattttcaggttcaatctcataaaagcactcaatccccggtatatcatccagatgctcaatcatcttctcccagttagctcctacaagaaccagtcttttccccttccaaaatctaaatgctgtccggcacaattcaacagaaaactcattgcagtcatatagaaatatacagtcataattatcaataaaagccgtatccactcctcctgaatatgtatatttatgtgcatatgttccaccgtcaaaaactaatgctgcaactaaatttccatcttcatctactgcaaatgtaaaattcttatctgcaattgtattaacagacaaatagaacatatcaggtccatatgggacttttctgtcgtcaatattatatgtatctgcatactgtctgtaagtaatatcaccatattgttgctggttaattggtgaatctaagggttttattgatatcatgtgtacctcatttgcttaaaaaagtagattatttaacataatctactttataatgtgatttgttatatgtatttgaatctacaacagagactttgcaattcagccaactcagtttttttcttatactattctgcaaatctgtcataatcatctttttacttcttgaagtaaaacaattatcaaagtccccctctaagaacaaagtaataattaactgctttttatctttagaaatagattctgtattaattatcgaccaatactttttcaattctactgctgtctctttagaatttctcattgtaaatgccccataaatacaagctatcgtcatagccacctttttcgatatctccacatcataactttctttatgtctattcgaatcattattagatagctttttattgttagcaactattctccaaatattgttcttctcatcccccacacagttctttacctctatcatgtgaataaacttatctgatgaagcaataatatcaacccccttagaacctgacatattattgaattcttttctataaaacttatcatcatcaaatttataagctttagtttcctcactaaatacaaatgataatctgctctcgttaatctccatatataaacctctgctctctatcatataagtcatcaaattctttcataatagcattctcagtcatatcatcaagattatcaacacactgtgcatttatctcaccactatcactattgcggtaaagagatataaaattatactttatcttagaatccttattatatattgcctccatattaaaatactgttgaacaaaataattatgtgttgctacaaaaatctgaactcccatcttcgcaagctcagttaatgcatcgcacataggcttaatcatctttggattcatattagtctctggttcatcccaaaatagaatagaatccttcgtcaagcttcctgataatataagatacattatagtcgccatctttcgatatccttcagatacaagtcccatctcgaattccccttgtcccttaactttcagatagaacttcttatctttttggactatacttccattgactatatcttcaaaacttttcataaccatattctgctctattgtattaggtccttttctcaaaggtctttcaagcaatctgcataaatcataatatgtctcctcaaaagcaatatgaaattcatcatataacgaaccaaaattctcagtagatgatattatctccttcggcggtatatacactggtgtaaaattatctttaccttttatccccatgtgctttatatctatatgctttgaatgtttattagaaaatccaaatcttatatcatctttattgctcagaaatattcttacatctgtactattattaccacgatgtctgttaacaagtcttccaatagctccattatctggcataaaaattccttgaaacttacttaccattgcactttccaactcttcctttgaaagtgtgttattagatgaatacgctttagaacatgtttttaagcttgtatacagtaatttaatcaaagctgttttacctgtactattctcgccacttataatattaatattatctgagaattcaatatccaaatcattaaaagccataaagttactaacacataatctatttatcttcatacccataccctcaatattcaacgtaatctatatctgaattattacatatatgattatataatatactatatattataatttgtatatacataattgtgctcatccatatatgagaattcatatgtattatcaaatttttcctaaatttttttgacaaaacttagtatatatgaaattatatagtaaataaatttataaattgataatttcaaatgacataagaaaaagcaaaagacaattttgttcattcttacggaggtatttatgaaaaaaaatatatttacaccatatagaatatgtccacttggagcacatgttgatcatcaacttggtcttgtaacaggttttgctatagataaaggtgttactttagaatacgaacccactcttgatggcacggttgatttaataagtgctaatttctctggtcatacagtttttaatatttacgataatcctactcgcgaaatgatgtggggtgacttctcaaaagcagctgttgctgcacttaagctaaagtatgatttaaaatatggaatcaaaggaaaaatcagtggttctttacctattggtggtttatcatcttccgcatctgtaatcatcacatatctaatagcattttgtgaaacaaataatatccatttaactaaacccgaattaattatgaatgctatatgggcagagcgtaattatattggtgtaaatgttggtaaactagatcaaagttgtgaggtatattgtaaaaaaaacaatctactctttttggacacacttaacgattcaagtcaaaacataccgcaacaaacattgtccaaagatttccaacttatgatagtttttgcaggtaaagaacgacaacttgcaggatctgcatataatacacgtgtagatgaatgtaaatctgctgcttatgcaattgccgctttttccggtatggattacggaaaatttgaagatgcatatcttagaaacattcctaatagcatatatctcgaatatcgttcatttctacctgaaaattggcgtaaaagagctgatcatttttattcagaaaatgctagggttatttctggtattaatgcttggaaaaatggaaatatagaaaaattcggcaatttgatatttgaatctggaagaagttctattgaattatatgaatcaggtactgaaaatttaaaaactttacaagatattttcgaaagcacttatggaatttatggtggaagattttctggtgcaggatttaacggttcaagcattgctctcataaatccagaagaaaaagaccgaatacaagcaattgttagagaaaaatatattgctaaataccctttactagagaaaaagttttctcttttttttgtaaacacaactgatggagtagaattatgattaattgtatcgtattagcagcaggatatgctacaagactttatcctataactaaaaatttcccaaaaccgttacttgaagtaaataaaaaacctattattgattggttgttatacgattgtatttcaaccaaattaattgactctataattatagttacgaatgataaatattttaagcatttcgaaaattggaaaaaatccaggaaaaaagactacttatcaaacactgtaatagaaataattaacgatggatcattcagtaacgaatcacgacttggtgctgttaatgatatgtgtctcggctttagctatatgagcaataacagcccacaaacagatggaactttagtcattgcagctgataatattatagatttttcttttaaaggctttattaattattatttgaatttcaaaaagtcttgtgttatgtgttattatgaagattctttaattaatttgcaaaaaacaggagttgttacctttgataaaagcaacaaaataatccatatggaagaaaagccaattgcccctaaaagcaattgggcagttccacctttttatatctatactccttcagacatatatacaatattagacttatgcaaaattgataaaaccatggactctccaggtacattattagaaaaattatcaataaaatcagatctttatgtttataaaatgcctggcagacgatatgatattggtaatattcaaaatcttcaatacgtaaataaattattttcaaaacaattataaaacttgttttatgtctgtcattctattaaaaaatggatcttctacttttaactttgaaaaataacaatcattcagatttacattatgaatagccgatagaatttgctcatccaattttttatttatttttagctgttctattggataaatcttaataaaatcctttatgtagtttagtattccactttgaacctcatatatgcagtccaaatcttcctttaacctagtttcctctgcatatataggttctccgcttatattaaattcattaactgatggtgaaaatgacgttaaaattgtttctaaaatataataatcttgatatattgtactctttatcttttcacgctcagaaaaaaatgattctatttgtatttgcttatcattcatatattggggctctaactgtaaaaaatacaaacctttaattttattaggcaccattttttttataaaaaattgacaagttccctttgctacaaaatcaaagaacaatatatttttattcttttcgcatattttctttaaatattttttgtagttcaaatattttttccatgcttcacctataattatttctttatattttaatataccttgttgtgtgtcatctatttgttttatatctatcttattaacatcaatgccaaatcttttttttaggcataaatccatgtttcctccaaatttcatatcatcaacataagcaatatcatcttctgataaagtgcctgctcttatagctgcagttcttgaagttaaaacataatgcgtttttctatttggatataagatttcatatattttttttatcaaatatccatctcttgcagaaagccaaatctgacaatcattgcactctctagtcttttcttcaaaccacttaacaaaatccataatcaatggtgcacaaaatgaatagcctatcgttttattattttgtatacaaatatctttttctaacctttcaaacacaaaaggattgttaaaaatatttgatataaataatccaatttttatttttgaatccaactccatatccggttcaacatccggcataaagtttgttccgtaaaataaatcttcacagctatatattttatacgaatttatacccgatttaattgcacttttatagtcacttagataatcatcaccaatatgaagtattttctttttaggataatctttttttactatatcaaatagacctgtatcttttccccttgtatactctgatgatgcataaatttttttaatcccataaatagaattatcattcaggatactttttatttgcttttcagaataatatgtatctgtaacaacaattgcttctttccctttatttatgcaataatttaaaacttctactaattcttctcttctaataattacacttttgtcaattttaaactcttcttctgcaaaatcaataccactaaaaaaaacgcaatcttcgtaaattttctttaaattaggagccagaccaattgctgtgcttttttcactttttatcctttgattcacaaactcctttaaactcatttcagttaaactgagcttattatataaaagctcaaataaatcatatctagaaaataactgtcgagttataagtgtattgaagcagtcaaaacttataacatctgcttcttctattttattcatcaaatcctttttataatatggtttcaatttccccaaagtgcacttactttgtttttcttccaaaagattatttccataaacatcatagattttaatattattttcattacacttatcttttattcttgtaactatagctcgacatgagcctggtctcgcaattactataatagcctttatcccaatttttatagccttatttaaagagataatattatacccataaatatttccattatctctaaatccatctagtaatccaacaatttctacgtattcatttatttctggtatatttttctctgtttcttttcctataccataaattgctattttcccatcaatattttttaaatatttttctaatttcttaaaaatcatatatttactttctttaaatatttttctaaatctgcattatcaccaatcattctttgctttgcttcaaaaagaagtttgtaagctaaatcaatattattcaactcatagttacaaataccattccatagataataattacgtaatgaatatggtaaatctgctaagcttttttcatatttattttttttatacagaaaaaagaatttttcaaaatcctcccttgcttcactaaatttactttgctttacacggctcattgctctacaccaataaaacatctgtttagcacaataatcatctatattttcttcttctattctgcctaaatcattgactgcttttaaataatagctttccttaaattcattacccattaacatacttttactttttaaaattatttgagaaacctttttatcaagctttttcttaattttcaaatattctgattttgtaaatatcattttagacttccatattgattctatactctttgaaatttccgagaaatccaattcatctattcgatatgatacattttcatatgtctcatatagttttttaatatacctttgactttgaacctgttcaaaattaataaacccattatcttcatatggagacggatataaattattaattaaatatcttttgtagatatcctccattatttcaactgcccttttcgccgctccttgatttataactcccatttcatataaatgatttttattaaattctctcccatctggaatacattcatttattctttgatatggaacacacaatccgcttctttgttctattttcttaaatctattaatatgtgcttcattatgagttaacgtatattcactttcaaaccccgaagctatcaatccccttttttcatagaagcctatatccagatagctggtcgtcagctctggtgtaataattaagcaactctcttgaaccaattgttccaaatctaaatgtttattaagcaatacaagattattgggtatttgtcctgcacttaactcatgtatatattcataaagatgtccactatttctatgagtgacatttgaatcttcttttagaaatctaggctttacaactatttttttttcaggatgcttttgggcaatatccaaaagcatttttgcttcctgccttttcccacaatcaccaaatggaaaatgtcctgcatctataaacaatatttgttgattattcacttctatactagtttttttcctataatcgaattttggatttccaattacacttcctggtaatgtttttatataattatctctttcaacaatataattatcattaattattgcatttttataatctctttgagtaaacgtataatctgaaaaatttgctatttcatccataaatgctgtagaaaatgtaaaaatatactttcttacctcaagaaattctggcattgcagcaaatgatgcagcagaatatataaaatctgccttttcaatacaagattgtgttaacttatcaataggttttactataagcccatcaaacattcttatatggatattgtccatatattttgcatatatttccacataatttccctcatttaacaaaacatctacaatatgcctggttggaatgttgtaaacatccttatataacaaaaccaaaacattcatagaactctcctctcttttaacccacattctaattcaacaaacatctctcaaatctggatttcgtaataaacctaataccagtttttttattctttctagtttccatataatctcttaacattgctgcaatttccgtattacgttcattgcaattcatggatgctgattctatttccatatcactgtcaatataattagtatgtaatgaagaatacccatcaaatccagcaaatataatctccttacaattaatttcatctaataagcgcaataacattaatgccgaattatccatcaatttccagccacatttaaccagtttcttaaaacttacaatataatcagcctcttcaatatattctttgtctatattagatgaatatattcttctctctcccgatctattttttatatttttaactcttccttgatttgacacaaatacataatcagatgtgataaaatctggattaaaatttaacgatattactacaacatcattattttttacatactcttttatcttgtttttgttttgtagtattgattgtcctggaactattatcaaaattctttttccctttaataaatcttttagcttttttaaagaaacaaagtcatcaatatcctcatcaatcatctccataaagattttgtccaataattcataatcatatcttttacgagctttatcatcaattttatttaatatatacctcatatttttagaactaatgctatgttttttattaagatatgaaatattatttacatgggcaccataacatccagcaataaaataatcagtcgaatatccccaagaacattttgttctaatattatccatataaatatctataatatctaaaattgaatccatgttatattttcccatatattttgtattaatatattgaactattaactctgtaggagtatttcctgcacctcttcccattccagaaagtgtcccatcaataacaatatctctttttcctagactcattcggataaattcctgcgacaaagcatttgataactgcatattattatgagaatgaaatcctatcttgcaagtctttacaagattatgatttatcaattcaaaaattctctgtaaatcttcttgatacatagagccaaatgtatcaacaattgaaaagcagaatggttcaatagcatttactttttctattaaatctaataattcataatccgaataacccaaaatatcaacaggttgtacaaaaaccttatatcctttttcccttatcactttacaattctctatagcttgagatatttcgtttttaaaaaaacattctctaatacaatcaataattccttcctgtctatcatcaagattctctattgaatatctactacaatctgctaaaaccgtatattgactttttttctttttagccggtaagtattttgatgcttctttcgaatttttatatacagtctttccctctccaaatccgtcatcctggaagaatccaacctcgacaaaatcaatatcagaatcaatcaatccacgtgtaattccactaatattttctaagccaaactttttatcaattaaatatgctccatctcttaatgtacaatccaaaacatttattcttgacatatttatctacctcgaattattttcatgtatatagcatctgcaatatcaaaatcatcttgataatcaatatctcttgcttcaatttctgatatttcacaaatatatggtttcattccaactcttctatcatattttaaaaatgtatctttagtaaaaacataggctcctggtgcttccgaatatactggaactaaatcctgagtccttggaaaattttgtatatcaaaattcattgcattaccattctgccataaaaattcttgcaatcttcttgcgagaaaagctgaatcatatcttccagtttgtactgcttccacacatttatctatactttcacttcttgtgaatggtcctgttgcatggcttgcaatataaatatcagcttctacttccttcataaattctctaataatatcgttacaatttacaacacttgtatccaaaaactctggtcttcttaagaattttacaccaggcaataaatattctttaactgcttcattactgcaatatacatatacctcatcaactttttttgcatttaaacaagccttttgtataaaattaattaaaggcgttccatccgaaaaacatttcaaatttttcccaggcactctttcattatttaattttattggaatcattacaacaactttcatttttcattatttcctcctttttacatactcttttatatactgctctatatcatattgcacatcataatttccaggatttattttcctacctatataaaaatttttatctaaatctaatttttcaataattgacggatatacaatttgttcatgatatattaaatcaaatttaatttcatatttttctcttaaatcgagcattttacatattttatctattattttcttaaacattatctttgttggatgagaccatgacctataaagatattccttataatttttagcaattatatctgtaacctgtatgtcgcaatttttttctaatttttccaaacttcttaattcttttaaaaaatacgaatcaacttcttcttttttataaaagttaacatcacatatattacttactatatcttcacaccccattccttttttttgcatataattaatatttatatctccccatgtaaaatagtccaacattgacgtttttactctagtattagtttgtgggaaataccctttaaacattgcatttgatataacaaaacactgcgcattcttagcccatttcattattgtaatagtatctggcactttatattgatttatagcatatatctgattcaaaaaaacacaatcacattcttcccatagccatttttctcctatcaacttatgttcttgtaaatctacttcattaactaatggcaaatcaataattatatatttttcagtaaatgatttcatttgtttaagagaatctttataaactcccatatgacatgttccaaaaaaagcaactactttctttccactttttttctctttgacaataatttcttttccaccaaatagacattcctctggatctattatatctttgtcaagaaatctataagaaaaataattaacattctttttataaccatttatatcaagcaatttatacacatcttctctatgctttttcatacatacaaaaacattatatttatgcttatttgctcttaaaatagtgggattaaaaacagctatttcatttcccaatatattagtatactcaacatcaattacacttgaatcaaccattatcacattctgattcataaaatatttcttatatgtatcttttcctatatttccttttccccataacacaatagtcttatctttcatgtttatcctttaccaataattttatataacatcctaacccaatatcgccttctagtattggctctttttgattaaaatcatctattaaaatattcaaatctttacattcctctatttttacttcttcatagtcattattatctataatttcaaataaagtatttctatcattaggaaacacaacataaatctctttccatttactaaataataaactacattctcttaatgttccattaccaattagagatgaacttagtatatatctttttgactctcctgattgctttgatattagcacaacacgattttgatttcttaacaaagcaacacaatattccttagtttctataacagacgaaataatttctgcataattcaaatttatatctccaataaaatttgagccattatatttctttgcttttcccaaatataaatctgatacccatataccatctattgtactcgtaatactatataaattcatattctccatactatggacagttaattcttttgtttctggattaattgatactaaattatttgttctacatatgggaatccatattttattatcgtacacttcattttgtaaaataagaatggtgccatctggttcagcatagctttctaaccttttatttatatctaactgttcaacaactttataagaagttaaatccacacaaagaatcttagaattattggtatatccttttaaatatcgtggtataacccacatgtttgaatctttaatataaatgttctttgccgagcttgctatataattcgattcagaaatattaattgacgtaatttctttagattcaacatcaaaaatatgtatatcttttccatttaatggtaaaaacacaattttattattccaaatacaactacatgaatgtaaccccttaacgttaataggataaccattaaaagaattgataaaactaacttttcctgttattaaatcataagagaataatccattgtaccttgagcttgaataaaataatttattatcaattatttgtcctgttataaaactttgagtattgacttccataatcattctcctttatatttagtcaattcattcatatgtttctttcctctctcccaaataatactggaattgttagaaacatttcctttaggattcaaaacacctatcgtattgggtttaaatccatttttccatattatatatgttaatgacaattgatctcttttagctccatttttaaattctaaaaaccattcttccaatatttttattgctaacttattacttaaatctactgcaattacacaacattcaaacaatccccaatttcttggcattccttcactcacatacttttgaatctgtggtaatacatcctttttttttatcattcctaaccagttaaccatcattgactcaacataaatacattttctaattctatgtctatgaattgctaatcctacttcgcctatgcatgataaatattgtctcatcggtccaaccaattgaattgacccatccatatatactgaaatatcataattgcaaaatattttatgtggatgcattttaacatatctatttttttcttgaagagacatatttctatcaggtacaactgaatcaatatctatccaccgcatattacttttagcatgtctaggattatctgaaataatataataatcgcaattttcttcaacatactctggctgttttaattcatcataatctcccaatatacatgtataaaaagcaacttttttattccgtgtcatctcaaatttcttaccaacttctaactcacatgtagaataatcgtcaagccttttgatttgattaaatagattttcaccataaaaatctttctgaataacttcagaatttgccaactcatctaaagaaattatatgcaaattggaatggctcagtaattctttttttatttcacaatcatatggataatctacaagtaccaatactaaaacatcatcttccatttttaacagttcttctttgtgaattgcaaccatattatttgctttccttaattcggaaataagattatcatttgaatctgtaaaaaaatctattttaatattaagagttttttcaaaatacccactcattctttgtcccaaaaaacccaatccataaatacattttttccacctattttttttcgataatttgactaagttctctatctccatataatatccaccttctaatatttacaattaaatccatctttttatctgacaatctctatacacattattcttttctatcatatctaaggttaataacttagatacttttaactaaaacatcttaaaatttctaaatattaataacaattatccctacaaaccgtcttgtgacataccaatctctgtacgttcataaacatttgtagaattttatattctagcaatttagtcttgcaattttttgcaacatcgggcatttctaattttcaaaactcaacttttgttctttggctttctctgtcctttaaacagagctagatttacttttctccacatatctatttaattaagattcctttggttactctgagaatggcaaaatcattcatctgcataccgtcaattacactttttctttcttttgacattctcataggctttgttatagttatcttttcatataagcaaattgaaaagattattcatccaatagtccacgataacattttcctttttagttaatcatttagtagacaagcacttctcagataccatttacagataatccgctacatgagattgtctattaaatccactttcattagattatatctcctaaagttaagtttctcatatatgtttttaagtcatctgttaataacttgcacatcaaagtacatttttaatatcctaacttccaatttaattagtgattatgatttcacacactttatgaatataacaaaataagtactatacataataaaacaagtatgttatacatacatgaagttctcttatttagtaaatattgcgtcatagcatccatatctgcacaatataccttatattatatcggacattaaatttgagttattaactttatgtatatttatttttatcccattatttaataatctatttatcactttcccatctaatctattcccctatcatctcctttaacttctgcgtaaatacatatgcccctaggtaattaagatgatccttatcataataatatttcttatctgcggtcattgcatcttccagataagatgtgaatctgaacggataaatattacccagctgttctataacccccataaactgttcttcccacttagtatagtacctttttctcttatcaagaatgcctttatataccggaagaagtactatatccactttaatatgcggccactttctatatattaatgaaagcatatcattcataatagagacattttcactgattgtttctggatactcattcaacacagtacttgatgtaactttatactcttcaaccagactatccgtaatcatatctattctctgttcaatccctctggcacatctgtaatcagaatacccattcatataatatgtatctggaaacagtttcttccacattccaagcttacttatatccagccctttatatttactatacaacagataattacgcacctcttcaaggctgttagtatatatcttattgcgtgtcatattatgtccatcaagattgtaacctccccacaaaaaatatctgtatatgttcttagcaagagatgtatcaaaattaaaatactcatagtcatacatatctataattatatgtttcaagttttttatcttttccccatacttatcaatgcaatactcaagcgtcttgtaattataatatatatcctgtgatgaaacagcaagattagcataattaccttttaatctgtctgctagtattccaacctctgcatgagataaacccataatgagtccgtcatatgaacaagccaaaggattactcataacaagatcagccctcattgcaggcagcatagctttatgccataaaatataattaaacactatacaattctcattagtaactattttctcaatcatagatgtaatatctgctgataacttatcgtcattaaacataacaacaatacagtcataatcattaatacctgaatccataaacagttctggtccaaatgtaccatcccaataatacacatcaaccatatgtgcagtatcatctaatgcctgtaatgcataatctgtaaacaacttctctccaataacaagtatattcatacccactctccataatcataagtttcttctgtatcccatcatatatcctatcatctcattttccccatcatctttgcaatctcgcccattctgcacagccatgtatcatttcttatggcagcttcataacctgcctgtgcaatctggcttgctgcattaggattctcaagcagccagcaaacattctgtttcattttttccatatcttcaagattataaaataccagttcatttccatgctcgaatctttcaagaagatacttgcttgtatctgtaaggcacacagctccattaagcattatgttgaatactctttcactgcatccatccttaaaccacggcatacaattaagtccaatctttgcttttccaagcattcggttacattcttctgaagatattcttgcattgatgcttacattaggctgccatgcctcatcacgcgcatcccatccttttccatatataactatgctggcacctgtactttctaatgcgtgcattgtctttaacttataatatctgcggacattatcagatattataaacccataatttaatatatactgctttacctgctcttttgtatatccgccctttgcttcaaaatataactccatagtttcttctatagacaagcccggcttttgaagaagtatattatatactgttgaatacatctccattcctttatcagacatatctggaatttcaataaatggtgtagataattgacaatctcccacatacaatatatctattggcctgtctttgtactgcattctgccttctgcttcatttcctccatcaggcatgaaatatatatttcttatttccggataatattttcttatgaacttctcatgattcctgtctataacaattacattaatatctgctggaggacactctaatgcatctgcataattgtacggatggtcaactatcaggtcatatactggaatatttctctctttccagtaattttgtccattctcactcaataacaaacctatctgatttatcataaacactgcgcatctgcccagctttacatattcttcaagagcctcaccgtagctttcaggaatccctgtattgataatataatattctattccaagcttgtctgcactgtctgcaagctggtctatgaaataatccaaagtttctaattttccttttatgaatattattcttttagacaaattcatatatttctctactatccgcactatatccggctcaacagcttctcttgaaaaatgtttcatatatgtctgatgtccgatttttccaatatgttcccagttatcataatcatctataactcttattatactttctgcaagcctctgaggatcatctgaacttgtaacatatccattctcaccatcttctacataataagcaattccgcacacatctgtacacaatactgttccgcccgtcatcatcatctcaattgccacagcagaaagtggttcaattcttgatggtactatcagacagtcagcatcttccatacatgaaattgtctgctgccttgtaagctgatgcagcatatgaacattattataatctttttctaattcacatacacttgtgtacacttcttcatcaactgcagcttcattgccacagaaactgaattcagcttttttcatatattcgtctggaagcattcttatagcagctgcaagaacatcctgcccttttatcttagaaaatgttcctgctgtaagaaattttaccacatctctttttctcgcataatgcttatctgcttcaccttcatatccataaacagcaaaatgcatcatgggaacatcacatttatatatatctttaattacagatttaacataaggacttacagcataagtatgaatattacttcctatagtaccaaaatgcggtattacgcttgcaaaatattcaaaatactgtcttccctcatgaagccaccatattactggaattttgctgccattaagaacatgaattacttcatatgtaactattgtattagcaacaacaagattatatctactccactccgataacagtctttctttttccggatagaatctttccataatcttataatcaattcccatattatgaagctgctcccccagttctccatccatcattgttataacatctatatctgctctctcacgtttacataattttatcatatccagaagcactattggtgctcctgttctcgacaactgatgtgttatgaataatattctcccattcatccggcttctccaattcttatatttcataatccattatcataacaggctttcctgcatttctataatcctgaacaattgacgatgtatcgccataatatgcatcacatgaattaagcatatctttatccctgtcgctacatacatgtccaatttgttcaatattatattgattcctgattgcaattatctgctcatagagtttcttgtctatatcttccataacagtatctacaaggctctgaacacaccacacaacttcgatctgacctgagtattgtttaaatatatctaatacattctttatctttcctgctgctatctctgaattctgcataagtccgcttattgaagtatagaacaatatttttttcttaccattgccattagcaatgcaatgctccttattcatcatccactctggcttagcatgtatcttatcattccatatactttcagtttcttttccagcaaactcagttaatttctttatatacatattacgcatgttataagactgtacatatgccacatcagcatttattactcccggtactgtacagaaagaagccatattcttatattcgcgttcattagactcattaaattcttcaagttcaaatgactgtatatatataagcttgtcggtacagcattttaacctgtctgaataatactttctgtcaattcctattgccctattctcattatcaaaaggattctgtatatatataatatctggatgatgaagttccatatcatactgtgcagaatcaatggcaccaatatctgtggcgaatttatccagttcatttacttctttctttatgcttccataatattctttataataatatggaacaacagccacaactatttcagtatctctttcctctttatgtttcttccatacattctctatatatttccattctgaagctttgctcactagaaaaagttcttctttctttgcgataatatctctttctattattcttttaactttatcaaattcagcttttatatcggcattatttccctgatatatctcatatataacatcgcagaatttttcaaagcttctcacactttcagttccctcgcctttaactttttcaataagccctcccatgtcaattactgtctgttgtatatcaacaagttcttctcttatcacttctacattctgcatatgtccgatttcttcaatttgcttatcaatattatcaagacagtttttaagaatctttctgtagcctgccaattcatctaaatcagctgcccttactgcttttttctcatcatatgtatattccggcagtttaaaatccatcaaaacctctaactgctttttctgtgattcatagaatggataatcatgtcctcctgcatttctcacaagcctcatgtaatctccatacctgcttttaagcatagcatcaaagccaatcggaaccggtattgttgtattctcaaaaggcacccttactacacgctcataatattttacaggtatcctcatatgatttccatacagactgtatggcatcatctgagtcatttcttcacagtcttcatctttaaatgtagcaaacactttttcagctgcagcatataattcaattctttcctgacatttatcctgttgaaccttaatatcggttccacatatcatgttaattcttgttacagccgccagttcatctgctgcagacatctgtcctgcctcaatagcatctgcgaccgcaactatatattctgccgtcttttcgcatttcccctgtgcttctttatcctttgacacattatcatgcacatatatatcaagtcctgcaagatatggaaatccatgatatcttctcaagtgttcatcctcaaaacatatcctgttcttacacacaactctggcaagaaaatgatgaaaatctttgttagtcctgaaattgattatctgatatccttccacaaactcacctggtgctactttacagaacttcacataatcttctcttctcattcctatatcaaggtcgtcatcccatggaacatatccggcatgtcttattgctccaagcaatgttccccattccgcataataagttatgttatattttctgcatattctgtcaacctcatcaagcacatcaagttcagttgcccaagctctttttatcatagatggtacataaaatccatctcttacttcatcttcaaaatattcttctggaaattgaagcatactttctcctcactatatatcaacatcttctatcataaccggcttcccctgattcctgcacatctgtgcttctgctcctgcctctccatagaaagcatcacatgcatcaacagctctttttaacatatcaggtctgactatatttttttcatattttctcaatatagtcttataatccatcaaaagcattacatcttcgagttccaatatatcttccatattgccctcaaatgctagaagtggcataacatctgactgatattctgtaaatacatccattgagcgtctaatttttccaaacatttttctcttatgttccagcactccattagtacttataaaatatagtattatctttctatagctgccgtcattctttaatgccatatttttccactctgacggcattatgttatacttaagaacaggatcttttttctctatatacaaagctccccggccattaatcttatcttcccactccttctttgattcttctccaaagaattcggtcagcttttttacgtataattctttattggcttctgattgcagcataacttcatctgcatacacaacacctggcatggttacatatgcatccatacttatatatgctctcatatccataggattaatctcttccgttacaaaatatggcatatatataagtttatttgtatgtatagccagattcttactgtaatatcgtggatgtattgtaacagaaccattatatccatcatatggattctgaataataattgtctcaggattctcctcttcaatattataatcactgtttatatatttctgaacatattctggcagaactgcatcacttgcacattcttctactgttccatcaatatttttataataatacctcaatggaataactactatttcctgttcttttctcttttcatattctctgaacaatccatcaagcatatcccaatattctgccttatacaccataaatactgcagtttcatggtttatattcttttctcttatcgcatttcttgtctttcttataccattgacctgtttcttataattaatataatcctcatatgtatcacaaaactcattaaatacaaccccattatccttaagaagctttttctgcctgtcataaaatggataatcatgtgaatcccatgtatgtacaagcttcatataatcaccatatttcttctttaatatcgcatcataagaatatggtaccggtatggtaatattctcaaaaggaagccgcactgttttggaataatattctttcggaagcttatactgcctttcctctgcccatatagtcattattgttacatatcccgcttcttcctctgtatataatccacataatctgtctaccagtacattaagctgctgtgcgagatccttatctctgtcaatctccactccgcataattcctcaatctgattaattttgagattaagttcctgaagattctcttcattgatagattcttcattctcctgtaatgtcctgataaacttggctactgaattaacaatgcttattaattcacactgaaaatcatcatcttccctattgggagctataaaatccaatggaaatatatctatacctgaaacatatggaaatccatgaaatttttccaaatgtgtcttctcaaaattaattgctctcccattaataattctggtaagcatattatcattatcttcatcactacttatattaaatatcttatatccctctggcattatctggtctgcaatctgtaggaatctgttataatcgggtctcttcatgcatatatccatatcatcatcccagggaatgaatccatgatgtcttactgctccaagaagtgttccccattctgcaaaatactgtattccattctccctgcaggctttatcaacatcattcaatacttctaactgagctgcccacgcatgtttcatatctgatgttacatagaacccatctcttacttcatcttcaaaaaaactcttagataattccatatatgtctattcccctatgatatattattaattgcaaaaagagccggtgcaagcaccggctcttctgcttatagtagtaattgttattaaccgagaagtgaaagaacaccctgagttgactgattagcctgcgcaagcatagactgtccagcctgtgcaaggatgttgttcttgctgtactcaaccatctctgtagccatatctgtatcacggatacgagattcagctgctgatgtattctcagatgttgtatccaagttgttgatagtatgctcaagtctgttctgaagagcacctaacttagatctctctgaagatactgtgtcaatagccttctgaataatagacattgactgtccagctacagcatttgtgctaaccttaacatctgctgccttgataccaagagctgatgccttcatgctagcaatagagataccaataacctgacctgaaagagaaccaacctgaagactctttcctgtgaacttaccatctaacagattcattgtattgaactgtgttgtagagtagattctgtcaagctctgatgttaactgagtaagctcctgctggatagcctttctatcagtagatgtgttagtatcgttagcagcctgtgttgctaactcattcattctctgaagaattgaatgtgtctcattaagagcaccttcagctacctgaataagtgagataccatcttctgcattagaagaagccttgttaagacctctgatctggcttctcatcttctctgagattgaaagaccagcagcatcatcaccagcacggttaatcttgtaacctgatgataacttctctgttgacttctggagtgcactagaaactgtacccatctgtctgtttgtgttcattgctgataaattgtgttgtactaccataatattttcctccttgaaattatattatgatgcagcgtccctgctacatctagttatggtttacaggaaactgtctgtttccttgtactttatatatcggaccttagtaccaaaactttagtccgtaatataacttttttaaaaattactgcttggtatccataaactgtggttcattgctcaccttgctcatattctgataatatgactttgccatagatgcacttctcttagcttccttatgctcctggcgttctctacgaaacatagcctctaccttgactttgttgcgtgcttcctgaacctctatcttagctccaagctctgtaacttctgttatcagtctcttcatgaccgatatctcattagcatacatttctttattagcattaattgcatctctgaccctgttaaacagagactgaaatccctcatccagcaaatcaagctcatcgatgcagcttccttttgctttcatattatcatcaaatgcatcaccattcaatgtttcttctgaaagaatctgattctgctcttcattaagctctataattctgataagaattcctttcttcttattaaggctgtctatcatcatctgaagataattagtagtcatatattaatctcctactggttcattccccttgtacggttcataacctctttccatgtatctctcatgcctcttatttcatctaatgcctgattaagtatctctggatctttcttaacattagcattaactaaaagggagtatatgtaatcatatattttctcaaaatcttctgcaacaggatatttatgattaagtgttaccttaaactctgtaattatatcttcagccttcttaatattagtatgagctttctgtaaatcacccttttctatagctatcagggctatattacagaacttaatagccccttcataaagcataagtgtaagttctgcaggacttgctgtaagaatcttatttctgttatattcctgtgctatattctgattaaatgccatgttttcctcatttcccataagcttccatgcttatgcggttgttaatatgtactattatccaaaaagtccagataacgatgatgactgcgcattcatcttggcaagcgctgattccattgctgagaacttactataataataatcttcccatgtagtaaccttgtcttctgccgcagatatcttagtattatactctgaatactgcgtattcatctgcttatcattatatatagtataagcactgcttgttgatgatgctgccatcttctttccaagatcagtatacaattgtgtagataactgtgaaaagaatgatataaccgtatcagggtcattagatatcatctctcttaacttatctgtattagctgatgtcttagaatcatccttatcaccatctatatgatatacacctgtttcattctctggagaattaaaatatccaagtgtagctattccaaaactagaaagtgaataagacttatctcccaccttgaatgattttgccatatcattcttcatagtatcaagaacacttccaagtgttgagtcttttctaagaagtgaatccttaatcttttcttcccacttcttaacctcatcatcagacattgcatctttctcatcacttgtaagaggctcatatcccttagaacttgccgcattgtaggcaacatctacagacttgacaaggtcattataatccttaaggaagcccttaatcatatcatatataccatctacatctgtgttggttgtaatagttacttcatcattaccagtaacttccattgcctcaattgtaagaccattgattgagtagttattagagttgttagtaaatgttgccccattaagctcaatctctgaatcctgtcctgttattctgacagcacccgaagatgatgcactaccagtaacatttgatgccattgcaatcttagagtcaagcagtgccttagctttagcctgtctgtcagcattagtatcgcttacttcctgtaatacattggcattagaagcatctgccacagcttttccatcatcgccgattgtcacataatccttagtatcccgtataaccttggaattatcatcatacaccttaatcagtgattcattagacgcttttttctttaccgctgcctcatactcttccttgacaccatctttttccatagcctctgtgtcatattcgtacacaactttgccatcagaatctttaactgtattgccctctgaatccaccttttccttcttatacttatcataagcattaagaatatctggtgtctctgtcttaagctttgcgacatattcatctaatgtcaatgaatgatcccaagtatcatctgctgccagtgcatcaagcttatccttggctgcattatacttatcagcataactcttggctgtatccttggcagtaatcttagtatacataccttcaagttctgtattatatgcatcactgccctctgttaaagctgccagtctcttgtattctgctgaatcagtatcattaactgtatatattccaagcttctgtaatgcattaagtccgttagagtcattagccacaagtgagaaatcgttatccttgcctgactccttagagcttataaagaatcttgcattattctcatcaaaacttgcattaacgccagcttcctttaacttagatacgaactggttaacattcatatctgatgttatatcaatactcttggttccagaagcagtcttaaaacttatagaaccatctgttgttccaactatgtctgatatcttagtatcacctgtaaccttgcttccatcagcagctttaatctgtccacctgtaagatatcctgttgacgccagctgcttaaccttaagtctctgtgtaccattaacagcagatgaacttgctgttaccttggcatacttatcattagacacacttgatgtcttcagattataacttgtagaaaatcttgcacttgaaagctttccactatagaacccataaatacttgtattcatggtcttccacttttcctgcttccatgaaagcttggtctgtgctttaacaagattgtctttctttaacttatatgatgatacgagcgctgaaacaagtgattctgtatccatacccgataccataccagataatcttattgccatagcttatctcctctcatctactatgatacctgcaagctcccatgccttggcaagcatctcaagagctttctctgaaggtatctccttaataacttcatctgtatctttatctttaatcttaattgtgattctgttagttggttcgttgtagccgaattctgcaattgtattgttgttaaggactttccttatatccttaacgtcagccatagattcagcctgcttctttgccttgtcattgtcattagcgttgctgccattcttctcactgtctgctgcctgtcctacagaaactgctacattagatgctgctgacttcgctgaatcaacaacaacctcattgctcttatctgtagctgatgtaacactgcttacctgtgataccggcttagcagcctgtgaattctggctctgatagcttgacgctgccgctactccattaacttccattcccatgatacaattccacctccgtgtgaaaacaaaactttatcctgtagttacattcatgttgtactgcatatatcggaaaatgttaagtaaaatttaaccctttggacaaaaatatacacaaataaaacaaatcatttcttaaataactggttaagagacttaacatcaaccgaacttgctgcttccttattagaatcaagtatctgtgcatacacttccttacgatatataggtactgacttaggagctgatatgccaagctttacctgatcgcccttgatttcaattatagtaatctcaatatcatcgttaataatgattgcttcgtctttctttcttgataatgcgagcatattagttctcctccttctttagaatatcgtatataggatatcttaccttatattcagaattatctgctataagctgtattcccttcatcgtatcaaaatcaacaataataggagctttaagattaattgtcatcttagtaatatcctgtggtaccgtgagcgcacagtacactctgatattatcatcctgtatatcatctccgagagacttaagaagctcatcctcaacaacaggatcatatgtctcatacacgaattccggcttcatgacaggaagtgcaagtgttggctcatcaatcgcctgaagccatataatagagatattctcctctttctctgcatcatacacaagagtatacttcttccagtcctcaaatccaatgattcccttgtcaaatgtgatgattttatcatcactaacttcaatctctccaaaccatttagtctgtactttcatgtcaaacctccaaatcttaattctatcctttatctgtcaatgctgtttatacagcttaactctcagcctgcctcactgtattcctctcttatgctggctacccaaggaaatcaagcagtgtctgctgaacaaccttgctcgcagctgataatgctgcctgatatacaagctgtgctgatgtatatgtaacaacaatctcttccagatcaatgtcttcattctgagacttaagatcagtgaaattagtcttctgttctgtaagtcgtgtcttcgtaagatccagtcttatctgtctgtttcctacatcagccttcgcattagatacctgctcctgatagccctgcatctgaccgattcccgcttcaaaagcatctttcatcttaga

SEQ ID NO: 768 - DNA, 48175 bp, unidentified
  source 1..48175: mol_type = unassigned DNA
tcataggtcatttgacactatccttatataataatctatactaaacagtattttagcaaaaaatcctattactacacaacataatataaataacacataactgttagttcttgaaatcgtactcatatcatacgattttgttatttcttgaatcaaaatatgatgtacaagaaaaacagcatatgaatacttacttattttttcgcaaaatttaattagcatagaattatttaaatgagttgatatatataccaataacataaaagctgctattcccacatacgtagtctgaatagtcgagttaaatgggaaatcaacaaatgagttaataatacatatcaataaactaataatagcaaccttaacatttactttattataatattctataaaatacattccaaaaatcatttccggtatacgattaaaaataatgcaacttttcgttaacccaccactgcatatagaagaacatactatatatataattccaacaataagcgcacttaacaccggatatttttttacacctatccttaatagtggaaaaatcaaatacaataatataatagctcctaaaaaccattcgcccaaaatataaaaatttggtacatgtactcctaaactagacaaataaccatcaaatccaaaaatggttaacaaaaaattccttttaggaatacctgcaggaatacttttatttataaagaaataatataaaaaagcaaaaaaataggccaaccaaaacattggaaaaatagatttgaatcttttgtagtaaaatgtctttaaatccattttttctccataaatatacatcagtgctgcgccagatattataaaaaagagtgaaactccaaaatctccaatatataatccaaatactcttgatgtaatgactgctttgtcagattgctcaggatatgagaaaatatatattgcattaaaatgcgttagtaaaattgatattgttgcgattgttcttataaaatccaaatagaaaagtctttcttttttcatcacaaattattttctctttcttatttttctaatgagacgtttgtacaacattcgattctgtttcaaatccttaataatattttcacagtttaaaatatgaatatctttatcatatattattttgtcaatgttttctacacttccatacttattaataatgtcattaaatatccgactttgcctctcatataatctattaacttcattactttgtttccaataatatacaactctatcctgttcttctttcaattcactaatttgttgttttaaaactatgatttcattttgtaattcttttatattctttctttcattcttatcgacataactaatcttttttaaacacaaattcttcataagcgcaaaactatttccatcgtcatcttcaataacattcttgaagaaatttttgtaggcattttccattttatccatatcacaaattacgcctaatatgtccatagcctctgaaataggaataagtttttcaaaagaagcattatgtagataagcatctaatatgcaatgatacaccacaatgtctgttggtactggaaactcaaatacccattcataatctataaagacagggatattgttttgtataataatatttccagcaattgcatcaaaatttgaacatgctaatgctggctttccctcatatgaagaaagatcccccagccaaaaccttgattgttcagattcagtaaatttaatactgttgtcttcttttcctagtacgagatttttatgcatttttaataattctataaactttgctttatcatttttctttactgcttcatcatatacatcagaaagcagtttaccatcaacaaattcaaaatataacctatcctcctttttttctaccggacatatttttacattaggataagttttttccagttcttttgaataacgtaacatattgttcaagtgttccattccttctgtaaaaatagcctccttgacaacatgctttgtatcattttctcttataattgttgtggaaatacaatatttttttcgtcgttcatcactaaacttttgatactcaatattcataattactcctttattgcctcaactaaaaatgaatttgcaaaaatcttaacttcatctgacccatgtaaactttgaattgctttcaaaggatcaaaatattgctttacatctatatcaaaattcgattgattagcaaaatctatctcggcatatgatatattatcatcactatatattacagtcggaagtttataatcaggaaaaggataaaaaaatctagtctttttaaatccattttctaaaacaagattctttagttgcgagtagctaaatgtttttactttgtcttcttttttatatccttctattccaacaaaaggcttaccaatatgatcttcatgataacccgcaaagtatttcattcctaatttattttcaattgcaatatatagttttccatcagattttagacactttgaaatcttctttataaaatcctcatatggcttatcactatctatataatgataagcgtattctagtacacctatcaatgttataacatcatatttcttttcaattttgatattctgaaaattaccaacaataatttctatattatcaaaatccttatgcctatatgcattaaccaatgatcttctttttgataattcaatgcaatctactttttttgcttttttcgccaacgcacctgtcacagctcccataccagcgcctatttcaagtacctcatccgtattattaatttccataggagccactatattttctctttgacgacttaaatgatacattaccgcccaatttacataatctttatgcacatattcataattatcttcattcttcacaatatttaaaatatgttcttcgataaagtcaccatcgctatataaatctgttccatcataaaaattatagttcaatgtaacattcccaatattttctgtcattatactcacctttatgcttgtcgcaattttctatatattttttttcctttttcatacattttcgctggtaagactttttttatctttttctttgcctttaatttaactactgttactcttgaaagtgtctcttttaattttccctctttaaccctttcaactacaaccttatgatatgatggaccaaattgtttaaatactgctttatttgtttctctcatcatataatcttcgttagttataacattagagacatagttttcattatacactataccagtataaaacccactcttttgcgcaataaatggcaatgtcattaattcaattttcttttcattatcgtccatatttaaatctaaaatacagttaagagcctctcttctcagccaaaaacttcctccatacggcaccaatggttcatcttccactttaatattgacattaatatgatacttatctagccaattcttcacctgcggaaatgcacccatccagccatctgcaatctgttcataaatattcccaaaataaggagtcggtggaatcaacaatcccagcctattatttttttcgaaagtcgctatgatatttttcacaaaatcattagatgcaactatatttttccaatcagagtattcccatgaaaccatattgctatatggaggggcaatctcataatctctaatatttaataccccaatatatttatatatagaatctaagtttctaaaaaaaacagataaaaaactaattagacctgatccttttttttgtataatttccgcgttagaatgtatatcaataattttttccactgccttatagtgttcaccattaataaaaaaaacaaattttattttattcgataaagaaaacaaataatttgtgtaatcatccagatgctttacactttcaacattaatcaataatataattgaatcatataggcaataactctgcataactcctttttctggaagaatatatcttagttgcattgctctacttatttctgtcatattttccaagcgtaaaagattatcccatatcatgtttgtatcatatttaagattatcctttatataattatacgcttctactgtaacctctccacatgagtttaacaaaaaatcattatagtctgtaaaaaaagaccgtctcttaattataggacatcttttatctgcaatcatttcttttgttctaaacataacaggattataaacatatccttcatattctttagagtcgcaatatgcctcacctttaaatcccaaatcagtaaagtgtttttgaaatatagattcataatcacaaatagaatcaacatatgattctggattcttcatattaattataaactctctatattcatcactcaatatcatactttttctgactactaaaaaatgagattgtaagtgctcaggcattacaccatatctattttttccaaatggatccggattaacctcaaaatgattggtaattccccaaaaatccaaatcccgctgtgccatctcgtcaaacatttccttaaacggataaagtggtccaaaaaaggtataatttaataaaacaatctcatcatatcttcgtaaattatcgaaccctatttgaaacaatccctcacgatacccaccaacatcaaatccactatttgctctcaatagaatatcctgtgtaactgttctaaatttcttttcactttcttcatttattgttccattacaaacaattaatagtttatcaatattcttattaagatcattcaacagataaataacataatcatctacaattccttgtttgtcataatacaaaaatattgcacaacgctttattgaaccttctttaagcctcattgtatactcctaaattcatatcaactctttagttctgctaatcatttcacgataattacaatatccaaccttttccattattgctttatctaattctctattcataaaattccaatttgtcaattcgattgttgcaaaattatctgacataagccatcctggataatatccatcattttgaacgacaaatggatatatacgctcgatagcatgcaaaacggtcgcatcagtagctatcggttcctttggaaactcatcatattgccaatcatgatcaaacaatgttttaagtgcttttgttcttacccaaaacatcgaaccaagtggagcaactggttccttagtctcatccatattaacatgcaatttaagaacgtctgccaattcctttgccactctatagttttccccccattctccttttccagtagttggatagtatgctccatgcttcggaaccggtggtgtaagcaaacctaaatatggtttttccttaaataaggaaataacattatgaactaaaatatcattttccaacaaattatcaaagcactccttctgccatgaagcacctattgacattggcaaaacttgatacacttttttatcatgaactttacaaatcaagtcatatttatttattatgtctttacacccaaccaaaaatggagccacatctcttcctaaattgccaacaattctgatttgaatattataatcttcgcaatcagaaaaaaccatttcaactacacttttcttttcttcattaggtacagttatatatatatcagtaaatctaggcatagaatagacatattttttgcaaaattcagccagttcagtatagtatatatgaagaaccattgcaattttaatatcagagatatctgtctgatttttaactttagtagatagaacataattccaatgcaatcgtttttttaaatccgcctgattgcacagtctaaggatattttgataaattaatccttcatcataatccaaattactctctatatagtccattgcatcactagtagcttctccaccgcttctggacaatgcttccccataatcatgaaaatatgctcgtcttttcattataggacatcttcgtttttctatcaaataacgtgggaaatctcttaaagcctcataagtataatcttccaaatcatccgtattcatataaacatcccacttaaaacccaaatccgaaaaatactttgtaaatattgcttcatgataacctatggcctgttcataattcttaattttcggaatgttcttccaatatttaataaattctttgtttgaaactaaagactttctaaataccataaagtatgattgtatatgttttggaatatatccatatttgatagtcccaaacggatcgaacggaacttcatgaaactctgtcattccccagaaatctatatctttttgattcatataatcaaacatctctgaaaaaggatataatggtccaaaaaatgtattattaaaaattatcacttcatcatatttaactagttccaaatatttttcattaaaaatgccaagcttataagcagtaatatcaaatcccttattaggtctaactataacttcatcagcatattgattcaacccactaattccattttcattaacatctccattgcatataattaataatttttttacatatttttttatttcatgtaataaaacataattatactcatctactataccgtctctatcataaaagacaaatattgcatatctgttatttatatcattgttgataagcatctcttctccttatttttcgtcacttacagtaactatagaattcatatcaaaaaagccaactgtatctttatctgatataacatttatattacacacatcatatagtctatgataaacattaaatctgttattgcttactccaacgcaaccaaacgaaatcaaataatttcttccttgtaatgtcattttttgaacaaattctcctactttaatatctccagccttaaccggaccaatttgtacattttcatacattgtatttgttccggtcacctcagtcccttgtaaatctttaatcgtgaaagcaaaaataggatcttgaatatcctctttaaattgcactttcattttaagtgtaaattctgaatttttttcgatattagatgttataacaccatttgaatcaacaatggcaaaatcaattatttcagcctgtttttcgccataatcaagcacttctggattaatcttcaattcattcatccatcttttcttatcctttgcactttcaaggattgcagctttcttctcaccattttcaaacacatcttcatcctgacgaactaaaacctgtttatattcatcaacaatctttttaggttccccctccgaaaccttcactccttgattaagcaaaattactctatcacaatatttactaatacttcctaaatcatgacttacaaataaaattgttttgcccatttttttaaattcttcaaatttatgatagcattttacttgaaaaaaaacatctcccaccgataaagcttcatcaacaatcaaaatatcaggatctatatttattgagacagcaaatgcgagccttacaaacattccgctcgaataagttttcactggctgatacacaaagtcaccaatatccgcaaaatctaatatagattgtaattttgcatcggtttcctccctcgtaaatcccatcattgttgcattaagatatatattttcaataccagtatattccatattgaagccagctcccaattccaaaagagctgatattcttccggctattttcacatctcccattgaaggatttaaaacacctgttattatttttaaaatagtcgactttccagaaccattagttccaataattccaactgtttctcctcttttcacatcaaaagaaacattatttaacgcataatgttctttatatcttttcttttttgaaaagcccaaagcttcttttagtctatctgtcggcttatcatataacctatatatcttactaacattgttaactttaattgctacgttatccattccttcacctttctttaaaggacatcagcaaaatgaaccttcaattttcggaaaataaggtttccagcgccaaataccataatagtcacaatccaaaaatacactgttaatcccggattatcccaaaaccaaactttattaatcaacgaatctctatatcccgcaactatataatacatcggattaagtttaaatatacttattaaccaactcggtaaatccattgtatcaatattccacataatcggtgtcatccagattccaacctgtagaataatattaattatttgtgttaagtctctaaaaaaaccgacaattgcacacgtagcatacactaatcccaatacaaataccatcatacaaaaggtataatagaaaatctgtaatgtatacaaatccgggaaatatccatacgctgaatatagtgccagcgtaaatgctataaagaataagtgtacaaacaatgctgatataaccttaactattggtaaaatacttatcttaaacacaaccttcttaacaagataactatactgtgtcaatgcatttgtaccaccatttaatgcatcttgaaagaaaaaccatggtacaatacctgcaatcagccatagcacaaaaggcaccataattcctgcacttgtatttaccccaccgctttttaagcctttttcaaaaacaaaccaatacaccaagactgttactatcggttgaataaatgcccatataatcccaagatacgagcctgcaaattgtgttttaaaatcattttttgcaagatcaaatatcaattttctgttttgatatatctcaatcggaatatcaactatctgccgcatctttcgaattgccaaaatatatataatatcaagaaaaaaacatgttataaactttataagatttcccttaactgcattcgtctcttcaacaaaatctattaaatcccatccactacaatcatatacaatatatgggttagttccgtttgaagacacatttaactttccatcactattgatgagcttgatattattctttttgatatattttgtaaatataccgatatccaattttctttcattagcaccatatacaatcttaatttgtttaacttgtgcttctaccccttcagagccaaaattaaatttcacatatcttgttcctgccggtatagagaactccattatttcatccgaaaaaggggtctgaactaaggctttagaactctttgcggagctaaattccattttcttatcatatagcatttcatacaaatccttctgattggaatttaaagaaatttgaatttttacatcttctttcgaataagctggaagccccaatataatcaatatattacatataacaacaactgcaaaacttattacaatagctaaaaacttttttttcgacatctgatttcctcaatctaattaacaatcaacaaccttttgattcattttcatgatacagtttatcttagtaggatccccccaaattcctggtgaatcatactctcgttctggatacaccccatattccagtttaattttaaatccattctgtttaataaaactttcaacttcatcagccaatgaaacaggatttcccgtgcagcaattgataattccatcaacttcagtttggcttgcaactgctactatttgtttagccaaaccatccaccgtaataaaatcataaagattttttcctgttgtaaacggaaacttatcttttccttctttttcagcctgaacaattttagaaaaaatagagttactcctcagatcatctccaataatgtaaaatcctctcgtccactgaaatattgtattatgttgtttaacaaatatatcaatcatctctcttagtgaattctttgctatagcataaagagacattggttttgttggtgtattctcatctattgcaccttcccaatagccaacctcatgcatgcttcccattacaataagttgcggaagtccaccctcaatcatatgtttcaaaaaaatataatgatttggtaaatccacaatatgtgactccgaattatgtacaaacccgtttctccaagctaaatgtatacatatatccggtcttcccaattcatcatatatagtctcacttccactaaatatttccgtcgtcacttgatgagcgcgcgaatctaacccatcaaacctaaaatcggctgcatatacttcaaaattattatctaataattcttttacaacatgtcttccaatatatccatttgctcctgttactaacactcttttttttaccatgatagtctccttcactaaagaattaatcctataactaaacaatcatatcatttctaacatcaaatttcaatacaaattactacttttgatattttatatagttaaacaataatagtattatgatatattaagcgaaaaatctccatcttgatttgataaattaatattatagaatggatcattaacatataaagcagtatgagacatatacagtttttctttttctttcatcaacctgttctttttatcctgctctatatccaatccgcgagaaaccgactcatgatgatataaacacacatcatttctcacaacattataatagcccttttccacagcctttaagcaaatatcaacatcattatacgccacaggcaattcattattaaatccccccagttgagtatatatttttttctcaaccatcatgcaagctgcggtcaccgatgaatagttgtactctacacgatttcttccataatagtagtttttgctatcatgtgctttacacaaaatgtgtgctggaccttcctttaagttgattattccatcatgttgaattatatctgttccaggatataacaatttagctccaaccattgcaacatggcttaattgtgcttgtcccaacattttttctaaccaaagtggatctttacttggtatttcaatgtcatcatttaaaaataaaacaaactcacctttagacactttgccaccacaattacacataaaagaaaaattaaattccatttttcgatatatatatttaatatgtttttctatagtaaattcattatatttatcgtactgttgtccctcacttccgttatctactaaaattatttcataattaccataagcagtatattttaaaattgaatttatacacttttccatcatattataattattttttgacaaaataattatgctaaccaaaggattatttaccggcaaatataccactctattacaattcatttcttttatatattgcaaatatccactcaatcctcttcttattaaggctttttcttttacattttcgtcattatattttcgtcttctatttatattatgtattaatattttagaaacatgggcaaccttctgtgttagttcagttgccctcaaagctaaatcatatataacatcttctctgtcccaatccacttcattagcaatctgagtaaaaatacttcttttaactgcaaatacttgcccaaaatacataaaagacattagcgtatctggagaccaattcggtttaaaaaaaggtctttttcttttacctgttacaatgtccaaattgtcttcatcaaaataaataatatcacatgactgtttttgtgttatttgtacaatttcaaataatatgttttcttcaagtacagtattagaatcaactacaagaatccattctcccaaaggaatttttttctcattccatgttttcgaaagagttaattcaaaattcttatatttctgttttctaattgatgcaatacatctattctttttatttcctataactatgattgaaaatcgttgattttcatctaattcataattatttttatatttctcattttttctaagccatatactatattcattgaacttaactaacttccttcttacttttgaaaaaattccaatcatcaagttattttgctccatcctctcttatcaccgacacaaatgttctaaatattatttttatatcaagccataaagatctattttctatatagtacatttccattctttgtcgctcaccattctcatacgaaatattactccttccatatgcctgccaatacccagtcaacccaggttttacactaagaaattttgctatttgttcaccatacatttctgtttctttttcaacaataggtcttggacctacaattgacaaatcacctttcaaaacattcaaaagctgtggaagttcatcaagacttgttcttcttaaaaaggccccaatgtttgtaactcttggatcatcatctatcttgaattctttaatatattgttccatttgttcgggagttaatatttttttcaaatcgccaacattcattttcatacttctaaacttatatatagatatctttctgccgcgatagccaattctcaaatgttcataaaaaggatttcctccatcatccatccagactattattgttatagcaacaaaaagaggtagtaaaagaactattcccaaaagagaaacacatacatcagtaactctcttaattaaatcatataaagtttttttatgtttctcacaatcataattagattcatcataatctagaggctcattactttcataataatcactcagatattgcatctcatcatttgctaaaacatcgcctgcatactcggatttcttcaatgttttaaaaaatggacacattattttcaacaaaatagtcaaatccaaacccaatttccagtttgcaatatattccaattccatttcacatcgttcatcttcattaacaatacttttttctgactgattaagctgccaataaccaaaaataccaggttttacgctcaagcatttcctatacattattgaatatttcaaaaagcctggtaaagatggtgaataatttccaactaagctcatgtctccccaaaagacattcaatgttgatggcaaattctctaattttattttttttattacctttccaattcttgtatatcttggatcatttccacatttaccatccataacccatctgtcatatctatttcttgaatcagcatacattgttctaaatttgtaataatagaaccttcttccattttttcccactcgaacaacaggaattataagtggtcctttgtcacatgaaatcaattctataaaacatataataattgaaacaggaatcaataaaattattcccaaaaggctaattatgagatcaaataatcttttcaaaaaaatatctctaatcctaaatgaatgatttttcaacgtcacaacagcatattttcctaaaaaatctaatcttctctctcccagctttgtttcgaaatcatctatattaagatgcacagtctttcccatttcaagaagttttttggataatgtatttacatcacatttaaaatctgttggaaaatgaataaaaacagaatcaatttccgataccgcaatggtatctatcaaattttctttacctgcaacaacttcaattttatctaatactgtccccaccttatcacagtccatcaatgcaatacttgatattctaaaatcccaatttcgtgttgattttatcttttttattatgtcaaatacctgtgttgatgttgtaactagcattattttttcgttcgcgcctgacctgtgatactcctttgtaataattctttttaaaactgttcttattattattgttaaacacggactaattataaatgtaattaaaatttgaattcttgaatataattctcccatctttccaaagtaaattactcccgctgttattacaataatataaacatacatctttaatacagaatatatttcttgtcctaagctatggtttattaaattatcgtttttaaaaactgcaatacgtacaaccacatatgctgcaaattcaagtaaaaaaagtgtaagataatgctcagtcctatttatcaatccagtcctgaaatacccaaatttaatataattcgccaacaaatatgatataaacatggctacaacatctaaaaaaatctctatatattttacaatacttctatttgatttcatttttttctccaattacattttatgaatatattttaacatattttattaataatagccactcattcataaaaaactaagattttatcatatttcattatttgcatagtctgtgaaaataatgtataatttttataatttataagtaattcaaggagattatatcgtgcaacagaaacaatttttaaaattgacaaataaactaacagttcataacattattaagggggttagatatttaaaacattatggtccaaaagacttttttatccgtctttctgaacgttttgaacccgaggactacccttacgaattatggtataaaaactattgtgctagtgaaaatgacttaaaaaagcagcgaaaacacatattcaaagacaatgttttaatcagcattgtagttcccgcttacaatacacctaatatttttttacagcaaatgattgattctgtcagacaacaaagttattccaattgggagctcataattggtaatgccagccctgaaaactctaacatgagtgtagtattagatcattatatccgcttggataatagaataaaagttataaacattaaatcaaaccatggaatagctcaaaatacaaatattgcccttgccgcagcaaccggtgaatttattggtttcatggatcatgacgatattcttgcacctgacgcattatttgaatttgttttaaaacttgagagtgattcaaaaattgattttatatatacagatgaagataaagtcactactgatttaaacaaatattttcaaccacattttaaaccagatttcaatttagacctattgcgttcgaacaattatatttgccatttttttgcggtacgaaaaacaattattgaacaagtaggagtattgtgtgaagaatacgatggtgctcaagattacgattttattctacgttgtacagaagcttcaagaaaaatcgcacatattccacgaatactatatcactggcgcatccacaactcttcaactgctgacaatccttcaagtaaactatatgcatacgaagctggattacatgctttagaagctcaccttaaaagaatgaatacaattggtaaagtaaccatgcgttctgattatggtttctacgacatagaatatcctttaactgatactcccttagtttcaattataattcctaaccgagatcaatctgattcattaataaaatgtattgattcaataatcaataagagtacttatccttcttacgaaataatcgttgtagaaaataacagttgtgaagaaaaaaccttcaatacatacaaaaagcttgagcaaaaaggagttacaattgtaacatacccacataaaaccttcaattattctgcaataaataattatggtgttaaatttgctcatggtaaatacttgcttttactaaataatgatatcgaagtgattacaccagatttcattgaaaaaatgcttggcaattgtcaacgcaaggaagtcggaattgttggtgcaaaactatattatcctgacaacactatacaacatgcaggtgtcataatcggaataggtggtgttgctggacatgcatttctcggccttccgcgattcaaaagcggatattttcataaagcctctattcaaatggatttaagtgcagttacagctgcctgcctaatgattaaacaagatttatacgaagaagttaatggttttgaagaatcattatctgttgctttcaacgatattgatttctgtttaagaattcgagaaaaaggatatctcattgtatttaatccacacgttgaaatgtatcattacgaatcaaaatctcgtggtactgaagacaatcctgaaaaagtcaaaagatttaactctgaaattgactatatgaaaactcattggagccatattctcaaaagtggagatccttactataatccaaacctcactctttcctcatggaattacagtttacgagcagatggaaaaggggtaaaagcatggcctaatcgataaaaaataaataccccgtaagctttccttaaagcttacggggtatttattatcattatttctagaacttaaatgtattctccagtgtctcccacttctgatccttatcacttaaattgattggtgtgccatcctcaagtgtgtatccgcttccgtcggcgcttcccggatactctccgacaagctgtggccactcgatgccgattgcaggatcattccatgcaagaccgccctcgtctccaagatgccagaaatctgttaccttgtagcagaactctgctacatctgagagtactaaaaatccgtgtgcaaagccctccggtataaggaactgcttcttgttctcctctgtgagctctactccaaaccacttgccgtacgtctttgaatcgcttcttaagtctacagccacatcaaatactgagccttttactgcacgcacaagctttgcctgtgggtattccttctggaaatggagtccgcggagcactccctttgtggagcaagactgattatcctgtacgaatactctgtcaatgcctgcctcctgcatgtcctttgaattgtatgtctccataaagtatccacggttgtctccgtgtactgtaggctcgatgatgcaaagtccttcgattccacctacgtttttctgtactttaatctgtcccatgatttctatgtcctttctaaaagttaatctcctgcagatatctgtgcagcgcatcctgccatgtagggagcggcttaaatccattctccacgagcttgctcttgtccagtctgctgttaaacggacgtgctgcctttgacacaccatactctgctgtggtaacaggtgcgactgtgagcctgtcctcagaatactctgtatgaccaagctccactgcctgcttaaagatttcttttgtgaaatcataccagctgatatatccgccctcgttcgtagcgtgatagtaaccgtatttatcggtctctatcatatctacgagcagtcttgaaaggtcaagtgtgtatgtcggtgtaccaatctgatcacttactactgtgagcctgtcatgtgtcttgccgacattcagcattgtcttgatgaagttcttgccgttcactccaaatacccatgctatacgcacgataaagtacttctcaagggtatttgccactgcaagctctccgtcgagctttgtctgtccatatacgttgagcggtgcatagtccttgcagtcaggctgccatggtgtggtgccctgtccgtcaaatacatagtctgtgctgatatataccatcttggcatctatcttcttgcaggcatcagcgatattctgagtgccgtctgcgttgattgcatgcacctttgcttttttatcatcatcctcagccagatctactgctgtccatgctgcacagtgtactaccacgtcaggcttaagctctgtgattgttttttccactgcatcacggtctgtgatgtcgagtgagacatatggcatctttgtaactgctgtgccatcatctgctccgctgtactgtggtgctatatctgttccgattccttcataaccgcgtgctgccaggtcgttcattacgtcgtgtccaagctgacctgcaactcctgtaacaaatattttcattttttttgggggtctcctttatacttaattattatcgtgactaacatcaccatatatgcgcaaaaccaccagacaaacgataataactatctattcgcgtacatcttctcgtaatagttctggtactctccgctgatgatcgtctcccaccactcacggttgtcaaggtaccatttgattgtcttcttgatgccgtcctcgaactttgtctctggaagccatccgagctcattgtggatttttgttgggtcgattgcgtaacgcatatcatggcccttacggtctcctacaaatgtgataaggctctccggcttattgagctccttacagataatctttacgatttcaaggtttgtcttctcattgtgtccacctacgttgtaaacctctcctacacgtccgttgtggatgataaggtcgattgccttgcagtgatcctctacatagagccagtcacgcacgttctcgcctgttccgtataccgggagtggcttatcattaagtgcatttgcaatcataagtgggataagcttctccgggaaatggtatggtccgtagttgtttgagcaacggctgattgttacaggaagtccatatgtgcggtggtaagcaagcacgagtaagtctgctgctgcctttgatgatgaatatgggcttgatgtatggattggtgtatcctcatggaagaaaaggtcagggcggtcaagtggcagatctccgtatacctcatctgttgatacctggtgatatcttttaataccatacttgcggcatgcatccataagcactgatgttccgatgatatttgtatcaaggaatacctgtggattctcgattgaacggtcaacgtgtgactctgctgcgaagtttacaaccatatcaggatgctcttcctcaaataatttgtatacggcgtcacggtctgtgatgctctcctttacgaaacggaagtttggattgtccattacaggctcaagtgttgagagatttcctgcatatgtgagacagtctaagcatacgatacggtaatccggatatttgttaagcatgtgaaatacgaagttgcttccgataaatcctgctccacctgttacgataattgtcattttgatttcctcctgattcccgctttttgcaagcgagatttaaattatttctattaacttaatctactagctaactaacgcaatgtcgattttactataattagtacagttgctcgcggtattttccatcaagtacatcctttaagtactgtccatactggttcttctttacgagctcatatgtctttaatacttcatcctttgtaatccagccgtttaagtaagcgatttcctcaagacatgctatcttgcggtgctgatgtgtctcgactgtcttgacaaagtttgtggcatctacaagactctcatgtgttcctgtgtcaagccatgtgaagccctgtcctaaaagctctacattgagtgcctttttctcgagatagattctgttaaggtctgttatctcaagctctcctctggctgatggcttaaggttctttgcgtactctactacgttgttgtcgtagaaataaagacctgtgacacagtaattactctttggatgctccggcttttcctcgattgaaatagcctttccctctttatcgaactctacgataccgaatctctcagggtcatctacatagtatccgaatactgtggcgcccttaccactctctgcgttttcaactgcggccttgagtctcttgttgagaccgtgtcctgcgaagatgttgtctccgagaaccatggctactgtatcatcaccgataaatttctcaccgataacgaatgcctgtgccagtccgtcagggctaggctgtacctcataggtgaggttgacaccaaactgatgtccgtctcctaagagctccttgaatcttggtgtatcctgtggtgttgaaatgatcaggatatctctgatgcctgcattcataagcactgacattggatagtagatcattggcttgtcataaattggaagtaactgctttgatgtaaccattgtgagtgggtaaagacgtgtgcctgaacctcccgctaatataatacctttcatgttgttctcctttaaactgaaactacgtgctgcacttgatgctttcggtctgtagaatacactgacctgattcatcatttatctgcattataaaaggtgccccaagggcaccttcaagtacttttttatatttttagcatttttcacaaaatatatgcttataatatcctgtttttgaatcattttcgtgcaataaatacacctgcatcctttgtgatatggaaccctccctctgtcttctttctgacaaatgctgcaaattccttatagcggtccacaatatacctgttctggttgccgtggcacgaaagcacatactctatcacaggctctgctttttctaccacaagctcatcctcgtatccatgccagcttacctcaccaaagtattttccaagtattgcctcaccattttctttaccgaattgctcatacagcctttccgctgacagctctatacggtcatcaaactcctgcaccaggtcgtttatttccttcatatgccgtgagctgtatgtactgcacacaaacgcgccaccgggctttagcacccttaggatttcactgcacacggcatccagattgtcacaatagaacagtacatggtctgctatcacgcagtcatacgatgcatccggcttatacagcctgtgggcatccatcacctcatatgtgaagcgcttgtcatctgcgcctacatttctcgtcgcatcccttaccatgccatacgatatatcagtcagggttatctgcatatctgccggtatcctgtctatgttctgtgtccagagagaggcatcaccacagcccacctcaagcaccttttccccctcaaaaaagctgcactcatcaaatacccagctaaaccagctcaccggattcatcgagaaatccctgtgcagattaattctggctgatatatttgaagcatccctgtactgctgctttagcttttgctccatctcgtttatattaaccagctccagcatatgactccagtccacgcttcgcccctcgtctattacctctgaagcctcctgcagtgctgatttcataagcttcatctgctctatcctctcctccacgagaccaagctgcatgtgaagcgactcagacatgacattgctgtccgtgtttctgagtgtcatctccttgatatcatccagggaaaagcccagatatttgaggaacagtatctgctgtagacgtgcaaagtcatcatcattatagaatctggctccgttttcgtttacgtaggatggttttaaaatattgtgctcgtcatagtacctgacggtcttttttgtaatatgcgctttttttgcaaattctcctgaggagtagtagccgggtagtttcatattctctaattgcctccttgatagcccatatactctatgatataatcattgggtagtcgaaaaaagctcgggtgttaattctgataaatccctctagttttacagaagggggatgatgttactatgaatacaattgaagtacttacattgttactagtagtttttgcagcattgtcgtatatagacaaccacaaaaagaaatagcaccccaaccgcctaaagtgagggtgctaatctttatactaatcaatcactgagggcaaatcggaataacatccgattacctttgagtagattatacaatagagtggttgataaatcaatcactcttttaaaaatctatctaaattaatttggagaatacaatgaaatacgattatttaatagtaggttccggtctctacggagccatcttcgcccacgaggcaaaggccaagggcaaatcagcgcttgtagtggacaaacgtcctaacatagcaggaaatgtttacaccgaaaagcaggagggcatcaatgtacacatgtacggagcccacatattccacaccaatgataagagggtctggaactacatcacacagtttgctgagttcaaccgcttcacaaacagccctgtggcaaactacaagggtgagctttactctatgccatttaacatgtacaccttcaacaagatgtggggtgtggtgacaccggaggaggcggctgcaaagattgaggagcagaaaaaggaaatcaccggtgagccaaaaaatctcgaggagcaggctatatcacttgttggccgtgatatctatgagaagctcgtgaagggctatactgagaagcagtggggtcgtgactgtaaggaacttccggctttcatcataaagcgtcttcctgttagacttacctttgacaacaattacttcaacgctctttatcagggtattccaatcggtggctacaccaagatggttgaaaatctgctcgacggcattgaggtcagattgaataccgactaccttgagcacaaggctgagcttgatgctcttgctgacaaggtggtatacacaggtccgattgacgcatactttggctttaagctaggtactttggaataccgctcagtgcgctttgagaatgagaccctcgatattcctaacttccagggcaatgccgctgtcaactatactgaccgtgagactccatggacacgtatcatcgagcacaagtggttcgagttcggcaaggatgaggatggcaatgatctgccaaagactattatcagccgtgagtactcttctgagtggaaggcaggcgatgagccttactaccctgtaaacgatgagaaaaacggacagctctatgccaagtataaggagcttgccgataatgagaccggtgttatattcggcggtcgtctcggcgagtacaagtactatgatatggatactaccattgcttctgtacttgatatgtgtgagaaggagcttggctaataatttagcttcccacaaaaggctttgtttatgtcatattcaaaagcgccatggcaatttaccatggcgcttttatttacaatttttttccggccagatttatctcagccgcaggaatatgctccctaagacactcatatccatactccttcgaatacgcatatatagccggaagctgtcttgacagaaagagcgccggtgcttctgtcaccgagtatgcgccacagtgcccgaactcaagaacatcaccaagctcaagtttcttgagcttcacctcgcgtaccagcacatctgccactgtacagaggcttccgcatagtgtatagtctgtgtccggcaattgtgttaattcttcctcggttctttcttcattttctgatacttcacaatcattgaatgtgtttcctatcggacctgctgttccttttatttctcccaatttttcaccaaaatatatttcgtcagctctatatatactaatcggtggcacctgcatagccatcctctgcccgaagtaattcaggtggtggattcctccatccaaaattgcataattggcatcgcctgtcgatttaaggtcctttacctgtgtgtaatatttaccgcatgaggctgctaggaagcgtcccatctcaatgccaagcggatattcctcggcaaattctctaagcacctctgctgcctcatcaagtgattgtttttccttttcctgccagtcttcctcaaaatactccacacaaagcccagggccatactctacaagctgtggctcaaagctgtatttgtcctttaacatgacaagtgcagactttattttttccaagtccttatttattttgcgcaggctcttctgtgtgccggaatagtagtgaatgcctattaccgtgatgcccttaaactcatccggatgcgaaatgatgtattcaatatcatcaagcgacatgccaaactggttgccacttgtcaggcgcagtatgacatgtgctttcgtttcggcaaactcggcttcatacgcaccttcctgtatacattcaagcatcacttccgatatcagtgtcgcatgtcttatgctctcacatgtcagtatcccggcgccgtatgaaacagctcgctctatatcgcatttttccttcatcacgcctgagtagatgatgctctccggcttcacgccaagtgctatacatatctcaagctctcccgggctgcacacctccacatggtctaagccctccggcagcctgtgaagcagaaacggatttgcctttattgaaaaacaaagtggtatcctacgtcctcctttacaatcaagagcagcccttatcatggctgctctttttgcaaactcgtccgtatcaaatacatagtacggtgtctgtctcatatgctttattcctccacaagctctttcacaagcttctcgattgcatcaactgagttgaaattctcaggaaccagatcctttggtctgattgtgatgtcaaactcatcagtcagctccgatacgagtgaaactatatcaaatgactcaagaattttgtcatcgatgagctttgtctccttctcaaaatccacatccggtcttaattcctctaaaatctctaaaattgtgtctctcattttacatttcctccagttttttcatatcatattttccgtttggaagcttaggaagctgctccagtttcttgattttccttggcaccataaagcccgggagttcgtccctcagcgccagcgcaaggcttctcctgtcacagtcacctgtgtagaaaagtatcagcacctcttttgctttattatatataacgcagctttctgcgactccatcgaccacattggcggcatgctccacctcatcaagctccacacggtgtcccatgtgctttatctggcggtccatacgtccacagaaatgaagtatgccggcttcatcgagccttccgtaatccccggtgcggtacatccgctcaggataagccctgttgagtggattgagtgtaaatgccgcagctgtcctctccgaatcattataatagcccaacgccaggattggtccacatacgcatatctcgccctgttctccgacagccggctcatttccatgctcatctatcaggaaaactctgtaattgtcataggcttttcctataggaagcacctcgtcctcttccaccagatgatccacactataatacgtgcacgaagcagttgcctctgtcggcccatactggttcacaaaatgcgcttccggcagattttcctgccattttctgagcaccctgcatggcattactgagcctgagaagcagatttttctgagactcttaagccctacttcctcaaatgccccaagcgatgtgaggatggtaaatgccgaaacactccagccaacactgctgaccttcttatcattcatgtaatcaaacagggcatttggctccataaaatactcttttggaataatcgctgtgctgcagccggtctttagcggcagataaatgtccctgattgccgcaatatagtcaagcggcgactgattgcccagcacatcactttcctctatatgcatcacatcacagtaagcattgatgtatgtcataagtgacagatgtgatgtcatgactccctttggattgccggtggagcctgacgtgtagataatatacaatgggtctgtcatggacatctgcctgcggactgttgcgagcatatcgttctcactatccgtcacagagtctcctgctgattcactgattttacaattactatcagcgcacgccacctgctcgaagctcgatatatcctcagcaataaatatctgcggtctatcgaagccttctgcctttgccagctcatccactatgctctccacatgctcacgactttccctgtccgcaacaatagcccttggacacagattttcaagtattttttcaattctcttgtcaggaagcgatgcatcaatcggcgcatacggtctgcctgcatataccactcccaggaagtatgcaggtgttaccattttccttccggcaaatactgcaacaggggttctgtccactccaagctgttctatcagatatgctcctgtatttcttgctatatcatacacctgcgcaaacgtaatgctgcattcagtatccgaaaatgcaggcttgtcaggggatttttctactgtggcctcaagccactccagtacatttttcatcttagtcctctttcatgcattaataaacgttgccgaaaaaattatagcatataacatccgaaaaaaatgtcatgtgctatcgaattaagaattcttaagaaagccttaatttttttctgtagatttttctatatttgattctcctattaaatatatcggtctgtcctttgcctcgagatatagcttcgacagataaagtcccaaaatgcctatgctaagcagttgtatcccacctataaaaagtatgataacaacggtcgaagcccagccggctaccggatctccgaatacaagtctcctgataatgataaagagcattgcaattattgcgacaataaagctgaacactccggctattgaagccatgtatagcggcgcgttggaaaatgccactattccgtcaaggctatacaaaaagagctgccagaatgaccactttgtctcacctgccactctgtttacattctcaaactcaagccacttcaccttaaagcctacccagccaaacaatccctttgaaaacctgttgtattccttaagcgaaagcagtgcatccacgtatttcctgttcatcagcctgtagtcacgtgccccatcaaccatatttgcctttgatattctgctcataagcctgtaaaattttctggcaaaaaaagatctaatcgctggttcacctttgcgtgtcactcgtcttgtaccgacagcatcataaccctctttattaaggacctgatacatcttcggaagcatttccgggggatcctgaagatctgcatccattattgccacatattcccccaccgcatgctgcaagcctgcatacatggctgcctccttgccaaaattgcgtgaaaaagatatgtattttacaccggaatcatttgcggcaagctctttcgcgacatcgagcgtcccgtccatggagccatcatccactataatcagttcatagtacaatcccgctgtctcactctcttgactcatctgatcaaacacctgagttattttattataaaaaagaggcagagcctctttctcgttaaagcatggtaccacaatgcttatcttatttttttccataccagccaccctgcatataatatcaaataaataaaaaatccgattgctgctcctgccgtatttgtcacaaaatcatcaagctgacaatatcccctgccggtaaccagctgcgtgtactcaattgctgcgcttataaaagcaccaacaggtattgtaaaccatctcatccaatttttaaaaaccaatggaaatataagcccaaatggtataaacaatactatattttctataaaataagcgtgcatctgaagtgtcatgccccaattgctccacagcaccatatcggcgacgccggttctgcttcccggctcccttgaataatacactatcattataagcgtatacatataggccacaaaggtgccgcagaacagcatatgccagattttgcccactatcttttttcttctctcatctgcctgtgatacctctctcattgtgaaaagatatcgcagcagacacacaaaaatatacatcgcaatgcagattaaagccaaatataccgctgacggaagatatttgaacttttcctgtatgtctcttattatataatcctttaaacccaatgtccttttttatgctccttgtaggcacgaatgaactccagctgtcgttcatcgtcctttttctgttcgtcatcagacatatgactcactttaataattatacacaatattatgccaattacaataataccggcacataatataaaaataattaagatttcaggcatagactatttcctccggcagaatttaattactattctctctacagattaaattatatccacttaatttatcttaattcactcatttatgaaccctgatagcaacaaaagctgcatgatattctcacacagcttttgtatcttacgtgtattatctttggcattaacctttattttaattttgcaacgaccatatccacatatttctggcagatttcctcgctctctgcctcaaccatgacacggataacaggctctgtacccgactcacgcacaagtatacgtcctgtatcgccaagctctgcagtaacctggtcgacagccgcctgaacctcaggattggcaagtgcctcagccttgtcagctacgcgcacattctgaagcacctgtgggtagatactaagtccctcacagagctggctcattttctgtttcctagccatcatgacctccatcatcttaaggctggtaaggataccgtcgcctgttgatgcatacttagagaaaatgatatgtcctgactgctctccgccgatgcggcagccgttctgctgcatgtactcatatacatatttgtcacctactgcagtctttgcatagccgattccaagctcatcaagggccttatagagtccaaagtttgacataactgttgtgacaacagtattgttatcgagctttcctctctctttcatgtactttccatagatgtagaggatatggtctccagtgattacattgcccagttcatctacacagagacatctgtctgcatctccatcgtatgcgaagcctacatcaaggccattgttcaccacgtacttctgtaagccctcaatatgtgtagagccagcattattgttgatgtttagaccgtttggctcattattgatgacatagcactttgctccgagtgcctcaaaaatagactttgccatgttccatgagcttccgttggcacagtcaagacctaccttcatgcccttgaatgagtagacaccaagcgatatgaggtatcccatgtaacggttacggcctgccacataatccactgtacatccgattgcatccttatgtgcataaggcaactccttccactcctgaccaaacaggcgtagcttgccgtctatatagtcctcgacaaggagaattgtctcctcatccatcttctctccattgctgttgataagcttgattccattgtcatagtatggattatggcttgccgaaatcatgataccacagtcaaaatcatcggttcttgctacatatgccaccgatggagttgtggtaacgtgtaatagatatgcatctgctcccgatgctgtaagtcctgatacaagtgaatactcaaacatgtagcttgaacgtcttgtatcctttcctattactatcttcgccggctcgtcgagctgcttctgcttcttaagctctccataataccagcctaaaaatctaccaatctgatatgcatgctctgctgttaaattgacattagcctctccacggaagccgtctgttccaaagtattttcccattattgtccccttgtgaaataaatttttcttatattatacacttaacaaatatgtttgtgtagtaaaacagtattatttgttaaattattcgacttcataaaatcaattgtttattaatgtgataaaattgacatattatgtaaatcaaagctacatagatatcttatgacactccatatagtatctcttctcattcgcttctccaattgagaatgtctttctgggcagcaccccgcccgcatttatagcagggaacaatgtgctcttgtctatcgactgaagaaaaattccacatcccttagtctccttaaccagtccgtgaagtgcctcatcaccatggatatagtctatttccacattgccatgtgtctcaagatacttatctaaaataccctggagtatctcaaccgggaggcggtcacctctatttgtgatattaattctggaattctttattgaggtagcgcctgattcaacatactcaaatactatctcatcaccctcagtgctctcaagtccttgttttgtgatttcagcttcgaaaaacgacagcatgtcctttacatcaatatttgtaagcagtctgtgaataggcttaaactcaagtgcctcactgtgcagattacagatttccacaagagcatgccttgcaggatgagttttcaactgctcctctgtgaattttccggattttttgatattttcccagcaggtcttcgctgttgcaagcgaatgatttccatcacctactgcaaacaagaaacctccacagctattctgttttgctgcgaatgcctctgtcacctgctttgctgcctcaccctcaacagcatagccgcggatatgtccgcctccctgcataagctctgtatcgtaaagcttacgaagagtgtccctgatggcatacacatattcgattattccatgctttacagctgctatatttactgcatcttcctgtgtagcaccctggcatccatcaatcttttgtctgtctataggatcatcaacaagcagcataacatgtggcagctcaatagctgcattctctcttattttcactctcggaggtatacgtgagattactgttccctctgttgctctgatgagagtcttctttttcgggtcgaaatcatagtcatccagatcaataagtcctactattccaagacgcacccctgactccgtagtacgctcaacaagcacatagccatctgccaccacttgctttaaggttccatctgtgagatatgtctccatagtggtattaatatatttgattctctcatcatccgtcattgaagcatattttgttttcctgccggtttctttgtcatttttgacaccatcccctgatgaattgcaatcattctcctgattcgtaattgttcccagataaatttcaggaaacaccacattaagcgttgacggtgcatcagccacatacttttccacagcatcccaataatctgcctggcttgtaaactggtcacaggcaataactgaccattttttcatatctatacaatcgtttggcaaaagaatatttgccggattgaaacaatttgacatatcaacaattctcctttaaatatacaaaatatataacagaaatccgctatactctatagtataacggatttacttttatttgcatatattaaattccttttgttgttagaattcttccaactgcatcatctaatttttctgccggtatctcgccactgttaactgcagacaacactgcattataactgctctcaaagcctgttgaaacataaagcatgctcattcctgccttaacagctgccacagccgcctcatcctgtgtacataccttattaagagatgcgtctgataaatcatctgtaatcaaaagaccattaaagcccatggtagttctcatatagtttacggcacctgctgatgtagagcatggcgtggtttcctctcctgtcacactctggcaaatcacatttcccatcatgactgccggaacacctgcttcaattgccttctgatatggcacaaaatcagatgcctcaagatcctccagcttatctgtcatccagagcattcctgttgctgaatctgtagtagcctttccttttccgggaaagctctttgctacagaattgattcctgcaccattatagctgcttacctgtgctgcaacacagtcacctacagtcgctgactcgctgccaaatgcatatgtatcgttatctgcattatcaccatatgctatatctgctgtcggcccaaaattcatattaaggccattggtagccatatatgaacctatctttcctgcactgctgcccgctgcgtcagcatctccaagctgtgatggtgcctgctgtgcctcatatccattagctgaagcaagaggaagtctttctccaccttcttcatcaattgcaagaaacagattcacgcccaatcgctcctgcgaaaatgactgcagactgctcatcatctttgtaactgcagcctctcctgagaaattctcctgtctgaaaacaaaaccaccaataggatatgtaccaatagctgcctttgtcttgttaccggcctgagtgaactgtgatacacctgtaatctcctcaggtctcgtaatgaatagctgggctaccttttcctctgttgtcatagaagacagctttgtcttgacagaatctgacggagtaaatgtcggtgctgcctgttgtccatcagcttgtacctgctgagttccatccgtctcctgagtaggatttagtgtctcctgctggctttctgttattttcttattcacattattccccggcatcacaaaatgcactgctccaaataccagcacaactatcagtgcaattacttctattgtgatgaggtacttatctccattttgtctgaagttcatatttaatccccaaaatttgtatttgttaaatcgttattaggtccgcttacttttcctgataatgcactgctgtattcgtttacagttgcactaggagtatagcctgtatcaccttcaaggaactgatgcactcctgtagccatgtctgcaagtgtagtaggcacctcaacccatgcgccatcaacctttccaccatagaacacctgtggatatgctgtagaatcctctactgtatagtctgcaagatttttaaatactgaaagaatctcatcagtattatagttagtattgacatgtccaatcagatctgataccatcttaatctttgccgctgtattcatctgcttagctgattcaaaaaccttgaacagcactgttctctgtctttcagcacgcttatagtctcctccggctgtataacgtattctggaatacgcaactgcctgagttccatcaagtgtatatgtgccggctgaatcaatatgggatgagcttgttccacgaaccttattgacctcatcaatatatccgtttatcacctttgcctcagatgcatcaatatcctgtacaatgcctcctacctcatctacaatctcaccgactgtattgaaattgactgtaacataattctttatgtctaaatccagatttttgttaagtgtatctactgcaagctccggtccgccaaacgcatgtgcatgtgtcaccttctggtatccatgaccatcaatattcatcatacagtctctgaaaatagataccatgcggattttcttagcatcatgatcaaccctgactaccataatggaatcggaacgtgttcctttatcaagctgatctgagcggctgtcaacaccaaataacgcaaactcctcaatacctgatttgtctgtagtgctgtcatcctcagtctgagtatcggcttttgtcttaactgcctctgtacccggctttatgcctttaacttctttattcttaacattactgctgttaacctttacaagtattatcgctataatagcaataagtacaatcattactgccgtaataattatatttttcttttttttcatctgcacttattctccgtcattcatatgtgtctgcgcctgctacttttcgtcatcgtccctgccatagtaattaccatagtaattaccataatagtttccatagtaatgaccatacttagactcctcaaacctgcacttattgagcacagctccaagaatcttgactcctgagtcctcaagtgtacgctttgtattgatgattgcacggctgcttgtaacattctgggcagcaactattactgctccgtctacattctttccaactacggctgcatcaatcgcagcgcctgtaggaggtgtgtcaacaagcacgtaatcaaaatttttctctccaaactcgataagctccttaaactcttttgtttcaagaagctctgtcggattaggcacctcatgacctgcaaagaggataaacactcctttgatgtttgtcgcatatactactttgtccaaagatacctgacctgaaagataatgtgagagtccgtatatctttccaccgctctccactttcgctctgagtcttcctacaaggactgacttacgcatatcggtatctactataaggactgacttcttagagtccgccatcgaacgggccagatccataactacggttgtctttccctcatttggcacgctgctggtaaaaaggatagacttcacaccctttccactaaagctgatgcttgttttaagagctcgaagagactccttcattgtataactctggtcttttatctgattaataactactgtttccattaaactgccctcttcttattcttgctatcgtctgatttagatgattgagttttcttcttttttcttctctttgtcttggctccatcatactctgtctcatcaacaggaagtgatgcaagcaccttgaggcctgttctggtctccatatcatctgcattagaaattgtatcgtcaagcatatatccaagtacaactatgccggcagcaagaatcagtccgagtacagctcctataactgtattcttaaggatattattattcaccggtgtctttgaagcatatgctgtctggataatctttggctgtgactgttccatattgtcagcgatatactgtgatgaaacctttgcaatctcatctgccactgtttttgaagcttctaaatcagtgtctgtaaccacaatcttgagcacacgtgtatctgtcggattctctattgaaaccctcttgctgagctgctcatatgtctcgtccatatccagattgtcaattacctgtgataaaactgtcctgcctgtgataacgtactcatagtcgtttgtcagactcgagcctacctgaatatcagcaagactggtgatagatgttgacttggtcagtacatacatctctgcagatgcctcatactccggtacaaaagtaatcttggagtataatccaaatactgctgcaagaagcaccattgatgccacaagtgccttccaatgcttcactaattcgtgaaacagcgctaataaatcgatttcaatttcctgatctcttattggttcgttgttttccattttcctaccctttacatattgtaacattatttttcggtttaatcctatgttatattactacacttcatttcttttgtctatttttagaagtcacaaaaaaattattaagaatatgtcatattttgtaaataattatgcaatataatagaaaagtgccgtttccggcacttttctttgttgtattttcatttgctatattttatttgttcctgttctattgttgctgttctagttctgctgtggctgttctgatggttcagtcggtgccaccggctgtggttgtggttttgaatttactgtaacggttattgaactgcttgcgctattccagcctgccatttcacctgctatagctgtaatctgtacgctaccagccctgtaaatggtcacatttccggcgccatctactgacgcaatcgaaggatcacttgactggtaagaaagcgctgctccgtttgaagcacttgctccgagagaaaatggtgcatctccctctgttacagttttattaccgcaacctattgtcacagatggtgtctggtttggctgtggctttgcatttacagtgattgtaattgtcttgctgccggccttatagcttgtagtagcctcagacttgacagtgattgttgcagttccgacacctgctatcgtcacattaccgttctcatccactctcactacaccattattatcacttgagtatgtgagctttgcattatcctctgctgtcacaccgagattgaatgctccgtcgccctctgtcacattataagagtcagctccgccaagactctgtgctttgccggccaccttgtcaacaccaccatatacaattactttttcatctaatgttacattctcatatagcttctttgcagctgaataaggcatatttatgcagccatggctgccgctgtacaggtagatatttccaccgaaagtacttctccacgaagcatcatggaagccaattccaccattgaatggtataaagaaattaacccatgacttatatccgtctccccttaagtatctatccttatctcttgagaaaatagaatacactccggtaggtgttccgtgtccttttgaaatacatcctgtaacacactgacttgatacaacaagctctccatttttgtatacatataccatctggttggtaagatccacttcacagtaattgccaccatatgtgacatattcacctgtttcttcttcctttgcctcactgtaaactgcttccactgttgcagactttttattgtttattgcctcagcaatcgcctcatacagcttgtttccatctacagtctgtcctgatgatgctacaggcacatttattatacttccgcctgttgtcttaaactgtcctgttttcttctttgacacatcatgctttttggctagctctgtacaatatgtagccatattctcgccatcaagcgaaactgacaatccgtcattgtccactataagccactgggctatctgatcctttcctacagcctctgtagcagcttcacctgttgccggtgtgaaattacatgtcaccgtcacatcaagatatgcattggcttcttttaatgcattctttacctgctcgctgtccgtagccttttctccatcaacatatcctgttgcagatgtaagctctaccttatccttcagctcctttacagcgcttgtcagatttgcagctgcattgtcatatacaggtgcatctcccgatacaccgtcaacaccctcaaattgtcctgcatctgcattgtaggctattgtagcgcgatatggcacaattgatcttatatcaaaggtctgtgtgtctgtcgcagccttcttttgttcgtcatcatttgcatctgtatccttatcactctgagccgcagcatcagactgtgactgcgtttttgcagtgatataagagtctacaagagccgtctccagctcatcagacttgtccattttaaaaagcttcacctgcttttccggttccttatccttattggccgcatttatcagttcctgaagatctgctttgtcattgtacttgagtcccaaatcctcagctgtcatatcaaatgatgcatcgtcaagcttcactgatatcttatacttgcctacagcggtctttatggctttctttgcctcgtcagcagtcattccacctacatcaactgatgcaagcttgtacttttcagggaatgtcttgtatgctttctttccacagcctgccatgcccaacgccataaacacacaggccaaaactaccaggagttttatacttttcttcttcatctttatcctctttatcttaatttttatattattctcacagtaccatattttatcactttcttatatatgcctcaagtgagatttgtcacatatttttatcacaatttaccattttattcatcataatgcagataaagatccggatttctccagacccttaaatcaattgtttcttaaacttgctataaaaccatgctacgattggaaaagctttaaaatcagtttttctaatgagccatatctgcttcctgctgcacgcccggtacactcccgggtgctcctcacgcagcatctcgtcaaacttcttcatatgctcaacgttccttgtatcattgccctttgccagaaatatctggtactcatcatcgactgcctcggctatgccgcgctcaaggtactgcttcttgtaggtctgcagattgccgtgcacgttgttgtactcaaacagtgcatcaagcaccttaagatgctggtcatgacgcttgatcatcatctttatgtccacgctctgaccactccttccaagtctgtactgatacaacggcagaggtgaaaacgtgatgcttgtgcagtatggtatagggtagagtatatactcctggtcctcgtagaagcagtgctcatccacacgaatatcattcttctgcaatacatcagtacggatggtcatggaatgtatagtgatcagtgggtccatgactgcctcagcaaagccccactccctgttgtagtgataagagttggacactgcctttctgcgctttgtgaccttctttgtcctatcatccaccaggttgaagtcattggatatgacatccgagtgcgtgtgcttcaaaagctgtataaactgtggcaaaaggctcttgtccagccagtcatcaccatccaccaccttgaaatactttcctgttgcgcgcggtatcgcatagttgatggtagatccatggcctccgttctccttggagagcaccttgaagctgtatggatatttctgctcgtaggtatgtgccaggctggctgtggaatctgtggaaccatcatccactatgagtatctccagacttctgagcacagacaaatctataaacgagtcaagacagttctttatatacttttcaacattgtaagccggaacgactatggttaaaagcttctccatatatatgtttctccatgtatacctgtttccttgtgtactactctccgagtccatccttgatgtactgtataaggtgttcaagtgcctcactctcatcctcgccattgcagataagctctatctcatcgcctgactttatgcatgctccaagcactgaaagtacactctttgcattagctacatttttctcgtcatatataaatgttacctttgatttaaatttcattgcctctttgcagagattgccggccggacgtaaatgtaatccggtaggattcttgattattattttttgtgctaccacttttattacctcttttcggttatatatctatcaatgtgatgaactgtcagagccgttatttccggtgtttcctgacgatgtgctgcccgatgacgatgaaccgcctgtgccggtgtcgcctgatgttgtaccgcctgttgttgagcccgaggctgttcctgtaccatcagttcccgttgtgccgcctccgtcaccttcccttccgataactatctgaacctttatctcgccccatgtgtacttggtctcatccagatttggctttaccgtcactgtatgtgtacctgtaccaaggcctgtcacatcaattttacccttcagtgtagttcccgaaagtgtatctatatcagactgggtgccgcttactatgacactgctcttatctgttacaaatgtaagcgtatatccctcttccagtccgtcatatgtgatattggaactgttcagcgtcatggttgaagtcgcatttgtttcaatctttatatctatactgagctttgccttggatgagttcactataaaaactccatccggcagatatcctgtcaggtcaacagatgtacttatatcgtctgttgcgcccgatatatcaattggtcccacatctatagatgtgatattgttcaatgcttctgcattacctttgagcattacagactcctctgatagttctactccgagcacgctctttcctcctgccggtgagcctgtcgtagtacacttgataggcacctccttggtacttaggacatcaactgtcactgctatagactgatactggctgtccacatcaagctttgatatatctatctcatcgccattatcatcaatcagagtgagatcaccgcgatcagttatctgattatctgatattatggtattgtcatcgacctttatatttacattagccgatgctatagttgaaacaatggactcaggacctccgatctttactacctttggatttgcctgtggcttgtttcccagtgctttcgcacctgagagacttccatccaatgatacctttacctcaaactgcttctgcatatatttttcaaccgaaagcgggagcatatggtctccaccgttgaaggtaatcgaatgtctgtacttggtgcatccaatatctacctttacgcttgccttattcgtatcatccttatctactatgatatttgcaaggtcgacatttgcgtaaaaatcagaatcatcaagctcgttcagatagcttctcttgcctgataccgaaaagctgatggtcttttccgaatccttgatggtaggccatagccccttgtcaacaaccgaatcacggcctgtgacggtgactgttgtggtaaatgtctttgtcttgaccgggtcattgagattgtagaccacaagccagagtataaatgcaaatgctatcgcaagtattttaaagcctatattatttgtgaaggtttttagaagcttctttcccattcttaaacctccttttaattaattcaaatttacccggctccctatgtctgttctgcagaagcttaagctgtgtgcgtagatgatcggcatctatatcgtgctcaatctgccccttgtatgctgtagaaactgatcctgtctcctctgaaactatgatagtaagcgaatcacttacctcgctgactccgaccgctgcacggtgtctggttcccaaatccttcgagagtgacaggctgtctgatagcggaaggtaacatgtagctgacaccacacggttgccacgcacgataaccgctccgtcatgaagcggtgtatttttctcaaaaatattgatgaggagctgacttgtaagtatggcatccacatctattcctgttctgatatactctcccagatttatctcatcctccatgactattagcgctcctgtctttactctgcccatcgcaaagcatgcacgcaccagctcatcgattgtcttgtcggagaatttctcaatctcgcccctgccggtattgaagaaatcacccaaaaaggtctttccaccaatattctccaaggcatttcgaagctcaggctgaaaaataacaacaagtgccacgagacctatattaaagagtttctcagcaagccacagtatcgtatccatctggaacaatgctgcaacaagcacaaacaacagtatgataataaggcccttgaacagattccatgccctcgtggtctttatccacaaaagtatatgatagaagagcactgaaataataagtatctctataatgtctatcacaccgattttgatgcccggcacatttgtgaatgtaaggaactggtccttgaagcgtatcaatacaccactcacattatccatagcgccctcctttctcttatactatgtaactatttgtcatcctcaaatatattttcgtctatttcgagatcttttgcaatagcctctttgctgatattttcctgattatgtctcggaatcttctttccaaggcttcctgtattgccaaagtgctttacaaccttttcctccttggcaatcatcttctttggaactgccttgacgtaatagtaatattcatcatcctcaaattgtacgttttctgtacgtgcatagtcaagattcataaatataaactgtatgacaacacctgcaaaaatagcaactacagtgctgagcacaagccagattatcttctccggcagtccgagcaccagataagcaacaacaagtgcaaccaactgtatgagccctcctgctatggtagcaacagtccatgaattgttgattttcaatcgtctgacctgatacaccaccagtgtggtgataacaaagattgccataactataaacatctctttgttgtcaagaagctgtcccattgtcacattgagctttgtagtgctctgcccctttttatctaccacctctgcaagcgctgatgcattctgtctgattccatcaaagaaatagtacagcagtgtgccacatattattgcaacaaccgaataagctcttcttaaaagacctgctgcaaccggcataacagatggtatgtgaagctgaaagcatataggtgtgagtatcacaagcatgccatccttcggtgcaaaacggaaatagacaaaatacagtactaaaaaaagtacaaatgtgatagcaaaaacctctatggacagcgcatacatatctaaaagtatcataatcgaagcaatccagagtattgcattcaccggaagcagtgcacacacaagcgctaaaagcagtgccacaagcatcgagcttattttcgccatatagccgatattcaaatctattgttataaatgcgataaatgcaacggcaaatctcacaaccggaagtataaagtgctcatactcaccgcaaaatttgactgccttatccttaatttccagtaacttgttcataaagcctccctaacgcttaatcttttcctcacgggaatatattctgcccactgccttcaggtgatttgcgtatttgcgcacttctcttctgccggccttatatcttgcagtatacaccacaattgtgacaaaaatgtaaaccgccataaacgcaatatacagtatgcctattgtgacacccattgccttaaaatcaagcttattgattctgtccaaaagctctgctgcattgacagcaacccacatcacaacaagccctgcaaatgcgaatgtacctgtaaagaagctttttaagccctctttccatatatagtcccatccgtaatagcttgcggactgcttctgcacacggctgtcatcgcttttgctgtcacatagagcaatattaaacagttcccttactttttcttcgtttatcataaatcatcctcttacctgttacctgatatatctcatacggtttttgtcatcctgctgccacagctgcctatcctggctctttggtgtgtcaagggcactgcgtagtgtgtttgtgagcttagtcttgcactcatcacaaaatctacctgtacgtatcatcctgccacagttctcgcatggtataccatatgatgaatccggtgaaaacgaaagcctttcctcacgtatccacctatttatctgcttcatggatgtatccgtctccttggccactgtctcaaccggcacatttggattatcctcaacaaatctctttactatatcaaatttctcatccatttttttctggcagttcgggcagtactgctcatctgacagtacattaaatattctgccacagcccttgcaattagatattctcatctgataaaaccctcctaacttccctgtcctatgcaaatacacagcacatatacacggccgggacatttctttgctatctcgtgcccaatcgactccgccgtactgcctgtagtatatatatcatctactattagtatttggtcatattgtacaatactatccgccacttgaaaagccccctctagacaatttctgcgttcaacataccccattgtcttgagtggactggtatttttcactctgcgcacaagcccttttgccatccttatgcctgttttttcagacaatgcctttgcaaaacactctgcctgattgtagcctctctggcgcatctttttacggtgcatcggcaccggaataataacatctatcccacatctctgtatccagtccgaatatctttccactgctgtctgtgcaaaataagccgcatactcacgtctgtttgaatacttgaacctgtacatggtctgctttatgctgcccttgtatgcaaaaagcgccttgccctgcctgtagctgtcatcttcccgcatctgcctgtgatgctctagtgcccgtgcacagtcgtcacaatactctcttcgctcagacaaaaccggcttcccgcagcgcatacactgcggctgctcaaccggaaagagcttttcacagcatctgctgtgtatatatctctcaaccggaccaattataccatcacataccggacagcgcggtggaaataccagattgattacgcctctcccaatatcctttattttgttcactaatccccctgactgtaatatccccatttgtaacattattaacaaaaaagcgacaatacattcctgcaatgcagggacatatcatcgccctcacggctgcctgttataaaacgtatattctagaattcttcatctctcttgcctgcaaggaactctacatactttcctgtaccgatagcaacacatgtcataggctgctctgcagtcattgtattgatgccggtcttttcctcgataagctcctcaagacctctgagcagcgaaccgcctcctgtaagcacgattcctctgtctgcgacatcggctgcaagctccggtggagtcttttcaagcactgagtgcactgcctcaactatctgaagagttgcctcacgaagtgcttcctctgtctcctctgagctgactgtaatagtccttggaagtcctgttacaaggtttcttcctcttacctcaattgtctccggctgtgggagagggtagcatgtaccaatcttgattttgatatcctcagctgttctctctccgatgagaaggttatgcttctttctcatgtatctgacaattgcctcatcaaaatcatctccggctatcttgatagatgtgctgactaccgaaccaccgagtgagataactgctatatctgatgtaccgcctccgatatctactatcatatttccgcatggctttgaaatatcaatacctgcaccgattgcagctgcgattggctcctcgataatcttaacatctctggctcctgctgcaaatgtagcatcctcaacggccttcttctcaacctctgtaacaccacttggcacacatacgctcacgagcggctttctgaagcttttcttaccaagcgccttctggatgaagtgcttgatcatcttctctgtaactgtataatctgagataacaccctgacgcagcggtctgactgcaacgatattacccggtgtccttccgagcatgaggcgtgcttcctctccgattgccttaatcttgttggtgtccctgtcaaaggctactactgaaggctcctttaacacaacaccctttccttttatataaacaagtatacttgctgttcctaaatcgattccgatatctgatccgaccattttaatagcccctttcctgccatatctttaaatttacacatacactctcttattatatacaataaatcccatttttcaaactttttttttgaaaaaggtcatatttaataaaattttaaagtttatccttgtctttttccagatatggtttcaaaaaccggcctgtatatgactgttttacctcgcatatctcctcaggtgtgccctgcgctatgacggttccgccgccgtctccgccctcaggtcccatatctattatatagtcagctgtctttatcacgtcgaggttgtgctcgataacaactacagtattgcctccgtctgagagcctgcgcagtatctccacaagcttgtgtacatctgcaaagtgcagtcctgtggtaggctcatcaagtatatatatggtctttccggtgctctttctgctaagctctgtggcaagcttgatacgctgtgcctcaccacccgaaagctctgtggacggctgtcccagcttcacgtaggatagtccgacatcatagagcgactggattttgttctggatctttggcacatttttgaaaaactcaagtgcctcctccactgtcatatcaagaacatcgtatatgctcttgcccttgtactttacatcgagtgtctccctgttatatcgtttgcctccacagacctcacacggcacatatacatcaggcaggaaatgcatctctatcttaaggattccatcgccgccgcaggcctcacaccgaccgccctttacattgaaactgaaacggccctttttatagccctttgccttggcatcgggtgttgatgcaaacaggtctcttatcatgtcaaacacacctgtatatgtggcaggattagagcggggtgtacggcctatcggtgactggtcgatgtctatgaccttatcaagctgttcaagaccatctataccatcgtggtcacctgcgatacacctggctctgtttaaggatttggccagatgcttgtagagtatctcattggtcaatgagctctttcccgagcccgacacgcctgtaacacaggtcatgataccaagaggtatctgcacatcaatatttttcaggttattctccctggctcctcttatcgtgatatatccgcttggcttgcgcctctcctgtggcaccggtatctttattttaccgctcagatatgctcctgtgagtgattttttgcactttataatgtcctttaatgagcctgctgccactatctccccgccgtgtgaaccggctcccggtcctacatccacgatataatccgctgcacgcatggtatcctcatcatgctccacaactatgagcgtatttcccagattcttaagattcataagtgcaccaagcagcttgtcgttgtccctctgatgcagtccgatacttggctcatcaagtatatatgccacacctacaagtcctgagccaatctgcgtggcaagcctgattcgctgggcttcccctcctgaaaggcttgccgtgccacgggtaagggtgagataatcaaggccgacctgctgcaaaaagccaaccctcgcacggatttcctttagtatctggtctcctatatagtgctgctgctctgtaagctctatatcagcaaggaacttcacaagctccttcacagacatggaggtcatctcatatatgttcttgtccgcaaccgtaacggcaagtgacgacggcttaagtctctgccccttacagctcgtacacggagtaatgcgcataaactgctcatactctgcctttgccgtatcagaaaaggtctccttgtatcggcgctcaacattgtccacaaggccgttccatacaaggtcatagacaccttcgcctctctgacccttgtatctgaccttgagcaccctgccatctccaccgtaaaaaagcagttttttcatatctgcagataaatcatcaatcggtgtgtcgagaggaagcccatagccctcatgcagcgcacgaagtgtcgcataggtatagctctttgggtctgtacatgactgccagcccatcacttgtatggcgccctctgatattgaaagcgatgagtcaggcaccataagctgcgggtcaaactccatcttgtagccgagtccgtagcaggtcgggcatgctccgaacggattgttgaaggagaagcttctcggctcaacctcatctatgcttatgccacagtcagggcacgcaaaattctgggaaaaggtcatctgttcgccatccacaatatcaactattgcattgccctctgtcagttcaaatacattttcaagtgaatcagtaagcctcttctctatgcccggctttacaaccaaacggtctacaacaatatcaatattgtgctttatatttttctccatcggaatatcctcggagagctcatacatgctgccatctacaatcacacgcacgtatccgctctttttggctctctcgaacagcttctggtgctcacccttgcggcctctgaccaccggtgcaagaagctggatacgggtgcgctcaggcagcgccataacagtatccaccatctggtctatcgtctgctttgtaatggcacgcccgcacttcggacagtgtggtattccaattctggcataaagcagtctgaagtaatcatatatctctgtgaccgttccgacagttgaacgtgggttcttgttggtggatttctggtcaatggaaatggcaggcggaagtccctctatagactccacattcggcttctccatctgtcctaaaaactgacgcgcatacgatgaaagtgactccatgtaccttcgctgcccctcagcatatatggtatcaaatgccagtgatgacttgccggagcctgaaagtcctgtaaaaacaacaaactcatctctcgggatgtcgagactgacgcactttagattgtgttcgctggcacctcgtattttgatgtattttctttctttttttgccataatttgtgttcctccaaattgcttccggatgttataagcttttattttacgtctctcaatgtgtttttaagcataataagcttatccctgtactcagcagccgcctcgaaattgagctctgccgctgcttttttcatctttttctctatatctgcaatatgcttctcaagctcttttttgctcattgactccggatctttgtcaagagcattctcatcggccgctaccttctttgagatagctatgagatcacgcacggatttctgtatagtctgtggcgtaatgccgtgagcctcattgtactcttcctgtacctttctacgacgctttgtctcgtcaattgcgacacgcatggagtctgtaatcttgtcagcgtacatgataacatggccctcactgttacgtgcggcacgtcctatcgtctgtataagtgaggtctctgaacgaaggaagccttccttatccgcatcgagtatggcaacaagtgtaatctccgggatatcaagaccctccctgagcagattgatgccgacgagcacgtcaaatacgtcaagacgcaggtctcgtattatctccgctctctcaagtgtatctatat

SEQ ID NO: 769 - DNA, 23664 bp, unidentified
  source 1..23664: mol_type = unassigned DNA
taagatcggcagtctggtgaagaagggctatgtggaaaagatccagtccaccaccgaccggcgcgagtatcacctgcgccccacccagaagtatatcgattactacaacatcagctattcctacctgcacactgtggtggagcgcgcaagagagcgcttctcccccgaggactgtgcaaagctggaggagatgctcaccattgtgagcaacgagctgatgcccgagttggatatgctcaagaaggacgaaaaggcagaataagcaacaaagaactcccggacatccgtccgggagttcttttgtttccccttacttctgctctttatctactacctggatcttgcccttcttccacagcacataggaggtaaggatgccgatgggcagcatcacgatgatgaagatgcccacaaggccgcccagcacggagccgtagcctgcaagacgtgcggcgagtgagagcaccgtcatgatgatgagcaccggcagcacgcccttgatgccgcccttgaccaccttgctgccgctggacgagctggcgaacagacccagcgccatggagccgaacagcgccagcagcagcgggctctggatgatgtccttcatggttgccataaaatgtcctccaactaaatacagaataaacgaaaaaaggcgggtgttttcggccagccgtccttgtgatacggacaggataccggaaaagacggcatctgtcaaatgagtatgactaaagcacaaacggcattttagggatatttcaggaacaggatcctgcaaagaacctttactgcattaaaataataaagcgctgaccgcgagtcactttgtatccgttaaaaattgcataaaatttaaagaaaaaatctgtcgttctgccaaaagcagtggggatacacctttgcaaaagccgtgagacctgttataatacagacatattcatatcgagagaataggtttatcggcggcaatgaggccaaagaggaaaccggcatcgtattttgagggaaagaccaatggaacatgtaaccgaacaacaactgacaaggcggcagagcaccgtatggcgggcactgcgcgccgccgcaccgcagaccatcccggtgctggcgggctattttgtgctggggatgggctatggcatttatgtgcagtcgctgggcctgccggtgtggatgcccatgctcatgggcacggtggtctacggcggttcgctggaatttgtgctggcaagcctgctgctgagcgcgttctcacccctttcggcgtttctgatggcgctcatgatccaggcgcggcatttgttctacggccttgccatgctggagcgctacaagggctacggcctgcgcagcttttatatgatctttgccatgagcgatgagaccttttccatcacctgttcggccgagccgccggaaggggtggacaggggctggttcatgttcttcatcaccctgctggatcagtgctactgggtggccagtgccggtcttggcgcggtggtgggctcggtgctgcccttcagcaccgagggtgtggactttgtgatgaccgccatgttcacggtgatctttctcaaccagtgggaaaaggaccggcagcactacagcgccctgatcggccttgccgccccattggcgtgtctggtgttttttggatccggcagctttttgctgccctccatgggatgcatcctgatcctgctgctggccctgcgtaaaccgatcgaaaaggccgaaggcactgaagcagaaaaaagcggcgaggaggtgggcgcatgaccgcagtccagatgggcctgaccattgcagtgtgcaccgccgccaccatgctcacccgctttctgccctttgtggtgttctcttccaaggatcagcagccgccggaggtggtgcggtatctgggccgggtgctgcctgccgccatctttggtatgctgatcgtctactgcctgaaaagcgtcaccccctttgcgggcagccgcggcattccggaggccatcgccctgctggtgacggtgggcctgcacaagtggaagcatgagaccctgctcagtgtcgcgggcggtacgctgtgctatgtgctgctggtgcagctggtgttctgaaagaaaaaaggacacggcattgccgtgtcctttttgcatagctgatttaatggtagaaggtgtcaaagttcacctgacggtagaagcgctgctgcagctggtcaaagctttcgcagttctgcgccagcagccacatacttttggtcactacggcctcgatggtcatatcgtgggcttccagaaagcggaagcggttcttcacccgcttgcccacctcgtaaacgcccacgtcgctgccctcgtaggtgacctgcgtggtcatgatgagcaccttatgggtggtctcgtagttgcccaggccttcggcaaaggcatccatcagctgctgcggaatgccgcccacgccgaagctttccacgataacgcagtcgtacaggcggaagatctccgggatgagcgccggggacatgcccggggtcagcttgagcaggaacaccttcgggtccagcacacggctgaactccaccgggccggtgggccatggcgaggggatgtaccgcaccagccggtcaccctgcaccagcgccagctccgggaagttgactgaggcaaaggcgtcgtagctgatggtcttgttcttcttggcacgagtgcccgcaatgacgtgcccgccaaacaccaccattacgccccggctgcccgggtcgatggcgcagaccacgctgtcccgcaggtttttcttggcatccgtgatctcgttggagatgggctgctgtgcgccggtgaggatgatgggcttgtccgcgttctgaatcaggtaggagagcgccgccgcagagtacgccagcgtatccgtgccgtggcagatgataaagccgtcgtacaaagcgtagttttcctgaatggcgcgtgccatcatcagccagtgctcctgcccaaggtcggtgctgtcaatgctgcacagcgccagcgttttcgggcagcacagttctttcaattccggcagatgggcaagcagctcctcgctggtaagcacgggttttaacccctgctgggtgcgtacgctggcaatggtgccgccggtggtaatgaaaaggatacgttgcttggtcataaaataagcctccgtggcagaaaattcagatgactgaaacagtataacatactcttttccgcttgaaaagcggccagccgccgcaaagcgcaatttttgcgacccggtcacagaagtttgggggaatttggtgtatactaaagaaaatgataaaaggagaatgttatgcccaagattgtgattatcggttccggcccggcaggcatttccgctgctctgtacgctgtccgcgccggtgtggataccacggtgctcaccaaaggccccggtgcgctggaccgcgccgaaaaaattgaaaactattacggctttgccgagccggtctctggtgcggaactggaacgccgcagcatcgagaatgcaaagcgccttggtgtgagattcgtcacagccgaagccgtgggcctgacctatacggataaactcaccgtagaaacagtggataaaaattacccggcggacgctgtgatccttgccacgggtgcatcccgggcggtgccgcgcattccgggccttgccgggctggaggggcacggcgtgagctattgtgccgcctgcgacgcctttttctaccgtggaaaggacgtggcggtgctgggcagcggcgagtatgccctgcacgaggtgcaggctctgctgccggtggcaaaaagcgttgccctgctgaccaacggcgcaccgctgacggcggacttcccgccagaggtcacagtctatccgcaggcggtggaggctgttctgggcgaaaccgttgtcaccggcgtgcagctgtcaggcggtgtgcagctgcctgtcagcggtgtatttgtggcactgggcgtggcgggcagcaccgcactggctaggaagatcggcgcagaggtggacgggaaccgcatcgtggtggacgaaaaaatgcagaccaccgtgcccggcctgtatgcggcgggcgactgcaccggcggccttctgcaggtggcaaaggccgtgtatgagggcgcgcaggcgggcactgaagccgccaaggccctgcggaaaggatgaaaagcaatgtcggaaacaacaaaggaacaccgcgattgtctggccaaaggttttcccttctggaacgacctgacacccgacgaacaggacatgctctgccgctacacccggccggtgcactacgcaaagggggcaagggtgcacagcccgctggaaagctgcgtgggcatcctgctgctgcgctcgggccagctgcgggcctacctgctctcggaggacgggcgggacgtgacgctctaccgcctgttcggcggggaggtgtgcatcctgtcggcctcctgcgtgatggactcggtgaacatcgacctgtatattgatgccgaagaggacaccgaggcctactgcatcagcgcgggcgttttccgcaggctgatgcagcagaacgtgcatgtgcgctgctacgcctatcagatgacggcggagcgcttttccgacagcatgtggaccatgcagcaggtgctgttcatgagcgcagaccgcaggcttgccatttttcttaccgatgagctggccaagaccggcggcgacgaggtgcgcatgacccacgaccagatggcaaaatacatggggtctgcccgcgaggtggtgagccggatgctgaaatactttgcgcaggagggctgggtgcggctgttccggggcggcgtgcaggtgctggacaggaaaaagctgcagcagctggcaagaggagaataacaaaaaaggggcgatgtgaacatcacatcgtccctttttgggtcataggttatcctttgcagccctgttcttcccagtcgccgaagtcgctggcttcggcgatcttggtggggtcgaattttccgctctcgtctttgggagcaacggcggggcctgcttccacagggttctggttgggagcttccgggtcgaacaccggcttctcaccgccctccgcgggtgccgccggggcagaggcttcttcggcgggctgggcagcagctgccgcttcttcggcaggagcttccggcgcagcttcttctgcagccttttcgttggcagcatcggaggctttggtttccgcttcggcgtaggcttcggcagtcttggcggcttcctcagcgttctgctcggcgtcctccgggaactctacttcctccacatggagcgggtctttctggttcagaatcttgtccagtgccacaatggcagcaccggtaacggccacagcagcggccgtgccaaggatacgaaacagtgttttcatgccgggacctccttgaaagatcagatcaagagaatgttaccacatcgttcagcggcttttcggcaggctccaccgaaatggcggtgagcaccgggcctttgccgcggtagatgttatggaacttgtagcctacctttgcggtcacccgcacccatgcgcgctgctccagcgccttgtagccatcgtagctgcaggggaagccaacgaactggatgtcctgcacgcagcaggtcatggcgaaacggcccggcacgaagctgttcttgccggcacggttggtctgacacacctgtgcaaggaatttgaccgttttgccggtatacttctgaggctcgtcctgacagtccatgtaccagataccgaaatcgtcatccggaatgtcgatgatgtccgcgttgatgtcaaagggcagcggatcagggatatcgtcgtaggccacgctgccgtcggcaaactcgtaggcgatgtcgcacttgcgggaagcctgacgcaccagcttgtgcagctcctgacgggcggcatcgttgttcacggcctcggcgcggttgaacacgatcagctcactgcgggcgatcttgtccagcagcaggctgcgcatggagttgtcgcgagcgtaggtcagggcggtggtgccgtcggcggtggcgatgcactggtacacgatccagctctcgggcagagcctcggccagatcctgcagcagccacatgccgttgtactcaatgaccacgcggcctgcgccggattccttttccagcttgagcaggttctgcgggttcagctcggccttgtcctccagcaccttgacggtcacaccgggaaaggcgaacttcttctcgttgtactcctcttcgccctcctcgcagatcagcagaagggtcttgtcgccggagtcaaagttggggtcttcaaaggtctcctgaatgaatttggtcttgccgctttccagaaagcccacaaacaggtagaccggaatttcttttgccataggaatggtttctcctttttactttaagctcagcagccgaacagctctgcaatggccttttcgttcagcttggagccgatcacgaccagcttgccgcccacatctgcaccgcgggcacgcacttcccattcgccgggcacatagtcgaactccagccagccgtctgcgccgccgttcacgatgcccttgctgcgcaggatcatgccgtaattgccggtatccagctcggtgagggcgtgctccacttctgccttggtgaacttgcgggccgtctcgacgccccagctggtgaatacctcgtcggcatcgtggtcatgatgatggtggtgatggccgcagcagcagtggccgtcatggtcgtgatgatgctcgtgctcgtcgtcatcatcgtcatcatcgtggtcgtgatggtggccgcagcagcaatggtcgtggtcgtcatgatcgtggtgatggtgctcatgctcatcgtggtcatcatcttcatcgtgatcgtggtgatgctcgtgctcatcctcgtcgtcatcatcgtggtcgtgatgatggccgcagctgcacacaccgttctcgtcatagtggtgatgatggtggtgatgctcttcttcctcgtcctcgtgggagtgctcctcattggcctttgcagccatggcgatcagctctgccttgaagtcgtccttggtggacatggccttcaggatctgctcaccggtcagctcgtcccatgcggtggtcacgatggtagcggtggggttcttctcgcgcagcagggcgaccgcagcggcgatcttctcctcgctggcggtctgggtgcggctgagcaggatgcagcttgcgtggctgatctggtcgtcgtagaactcgccgaagttcttcatatacatcttgaccttgttcacgtcggccacggtgacaaagctgttcagctgcacatccagatgctcggccacgccttccacagcgcgggtcacatcggagagcttgcccacgccggagggctcgatgacgatgcggtcggggtggtactgctccaccacctgctgcagggcggtgcggaagtcgcccaccagagagcagcagatgcagccggcgttcagctcgttgatctggatgccgctttccttcagaaagccgccgtcaatgccgatctcgccgaactcgttctcgatcagcaccacctgctggccggcaaaggcctctttgatgagctttttgatcagggtagttttaccggcaccaaggaagccggagaaaatatcgattttggtcatgattcaattgcctctttctttgaatagcacacagagccgcagagtgctggctcaaaaatcttacactcctattataacaaggctgtcaatgggaaaacggcctttttcaagaaaaaattgtaactttttttgcaagaaagttgcgttttcggggaaaaggcgaaaaatgttctcttcttcagcgggctcgccctctccgtcacctacggtgacacctctcccaaagggagaggccttggcataatgatatactttgcatggactgccaaaggctcccactttgggggagctgtcgagcgaatgcgagactgagagggcgaggatgctccccggcaagcggaggtcattccaaaccgtcccgcccctgcattgcaatctttttcccggaatgatacaataaggccaaacagaaatgcaccgctgccgggctttccggtgagagaaaaggaagcaaatcatatgagcatgaataccgttccagagcgccttgccgctctgcgtgccgccatggctgcaaacggcgtggccgtttatctgatccctgtgggtgatccccacgccagcgaatacctgccctgccattacaccagcctgacctggttctccgggttccacggcgagaactccaacttcgtggtcacccgcaccgagagcgccctgtgggccgacggccgttattttgtgcaggccgagaaggaaattgcgggtaccgagatcaagctgcagcgcatgggggaacccggcgtgcccaccgtggaggagtactgcgcaaatgccctgaatgagggcgaagcactgggcctgtgcggcctgaccgccagcacggccctcgtgaacgacctgaaaaaggcactggaaaagaagggcgctttcatcaagaccctgaaccttgaggacgagctgtggacggagggccgccctgccctgccggataccccagcgtggatcctgccgaaggaatatgcgggcttctccccggcggaaaagctggatcagctgcgcagcaagctcaaggagctgggctgcaccgctcagtttgtgggcaagctggataatctggcatggcttttgaacctgcgcgccatggacattgagtgcactccctatgccatggcctactgctatgtgacccccagccgcgcggtactcttcatcaacacggcccgcgtcaccccggaggcaaaggcagagctggaagccaacggcatcacgctggcggagtacgacgatgtgctgaagttcctcgctgctgagacggaaccccagaccgtgctggccgagtgcgccacggtgaactacgccgtgtatcaggtgctggagcagaaccctgccctcaccgtgaaggacggcaccgacccgctgctgatgatgaagggcgtgaagaacgaaacggagcttgcccacacaaagcaggcccatatccgggacgctgtggccatggtgcggttccagatcgagctggaaagccgccttgctgccggtgagaccctgaccgagctgacggtggatgaaattctgcacaagtaccgcagtgcggacgataaattccttgtggaaagctttggcaccattgcggcctacggcggcaacgcagccatgatgcactaccacgccaccccggaagatcacgctgtgctggaaaagaagggctttctgctggtggacagcggtgccacctacatggacggcaccaccgacatcacccgcacctacccgcttggcccgctgaccgaggacgaaaagcgcttctacacatggaccctgcagagccacatcgaccttgccagggccgtctggctggattactgcgagtgtaagatgatcgataccatcgcccgggagccgctgtggcggcacctcatcaactaccgctgcggcaccggtcacagcgtcagctttgtgggcaacgtgcacgaaggcccccacagcctgcgcggcaccaactccgtgctcatgcgcccgggcatggtggtcactgacgagccgggcgtttacgagaccgacctcgtgggcatccgcatcgagaacgagctggtgtgcgtgcacaaggccgataaccagtacggtaccttccttggttttgaaccgctgatgttcgtgcccattgccacctctcccatcctgcccggtgtgctggataaggacgagatcgcatggctgaacgattaccaccgtcaggtgtttgcaaagctggcaccgcacctgaacgacgaagagcgcagctggctggcggagaagtgtgccgccatcggctgctgagaaagcgcaaaaaacacccggagccgtgcaggagccagagcggctctcggcggcagccgggtgctttttatagggtcacagcttgcagcagtgcgtctgtggggtgtccagcggcggaagagtgaactcgttttcgccaaagggcgaacgcaggatggcggcccgggtctccgggtagatgccaagttcggtgtagatgtcccggtacaggagcatcacccgccgccgcagcgaaaggatgtcggcggtggtcactctggagtgggagacgctctggccgttctgcaggtagtaatagccgatgtccgggatggaaacggcggtgcgcacatagcgcagatattcggtgttgaacagctgatcctccgcaaacaattctttgcggaaatgaaggctgtgcttccgcaggaggtcacggcggtagagcttgttgcaggggctgccatagtagaaggtgttcggcttctggatcagatgctttgcgtactcctgtccggtgtataccccggcaggcagatagccataggcccgggtgcggggcggattgcgctggagcacatgctgcagcgccttttcccatgggcggatgtgctccacatagttttccgggtacaccatccagaagggcgcgatcacaagatcggcggtgtgggcctcggcggcggagaccagcttttccgtaaaatcgggggccagccagtcgtcgctgtccacaaactggatgtatttgccgtgggccagcgcaatgccctgattgcgggtgtccgctgcgccggtgttggttttatccaccagtgcaatgcggtggtcgctggcggcaagggcgcggcaaacggcaagggtgtcgtcggtggagccatcgttcagcagcaggatctcaatgcttttataagtctgggcgcagatgcttttgacacagcgggcaatgcacccggcagtgttgtacatgggcacgatgatgcttacaaggggaaattccataggttctccttttctcagatgcggctgtgggtgcgggcaaatgcgtcggaaagcttctgcaccgggccgttgggcagagggctttcaaacaggctcagatagatgccgtgcagccgcaggcggaatttatcgtacacgcccagctggatgcacagttccttgtaggtgtggtacatccggctgcggtggcgcagcatgtccgccgcgctcacctgcgtatggcatacgctctgcgggttctggatgtagcagtaggcggcttcgtcgatggcggcaaaccgctgtgccacctgcagataccgggtgttgaacagctggtcctcggcgtataccacatgctcgaaccggatgtgcgccatctggatgagatcccggcggtagagcttgttccagagcacgccgtagtaaaaggcagcggcattgccggtgagctgccacaggtaatccaccttgttgtacaccccggcgggcagcaggctgtactcccgggtgtcatagccgccatccttgcggggcaccatcatccggtagggagctagcacaaggtcggcatggctgcgctgcatagcagccaccaggtttgcggtgcagcccggcagcaggtgatcgtcgctgtccgcaaactggatgtattcgccgtgggcaagggcaaggccgcagctgcgggtgtctgctgcgccggtgttgggcttgtccaccacacggatgcggctgtcggcggcagcaagcttccggcagacagcaagggtgtcgtcggtggagccgtcgttcagcagaagaatctcaagctccgggtagctctgggatgtgatgctctccacacagcgggagatgaagcccgccgcgttataggcgggcacaataacgctgacaagcggctgcggcatggcgggtccctccgttttttcttttttcgatgcagcaaagttttatttatcatactccagccctgcgcaaaaatcaaggcgggcggctggcggaaaggagaatgtgagatggtatttcacattgcggtatgcagcccggacgcagccttgcgcagcgggctggaacgccagtgcatggaatattttgcccggcggcaggatgcgtgcatcgtgcagcagctgccggatgcagatgcgctgctgcgccgggacaccgagggagaacggtttgacctgtatctcatcgagctgggcgctgtagcggccccggcagggctttcggcggctgcggagctgcgccgccggggccgcagggctccgctggcctttgcggcccgcacaccggcccacgcctacagtgctttccgggtggatgccatgcagtatctgcttctgccggtgcaccagcaggagctttcggccctgcttgcccgcgccaccgagccggagtacggcccggcaatgaccgttgccaccgccgaaggcctgcgggcgctggcctatgcgcagatcgaatatctggagtgcacccaccatgtggtgcacttccatctgctcagcggcgaggatgtggtgtccctttcgctgcgggtgtcctttgccgaggtagcaaagccgctgctggaagacgggcgttttttgcagccgcaccgctcctatgtggtcaatctggcggcggcacagctgctgacggcgggcgagctgcagatgtgcagcggtgcgcgcatccccatcccgcgcggacgggagggtgcagtgcgcgaagccttccgcagctggatcgaccggtaaaatggcaaacaaaaaagagccgctttcacggctctttttttcgtgcctggagatcaggcatcgggttcggttttgtgtttcttttccttgtcggaagcatccagaacaccaaagccccagtggttggccatgtccatgatgatcttctggggagaaccggagggataggcgttctcggagaacgcggtcaggaatttatacagctgcggctgcacctgatcgtacaggcccagctttgtgtacagctccttgtaatagcggaacacctgcagtttgttctgcacgatggaagccagattgatctgggtgtggcagatgctctgggggttctgcacatagtggtagcccgctttggaaatggatacgaaaacattggcgtacaaaatgtattccaggttgaaaaccaggtcttcggcccagcgcacctcgctggtgaactgaagatgatggtctgccagaatatcccggcggtagagcttgttccacagcacgctgtagaagaaggatgcgggcttctccatcaggcgcagggcaaaggtatcgcggtcgtagatgccctcgggcaggaagccgtattcacggatatcatcaggctttttctcggcatcgatgccaaggttctcctgcaggttttccagtgcctgcgtggccttggaagagttggcgggaatcaccatccagtaaggtgcaatgaccagatcggcgttgttcgcttcggcggcagtcaccagccgctcggtaaaatcagggtcgagataatcgtcgctgtccacaaactgcacatacttgccccttgcaagggacatgccgcagttgcgggtctccgacacaccggaattggatttgtccaccagaacgatgcgggggtccttttcacggaattgctcacagatggaaaagctttcgtcccgggacccgtcgttgaccagaatgacctcgatatccttccatgtctgggcacaaatgctctccagacagcgggcaacactattctgcacgttgtacacaggcacgataatgctgacgagtgggttgttcatgacggaaggtctcctctttacggatattatacctttatattaaaaatcacagagtgtattctcacaaatgaggacacttcccccttgggggcagtcctatttataatatcatactcttcttgcgcacaaaatgcaagagcaaagaaggatcagataaagaaaagaaccgcacgctgcggcccttttttcttacacacgtgtccagtccagcgcatcccaccggggcacgaactggctgcagatgcggcgcatctccggctcgtcggcggcagaggtgcggtctgcgatgccaatgacgtaatacccggccttgtgggcggtggcggcggcgtatacggcatcctcgcacacggcgcaggcggcggggtctgcaccgcccagacggctcatgcactcaaagaacacctccgggtggcttttgtgcagcacgccccgcgcttccacgatgaaggagaaatactgcgcgatgcccagccgggtaagcacggtgcggcactgttcggcccaggtgttggagcagatgcacatgcgtgcgccctcggcctgcagctttgccagcatcgtgcgcacgccgggtttcagctccacggtctcgtacaattcggcgatcacctcgcgcatcacagaaaaatagctttcctcggtcagcggcaggccgtactcccggatcagatactgtgcgccctcctgcattcccatgttcagcagtgtggcgcgcagatccccccgcggggtgcggccatagcggcgcagcagtgcgtcgggggcaccctcccacaccacggtcatgctgtcggtcagggtgccgtccatatcaaagatccattgcttgcagtgcatgagaatgcctccttttgagatcctgacaagtataccatgtttctttgccgggagaaaggcatcaatttacaaaaaacggaagaaatttctctggaaatatgctataatctgaacaaaaccggaaacgatcaaaggaggcggatgcaatggatgaacgcagtgctccgtgcaaagctctggtgctggcgggcggcggagccaggggcagctatcaggtgggtgtgtggcgcgcgctgatggagctggactggcacccgcagatcattaccggcaccagcgttggcagcctgaacggtgccatgttcgtgctggaccagtacgagacggcccgcgatatgtggctggccatccgcagcaaggatgtgatggagctgccggaggaggatgccgacctttcggccctgcaccagttcctgcgcagcgtggtgaaagccggcggcatggatgtgaccccgctggaagagatcgtggagcgggtactggacgaggatgccctgcgcgcggctcccatccgcttcggccttgtcacggtggagcagcggggcttaaagccccgggagctgacgctggacgagatcccggcaggaaaggtcaaggactacctgatggcctccgctgcctgcttcccggcgctgcgtgcgcgggagatcgacggggtcaagtttctggatggcggctacagcgacaacatgcccaccggtcttgccaaacgcatgggcgcggatgaactggtgtgcgtcgatctggaaggcgtgggcatcacccgccccaacctcaccggcctgcccaccgtgatggtgcgcagctactgggagctgggcgatatcctgcactttgaccccgacaccgcccgccgcaacatcgagctgggctactatgatacccgccgcgctatgggatatctgcgggggtgtgcctatgctgtctcctgtgatgcccagagctgcgcggacgctgctgcgttccacgcaaaatttgagcgggtgcaaaaggccgtgcgggagaaatacccggtcaccctgacggcggatgcggccctgctgctggccaagatgaaggatgccgaccttgccccgctggaagccgccgcggaagatgccggtgtggacccggcccattactacaccacccatactttgtgcgatgcattccttgcaaagtgcgatcaggcacggatgcagagctttgcaccgctgtttgagggcagtgctgatgcggcgcgggccgcactggccgcgctgctgcccaatacctttttgcaggcgctggtctggcgcaccctgaccacgccggaagccgagcttttgccggaggtgaccgaacatgaaagtgtataaaggttcctgcgcttctcccggccttgtgctggggcaggtgagccgtctggagcaccatgtggagaccacgaccgtgggcccctttaaaccgtcccgggagctgcagctgctcaccgatgccatccgcacggcgcaggacgagctggaatccatggcagaccgtgccgcacccagcgaacaggccatcttccagttccagagcatgatgctggacgacgagggcatgatgaacgaggtgcgcttctgcatcaatgcaggcattggtgcggcagcggccatgaatcaggtgggccagcgctacgccgaccagctggccaacatgaaggataacccctacatgcagctgcgcagtgtggatatcctcgacgcaagccgccgggtcatcaacatcatcaccaaccgcccccgcatgtggctggcgctggatcacccggtgatccttgcggcagagcggctgatgcccaccgacctgttcagcgtgccctccggcatgattttaggcatcatcacggcagagggcagcggccagagccacgcggccatcattgcccgggcaatgaatatcccgggcatcgtgcaggtgggccgggattttctggacgactgcgacggccgcaccgtgattctggacgccaccgggggccagtgcacgctggacccggacgctgccgcccgccagcaggccgagacccgcatctgcgagctgcagcgggagaacgaagagatggggcagctgcatgctctgcccaacaggacaaaggacggccagccctttgagctgctggccaactgctttgggccggaggacatcgacacggccatgcagtccggcgcacagggcgtgggcctgctgcgcaccggctacatgatgctgccgggccgcatcctcgatgagcaggaacagtatttcttctactgctcctgtcttgctgccgccaagggctgcccggtaacggtgcgcaccttcgactttggctcagaccgcaccatttccgacgcctatcagggcctgcagtcttccaagcttggcctgcggggcatccgcaacagtctgcgccagccccaccagttcgagacgcagctctgtgcgctgctgcgcgcagcggcccgcggcccgctgcgggtgatgttccccatggtgacgaatgtggaggactgggacgcagccatgcgtgtggtggagcgctgccgcgaacacctgcgggagcgcggcgtggcgttcaacgaagatacaaagttcggcgtgatgctcagcgtacccgctgcctgcctgaccgctgaggaatttgtagagcacggggtcgattttcttgtggtcggcaccaacgacctgacccagtatacccacgcggcagaccgggagcttgccagcgccgagcactactaccgcccggccagcaaggccatgaaaaagctcatcactatggtgatggatgccgcaaaggttcgcaatgtgccggtgaccatctgcggccttgcggtgggcaacccggccaacacggtgcagtatctgcagctgggcctgcgcagcttctcggtgagcccgcagaaccttttgaacgtgaagaaagctctgctggagctctgacgctccaaaccatttttggcacagcagcccggaacgatctgtgggtcgttccgggctgttttttctgcggctgcgaaagcattctctcttccatttttttacagaacgcacgaaaaaatgggggggtccaaaaggttcgtacagaatgaagattgcgccttgctgcagaaatgctatactttaaatgtttaaaacgtgcgggcaggcgaaaaaagcctgcatgcacgaaaaaaacgagagaggagttatctttatgaagaagtttggcacacggctcatcagtgcggtacttgcaggctgcatgatgacctctgtccttcccgtgagcgcatttgctctggagggaagtacagaatttgaaggcaatgtgagcgcacaggaaaattccgatgcgcctgcagagccctccggagaggtggcagcggcctgccccctgaccggcggcgagaccatcaacaagaagttcattgaagagcatggcggcagcaaggtttattccataagcggtacctatacagaggggatcgtgatcgacgctgaggacgaggatgtggtcatcaacgtcaccggagaaacgacctttgataagggtgggcacagtcacaataacgactatgcgacctttattacagtctgcagagccaatagcgtgaccgtcaacgctgaggggcagaccatcacgacggcagagggcctcgcctacagccgttgcttctatgccgcagacaccttcacgggcaccgcagtgcttaacggcggcaactataactggcagtgtgacgacatctccgcatgctatctgctcggcggcaactggacgtttgacgatctcaccctgaaaaccttccggtgtgctattgaaacagataagggagccaatgtgggagccaatgtgaccgtcaatggcggcacctacgactgccacgatagcttcagcgcgacgtttttgatccagaattcccccaactcgtccttcaatggtgtgacagcctccggcgcgggctgggtcctgagcaccaacaacagttgggtcgatgtcgtcggcggctcttactcccgcaataaggccaaggattacccagaccgtccgacgctgcgcgccgccaaaggtgcaacgctgaacgtcacaaatgctgatgtcaccggaacctactgcgatgtgtttgtgcttagtgccaccgccaaccttttcggcggtacttataccaacaccaacgagtatcttgattcttactgcacgtcccctgcactgaaggtatgggaaaacggcacattgagcgtcaatggtgccactgtggagtgcaggggcggcaatgctgccatttcttcgggcgaaccggcagggtcgaagcactgttatgatcagtatgacaatggcggcaagctggtcgttgagaactgcacgatcaaaaacagcaaatacggcatttatctcggtccggacagcagcacctccgcagagctgaagagcgccacgtttgagaataacgagagcgatatttacctcgagtccgacaaggagatcaccatcagcgatacctttaccacccccgccaccatcaaggttgccgacccgaaagaaggccgtcagctcacggtcgcaggcaatgcaaacaagctgaaccttgtgggccagaatgactaccgcgtggcgtatgacaaggcacagcactattattacctgaccaacctggaacccggctacaccctgacccccgagggtgccacggcaacgatcaagaacggggacgatgtcatcgagcttacccccaatgacgagatcgccaaaggcaccccgatcaccctgaccgcgcatgacggcgatggactggagttcgcaggctggaccgtgaccgtgaacggcgttgtacagagtgacccgcatgactcgctccccaattggaaggagaaccagaccacggcgacctttgatatgcccgcaggtgacgtgacggtcagagccgagtacaacatcgtggaccccgtggagccccccggtagacccggtagccccggtagacccggtggaccccgtcctgcccggtgttatcatcggcggcgctgtaatcctgggtgcctatgagaccggcaccggcatctaccgtctgatgaacatgcagggccttcctctgccttccaaccgcatcgaactggcagagctggtctgggagcgtgcaggcaagccggagccgcagaacatgaccgatgaggacctgtatgcggacattgacgccgacgataccgatgcccagaaggctgcacactggatggtggagcaggagctgatgaagttcgacgaggacaacaacaagttccatccgtgcttcccggtcagcaagctgcgcgtctgccttacctggcagaatgcaaaggacaagggtctcattgactgatctgccctgcatctgcacagcggaacaataaaaaaacaaggggccgctcccgaaaaggagcggccccttgttgctgtccggaaggcccgcaggcgctgccgggcagcacaaagcattattccagattccccgtcagggtcatcacagcggacagcaccgccagcggggcggtctcgcaccgcaggatgcgggggccaaggcccaccgttctggcaccggcctttgcggccatctcggcttcctcggcggcaaagccgccctcggcaccagtcacgatggcgattttcagcttttcaccatcggcgggctttgctgcggccagcaggtcgcgcaggggcgcgccgccgcactcgtagcagaacagcacaaggtcgtactgtgcaaaggtgcggcacacggcaccaaagtttgccagcggcagggccacatccggcagaacaccgcggccgcactgcttggcggcttccaccgcaatgcggttgtagcgctcgttcttctgctcctcttttttgggcgcggccacgcagtaccggctgaagaagggcacgatgtgggctgcgcccagctccacgccgtgcttgatgatctgctccagcttgtcctgcttggggtagccggccagcagagtgacctccacgctgggttcggcggcgctgggatagcccggctccacccggaactccacacactcatcgccaaagccggtgatggtggcggtgtattccacggcgttgccgtcgcatagaatgacagtatcgcccagccttgcgcgcatcacgcgggcaagatggtgggcatcggccccgcgcagggtggcggtgccgtcagagatctcggtggtaaaataacggtgcggcataaaatctccttacgctttcttgcagacgatgcactcccagccgcgcttctccttcacttccacaacggcaaggccggccttttccagcccggcgatcacttcatccttgcggctgtcgatgatgccgctggcaataaaggtggcaccctctgccatcaggccgggcacagccggtgccagactgagaatggcgttggccacgatgttggcggtgatgatgtcgtatttgccgctggccttatcggaaaggtcgcccaccagcacggtcagcttgtcctgcacaccgttcaacgcggcgttctcgcctgcggtgcgcacggccacagggtcgatgtccacgccctcggccacagcagcgcccagcttcagcgccgcaatggcaaggatgccgctgccggtgccgatgtccagcacccgctcgccgccggtcacccgctcgtccagcgcttccatgcacaggctggtggtctcgtggccgccggtgccgaaggcaaggcccgggtcaaggatcagcttcacccggtcagtgtcgtactgctgccacgagggcaccacggccagccgtttgccgatttccagggggtgataatacttgcgccagccgttctgccagtcctcctgctccacgccctcggtctctacggtgtaggcgatgtttgcagcttccatgcgggcggcaatgagggccagcgtttccacgggggaagcgcccggctccagatacatatggatgataacggtatcgcggggcttgtccagcagctcctgctcgatcagatccacatgggcgatctcggccacctgctgctcgatgtcgctataatcctcgatatagatgccgccttcggcgatcatggtggcaacggcctcggcgttgtcggcatcggccttggccacggtcaggcggatatcagtccattccataatgctgtctccttttattttgcatcctcgccctctccgtcattgcttgcgcaatgccacctcccccaaagtgggaggctttggcagtccatgcaaagtttgcggttttgccaagggctctccctttgggagagctggacgcgaagcggcctgagagggcgcatgttctttataatagtatagtacccgattcggctgtgggatgcaagcctttgggcaaaatgtacgtaaaaagaaaagaattttcaacacaaagacgacccttgtgcggaaaaactaaaaattatcgactgaaaaactgccaaatgaggacttttgatgcattttgatagaaaaaaggcgaaagggactttctttttttgcggaaatatgttactattctattacggaattatggacggcctgcaaccagaggcgtctgtaaacacaaacatttcttaaggaggaatgtgctttatgatgaagtatctccagaaactgggcaaagctttgatgcttcccgtcgcggtcctgccgatctgcggcatcctgatgggtcttggttatgccctcgctccgggcgttatgggcgttcccggtgctgcaacctccggtgcagcttacaccgttggcttcctgctggtcaaggcaggcggcgctctgatcgataacatggcatggctgtttgccattggtgccgctgtcggccttgcagacaacgacggcaccgcaggtctggccggtctggtcagcttcctgatgatgcagcagctgctgaaccccggtgtggtcggcatggtccgtcacctggaagaaggcactgctacctacatcgccttccagaaggtcgccggcaactccttcatcggcattctggccgctgttgtgggcgctgcctgctacaacaagttcaaggatatccagctgcctgactggctggcattcttctccggcaagcgcttcgttgcaatcgctaccggtctgatctccattctggtgtccgttgttctgctgttcgtctggcccgtcatcttcgacgctctggtcgcaatcggcaacggcatcgctggcatgggcggcatcggcgccggcatctacgccttcctgaaccgtctgctcatccccaccggtctgcaccacgctctgaacaacgtgttctggttcgacaccatcggtctgggcgacctgagccacttctgggctggcgagacctctgctgatgtgggctggagccttggtatgtacatgtccggcttcttcccctgcatgatgttcggtgtcctgggcgctgctctggctatggtcaagaccgctaagaacaagaaggctgccatcggcctggttctgtccgctgccatctgcgccttcgtctgcggcgttaccgagcccttcgagttcggcttcatgttcctgtgcttccccctgtacgttgtgtacgctgctctgtacggcatctttaccgtcatcacctactactccggtttccgtgccggcttctgcttctccgcaggtgccaccgacctggtgttctccgcttccctgcccgcagctgccaagacttggatgatcattcctctgggcatcgcagctttcgtggtgttctacgcagtgttctactttgccatcaccaagttcgacctgaagacccccggccgtgaggacgaggacgaagaggccgagaagaaggtcgttctggcaaacaacaactataccgaagtcgcttccgctgttctggctgctgtcggcggcaaggagaacgtgaaggaagttggttactgcgcaacccgtctgcgctttgaggtcaaggataacgccaaggtggacgagaaggctgtcaaggccgctggtgctgccggtgtcatccgccccagcaagaacgcttgccaggtgatcatcggcaccaaggttcagttcgtgtacgacgagctgaagaagatgctgtaacgcacacagcattctgaacggagtttgtgcgggagactggttgctcctgcattcccataaaagccgccgggagcagggcagaacctgccgctcccggcggctttttgcgttcccgcgcggagtgtgctatactggt

SEQ ID NO: 770 - DNA, 41720 bp, unidentified
  source 1..41720: mol_type = unassigned DNA
cgaaaagcgtccaaatgcgtcgtaaagtgccgaaacatgtcgcaaatgtacggcggtggcgtacaccagcggggatgtgatgggggataggagtacggcaactgggcgttgatactatggggatacagtctacgaaggtgttggttttgggatggggctgtagcgagggattttcatgacatcgcgcaagctgtaacaaacaacttcacgcgctacagttctttttccatcaacccgcatcaatttgatgctagttgaaagtggatcaagacagttcggcgcatgttttccgacctcagtcctcagattgaggaccgagcttaatggttcaagacgtgatttgttggcgctgatggaatcgccgtatgagaccctatagatggatgtccagaatgtcacccgtagctcaaagtgggtgtgcgtaaaattacgctctgacctccatgctttccaagggtcgcaaatcacgacgcaaatggatatgctcaaaagtggtgaaaataataatcgagccgcaaatccgccgggactgaacaaccatgcttgtgatgctgatgtcttttgtccgcataaaggtactgttgacacaattaaaggttcacctgtaacccataggaatagattgaaatagacagagtggcatgatataatatcaccagaaggaaggtgttttgatgctttatccttttatgactttgaacgatggtacggaaattgtctattcgtccccgattcagaacggcgatcaggaacaggtgagggtgcagattgaaacacctgtcgagaacggcttcaagtcggcgacctgtattctgcctggctatctgtggacaaacaacggctattccgaaattgaaatggcaagcctgaaggaattgataaaatctacggcacatctgctgatccgcttttctcgtgaaggaggaatcgagagtgcctagtctgtttcgattgtttggctatgtgattttcttttggagtaatgaaggtgcaccgcttgaacctgtctatgtccatgtcgcaaaaggcgtgcccaatgccagtgctacaaagatttggataacagaagcaggtggatgtattgtcgccaataataactccaaaatcccgacaaaaacgctaaacgcaattgtggacgttctcgaaagccgttccagttatatcatcgcgcaatggaatgacgtgtttggggagtctaaattctactgctgatatactaaaaggagccctgctactcgtgtctgagcggcagagctctgttgctgttataggaaatgatggttggtgtcagcgttcaatgatctcagtggtaaccttcgtttgacccttgccaaaaagtccggcatagccaaaatcagccaattttttgagcttttgagccttttctcgtgtctcacgataatcctcacgaagcagagtatctccattttcgtcatggaatacggttttaaccacgaatttattttcagccataaacttgcccctatcaaacaaacaatgcacaaaggacattagccagtacataaagccacagaccgccagcaatcagaaggcagaatgcttcaccagagcctttcccgcctccgttgctcatcatgttgtacatcatatattggtcaaaacaatcgtgctcacatttacggctcataagtaaatcctcctgttataattgtttagaaccagccacgatgcgctcttctgcaggtgttttctagcatctgctttctagctcgttctccgttaattcctgttacctcatccagaatttcatcatcatacgggattttttgcgcttccagatgagctctaaaccagttgcgatgatgagagtgctgataagggccacccggatattcagaaggccatttattaaggcaatttaatccgccaccatgtaagctcatccattctttgtacacacgctcacgcatttgaagtgtttcgctatccgtgttccagcactgaacacttggtaattgagaagctctctttttgtcactcatactctgcccagcactgaccgcgccagaagctcccagtcccaataaccctaaaacaaacgatactgctccactcataacgattccctcctgattctatgttttttttgactgactgaataatatcacacttgatgtccaactaatcggatttgcaattgcacttttaaagattttctggcttttgtgctgataagtgctcccgaatcatccgttccagtgtcgggcgggtgacgtgaagagtttcggccagttgtcccttatttaattcccggcggatgtatcggtcatatagggcaggaaagttatcgggtatggcgaccttcttacgtcccttataaaccccgttctgcttggcgatagcgattccctcccgctgtctgtccagcagattttgccgctcaaactcattgatggctacacgctactttttaagcacgactacccttgaccagataatccagcgatacctgaaagtagccagccagcagcagaaccgattgaatgtccggtgttcttctgccggtttcccataatctgatagcacgccgggacaggttgagatcatccgccaatcgctgctgtgaaatacccgcttgtatgcgaagggaatagattctatcgttgatggtgtccatgtgaaacctcctgttttacgagtgcactttaaaatccggcactactctcactcgtgccctcgctctctgtcctgctatgatttagtcagccttcacgaacagctccatgcagttcgcacagatgacccgcacttccttggtgctccggatgatggtgccgcacttggggcatacccaccgccgggtgctgctctttgccttgggcggtttcggtgcgccggtctggctgctgccgggtgccttgctgcctgctccggtgcctgccatatccgaccatgccagccgctcgcccatctggatatcttgccagccttggaaaatgatgaagtccagcaactcttcggacgggctcgtgatggtccagccgtacttttcgtggtggtctacgatcaagccgtgtgcctctgcctgctccttaaagcgccggttgtggtagaccccgttgttgctggtgtccttgatgccggtctccatgcagtactcgtgcaccatctcatgcagcagggtggaagcggtctcctcgatgggacggtcgagcgtggcagacgaaatgttgatctcgtacttgttctcgccgcctgcctgccagaccttggaacaggtgatatgaccataggcggacggggtctttttcaggctgatgatgggctcgggcagcttgcctgcaaagtagtgcttgttgagctcacggaacatcttttccagctgaccggcagcgcgggaggttttgacagtctgtttcatgatttttcggacctttctcttgataaaaaaggccgggacaggtataatattggtgtagcccgccccggcgggtgtgttgggctctgtacagcgcaaactttggtcggtgcacgctgtatggggctcttttcaggtgatgctcaggcgggtgccggtgaccgttttgctgtactggtcgtacaggttgggagctacggccttgatggctttgctgtcgagtcgggtgctggagaaatcggacaggcggactttgtggcaaccgacttcgagatagttggtggagcgctctgccagtgcctcgcggatctggatcttcagctgttcctgttcagcctgtgcggcttcaatcagttgggcggcctccttgtactgctcgacaagggtcagtaaaacgttaatgctcatctgcgtgcctcttttgaaatcgttggtgaatggtcggatgtgagaaccggtgttcccgatggcatgagtatacagcacttcgtacgagtatgcaagacggaatattcaccaaagaaaagcacaattatctgtgcaaagtgcatactcgtacgagatggacaaatgacagatgtgtgttataatacctataaaagtcaaaagaaagttggtgcgaggatgggcggaaaaacaagcacagccagcaaacggaaatttaacgataaaacataccagcggattgttcttgacgttcggatggacgccttccccaataaagaggctgttcaggtagcagctcaaaaagcggggcaaagtttgaccgaatacattatggaggcggtgcgccttcgaatggagcagaaaaacaccgcatcagacaccccgggggtagttaaaaatctggtaagggacactgacccggtagaatgagatagttgttccatctccccagccctgattaaaatctagcagcagaaggcctctgcctttcacagaaatgtgatgggcaggggctttttagcgtaaaaaaaaaaaaaatagcctgacccatgcaaaagagcacaaatcaggctgacaatggatatgaaattctaaaattcacttagtaaagagagtacgcgttgcagggaaagccgagcagatcgttcggtgaactattggatctcttgctccagttcatcgaacagcgcacaggaaaagaactgaccaagcgtgatattaagaccatcacagagctttttaatggtggcgatggacacacgctgacgggatgggtcgagcatactatataccgtagatggtgttacaccggcacgggttgctaactcgttggggcgtatcccatgctggttgcagagctgttcaaagcgtttggcaacggcatcttttactgtcatgatgaaattcacctcaataggatggtacagaagttcgtgcagttttgcgtgcgcaactgcgtatatcacgaaagtattttatgctgtagagaatacatggatgcgtaacgacaaagaatatatttagcaaaaagtatcctccacatggaaaatggagggccatggacaaaatatggcgctattctatcagattttgcgccttcctgcccctcatagacacctgatgggagaatatccggttcatctccctgcgctttcgggtcaggtcagagtgcacatagcgctgcaaggtgatgttggcgttggcatgtcccaacaattcgctgagggtctttacatcacaccccgcctgcaaacaggtggtagcaaaggtgtgtcgcagcgcgtgcggacgtacttgccggacggtcgcctgcttcagatacgccttgatgcttttccggtagcagcggggttctgtgggcttggactcgctgccggacaggaaccatgcagcattgctggcttttccgcgcagctttttcagcataataagcagctgattcgggattggaatttcccggcgggaggtgcaggttttgggtgtctggatgaccacctttgtatggccgtttccacaggaaattctgcagaccgtccgattgatgttcagcgtgccgagtttcaggtcaaaatcgccccattgcaagccgcagatctcaccaatacgcaaacctaattcaagtccgaataataagccgattttgcgaggcgtagggttcgcctgtacatattgatgaagtcgctgctgttccgccggggagagaggcgcagaaattttgtcgctggcttttggcaacgcaacttccagctccattggacgaatcagacgtaaatgagcggcatatttgcagatgcggcgcagcatggagagacattcccgggcagaggagtttcccagcggtttgtgtgcggcatctgtgggcgcaacgatctgctgcatggcctgctccagaaagctttcctcaagggatgcaacgggcactttgctcaaaaccggaagaagatacttgtgcagtgtgtacgaataatgcgcataggtggattcttttatactgttccgcagggaatgcagccatacctcggctagtgcttcaaaggtcaggtcagttcgattcaggttgtaaaagcccgcctcggctttcctttgaatcagcacccgtttgacctccacataggccgttccgtaaacgtaaccccattggatcttcccctctggtgtgcgcgccttgatgtacctgccttcccaccgaccgtccttacgcttgcgaatgttttctccccgtcgcgccatcgctgtttcctcctgctgtttagaccctcatctgaccccttattttctccatcttcgtttacagctggaattattatacagaactgggcatggcacaaaaacaatccggccttcgcgatgtttttttagggtcaaatgtgatacatttatgatgatttctattgaatcccagatataaccatgataaaataagatgagactatagacaacgatgtcaaaggaacggtatcctccattttccatgtgaaggatacccctgaattgcggaaaggggtgaacaaggtggcactgcgtctgttcgagcacaacgagaaagcatatcatgcggcagtccggatgatggagcagtatggcaaggccgccattgtccacccgaccggcactggaaagagctacattgcgttcaagctgatcgaagacaacccggagaaggttgtgatctggctttctcccagtgaatatatcttcaagacacagctggagagcctgaaaaggaacgacccggattttccgctggcaaacgtccatttttacacctatgcgaagctgatgtgctgtaccgaaggccagcttgcagaaatcgcaggacttcagccctcttatatcatattggacgaattccaccgtgccggcgcggaatgctggggcgaaagcacggtggctttgttaaagttatgcccggaggcaaaactgctggggctgacggcgacaaacgtccggtatctggataataaccgtgacatggccgaagagctttttgatggccgtgttgcgagcgacatgacccttggcgaagcaatcgtcaggggtattttgcctactccgaactatgtgaccaccgtctatcagtaccagaaagacttggcacgctatcagacaagagtggataatttgcgttctcccggcattcaggatgtgaatcaaaaatatctggatgccctgcgccgtgccttggaacaggcagatggattagataaggttttcgctcatcatatcacgaacaagtttggaaagtacatcgtgttctgcgccaacaaggagcacatggacgaaatgatctctcatgtgccggagtggtttgcaaaggtgaatgcggaagtggcggtctacgaagactactcggatgaccccggtacagacaaggcttttgccgacttcaaggccgatgaaagtgaccgcctgaagctgctgttctgcatcgatatgctgaacgagggcgtccatgtggaggggatttccggggtcatcctgttccggcctactatctcacctattatctacaaacagcagattggccgtgcactaactgcgggggataattccgctccacttatcctcgatgttgtcaacaacttcgaaggactatgcagcattgcgggtctgcaaggcgagatgcaggaggcagtctaccgcctgaatgccaacggtgagggcgataagatcgtcaccgagcggttcgaggtcatcgagcaggtgcatgactgccgggtactgtttgagcagttgcaggcaagcctttcttccagttgggatcattatttttcggaagcaagcatttactatgcggagcatggcgacctgaatattccaaaacgttataccacaccggcgggattgagtcttggcgagtggctgacgacccagcgccgtgtccgtgcaggacagatttctggtaacctgaccgagcaacagattgcacggctggacagcatcgggatggagtggggcaaccgcaacgatgccgcatgggaacgtggtctggaagaagcgagaaaatttcgggaacagtttgggaatttgcaggttccggcgaaatacaaaacgaaagatgactatcctctgggaaagtggatcaacaatgcgcggaaacgccgaagcgatggaaagctgacgaaagaacgcatccgacagttggatcagatgggaatgatatggagcgtatttgatgccaaatgggaacagggatatgcacttgcggcagtctatgcgcaggagtatggaaatctggatgttccacgagattataaaacagcagatggaaaaacgcttggtcgctggattcaaaatcaagaactagcctatgagcagaaaaagttgtctgcggatcagatcaaacgactggaaaccataggaatgcagtggggcagtcgctatgaccgacagtggaatgaggtttatcaggcagcgaaacggtattttgaggcaaatggaaaccttgatgtcccggtggcctatgcttcaccggagggctatgctcttggaaaatgggtgcggcggcagcagtatgcatatcggaatccggagaagagcaatgcaattttatcacaagagcgcattgagttgctggatgccatcggaatgcagtgggagaaaccggactcgtggcagcaccggtacgaactggcgcaggagtataaaagatgccatggaaatctggatattccagcaaaatacaagactgcggatggcatttggctgagccgatgggtgtacaaccagaaacggcagctgcaaagcgggtcggaaaagttgagcgaagagcaaaagaaaaagctaaaggagttattggggtattatgtcaaaatttcagcatgatgtgatgttgaagatcgtaaaaatcatcgatttgataatgatcacaattccgtttgcactttgttgggagctgtattattcgtatcaggtctatgcaaagtttggctggaggggcaactggaccatgatcggtctgtttgcggtgttgttctttctgttgggtaaagtctacgatgcgttctggatgtctttgcagcgcatttcagagttgatctatggacaggtactggcagccatggcaactgatggcattctgtacgttgtcatctgcctgatggcccggcggctctgcaatcttctgccgggcatcgcagcgattgccggacagatcctgatggcctcaatctgggcgaagttggcgcatggatggtactttaatacattccaggcccagccgactgcagtcgtttatgatgttcgtcatggattggaaaagctcatcaatgagtacggtctttcaaaaaaatacgatgtcaagatgacattgaacgtggaagaatgcctgaacgacctgagcctgctggatggaatgcagagcgtgttcatcagcggtgtccacagccatgagcgcaatatcatcctgaaatactgtgtgggacagggcatcaatgtgtttgtgatccctcgtgtgggcgatgtgattatgagcggtgcccagccgatgcatatgttccatctgcccatgctgcgtgtggggcgctatatggcaagcccggaatttctgtttgtgaaacgggcaatggacattgtgatctcactggcagcactggttatcctgagtccgttgtttctgattacggctattgccgtcaagtccgatggtggcccggctttttacaagcaggttcgccttaccaaagacggcaaaccgttcgagatcctgaagttccgttctatgcgtgtggatgccgaaaaggacggcgtagcccggctttccaccggcgacaaggatgaccgtatcacgaaggtgggccatatcatccgagcctgccgtctggatgaacttcctcagcttttaaatatcctccggggagacttgtccattgtggggccccgcccggaacgccctgagatcgctgcccagtattgcgaagagatgccagagttttcgttgcggcttcaagcaaaggctggcttgaccggttatgcacaggtgtacggcaagtacaataccactccctatgacaagttgcagatggacctgatgtacattgcacatcccagcctgatcgaggatctgaagatcatgctggcaacggtgaagattctgtttatgccggaaagcacggaaggtgtggcagaaggtgcgaccacggcgatggggcaggaaaagtgtgaggagagcagcaaatgaaaaaggcagttatgttgatcaacgatacgacctatgcatttaatttgcgtggtgccgttatcgagaagttgattgatgaggattttgaagtggtaattgtcggtcagttgttgaagcatcaggataagttaaaggcactgggtgccaagttgattggcgttgaaaccggccgtcatggcactaatccaatctctgatttgcagttgatgcatacttacaagagaattttgaaagctgaaaagcctgatgttgtccttacatataatatcaagccgaacgtgtatggtggtatggcatgtcagcaattaaaaattccgtatcttccgaatgtaaccggcctcggtaccccggtggaaaatccaggccctttgcaggcactgacgacccggctttacaagatgggcgtggccggtgcaagctgcatctttttccagaacggcgaaaatcagcgtttctttgaaacccataagatgatgccgaagcatgcgaagatccggttgctgccggggtccggcgtagatctggagagccatccggcgtttccgtatccagacggcgaggcagtgcacttccagtttacatcccgaatcttgaaggagaagggcatcgacctatatctcgctgcggccaaacggatccatgcagagtaccccaacacggtgttccatatctgcggcggttgtgacgatcctgcctatgaagagatcttgaagcaggcacaggaggctggagatgtggtctatcatggccagcagaaggatatgattccattcctgaaacaggcaagctgcatcgtgcatccgtcctactatccagagggaatgagcaacgtgctcttggagggtgcggccagtgcccgacccatcattgcaacagatcgtgcgggctgccgggaaacggtggaagacggagtgaccggattcctgattcccattcaggatgaggaagctctagtccatgcgctggaacggtttatgcagatgacgccggagcagcgagaagccatgggtctggctggtcgtgcaaaaatggaacgggagttcgaccgaaaaatcgtggtaaaagcgtatttggaagagattcaagcgttggagggaaacgatgaataaatacatcaaggcggtgttttgtgttccgcttgcaggaatcaagtatgccatcctgaagattaggaatggtggacgattccatgctgcctttccggcaattatgtcgccgatgaccgaggtcaccgtagatggaaaatccgaactgcgcattgcgaaaaagttaaaaatgcataatggcgcaaagatccgcgttcgtaaaggcggaaaactggaaattggcaaaaactttggaatgagcaatggctgtgttgttactgcctacgaccatattaaaatcggtgacaatgtgatgcttggacccaatgttctgatttatgatcaagatcatgattatcaggccgagggtggtgttgcagctatgaaattcaaaactgcaccgattacgattggtaacaatgtctggatcggtgccaatactctgattctccggggaacaacgattggggataatactgtcgtcgggggagggacagtcatcaaaggggacttcccggcaaacagcgtgattattcaaaaaaggacaacggaggttcggcagcagcataatggaatcaattagagtattacataatatcgcaagtcttcactttggcgggtcacaggcttttgtgatgaatatttataacaacattgacagagaaaaggttcaatttgattttattgttacgccagaggaaaggaaagatttatacagtcaggtggaacaaatgggaggacgaatttttgtctgcccaaagtatactgggaaaaaccattttgcatactgtaagtggtgggatgatttctttacggaacatccggaatatcatgtgattcatggacatgtgcggagtacggcatctatctatctgaaaattgcaaaaaagcatggactggtaacaattgcacacagccatagcacctcaaacggaagtggcatttctgctatcgtgaaggatatgttgcgacttccaattcggcatacagcggattatttgtttgcttgttccgacaaagcaggcaaatggttgtatggagaaaaggctacggaacagccgaattaccggatgattccaaatggcgtagatttgaggcgctttgcgttttgtgaggaaaagcggcagcagatgcgtcaggatcttggaattgccgaagatacttttgttctgggacacatcgggcggttcacagttcccaagaatcatcaattcttgatggagttgttcgcagagtaccacgaagagaaccccaatagcaaattgcttttggtgggcgatggcgagttgttcgaaacggtgcagcagcaatgcacgcagcttggaatcagcgattcggttattatggtcggcagtaaaaccaacaccgaggattattaccaagtcatggacgtatttgtgtttccatccttgtgggagggacttccggtttctgtagtagaggctcaggcaaatgggcttccctgtctcctgtctgacgtgataacacacgatgttgatttgacagacaaagtgaagtatcttacgttgactgataaaaaagtatggctttgtgatgttgcgaatcttcagagaaaacatcgaattgctgccacagcagagaatatggcgaagctgcaaccgtttgatgcaacagtggttgcaaagcaacttcaaagtttttatctggaacaggatgaaagggcaagaaaatgagtcaatatatattgcgcctggacgatgcctccgattatatggatgttaaaaagtggcagcggatggaggaacttttagaccagtatggaattaagccgttggtcggagttattccggacaatcgggattcatctcttaccgatacgtatgaacaagaccctgaattctgggataagactgcacgctggaaagaaaaaggctgggagctggcacttcatggttgctatcacaagtacacgaccaaggaaggtggcatcaacccggtaaaccaaagaagtgaatttgcaggtgtcccactggacaagcagaaagaaatgattcggcacggtgttgatgttttgaaaggccatgacattgagccgaaagtgttttttgctccttcacatatatttgatgaaaatacactggtggctttgaaggaagaatccgatattcgaatcatcagcgatactattgcaaatgatgtgtattttgaaaacgacttctattttattccgcaacagtctagacgcgtacgaaagctgccgtttaaggtatgcacgttttgctatcatcctaatatgatgaaagacgaagattttgaggaattagaaatattcctcaaaggaaggcattcgaattttgcgtcagtacaagatatgaagttaaaagaaaggccgatttcaaattttgtcagagttctacatacaatctattttgaaaaaaggcgataaaaacatgaaaaaaataatgttctatataaatacgatccatggcggcggcgcagagcgtgtcatggtaaacttggcaaaatatttttctgaaaatggatacgacactactttggtcacgtcttttcggcatacatgggagtatccgcttgcggcgactgtaagacgacttacgctggaagaagaggaaatcaagcaatccagaataaaaagaaattttagcagaatcaagaaattgagagatttatgcaaatctgagaagccagacatacttgtttcttttatggaagagccgaattttcgtgcaatattagcgacaagaggattgcctgtaaaaacactggtttctgttcggaatgatcctaacaaagaatatgcaggaaaactggggtgttttgtcggtaaaattttgctcccaatggcagatggctgtgtgtttcagacaagcgatgcacaacagtggtttccggagcgcttacagaaaaaatcacgaatcatctataacgccgttaaggaagagttttaccaagtggagcgcacaccagtgcgaggtgagatcgttacctgcggtcgcctgacagagcagaaaaatcacaggttgctgatagacgcatttgcagaggtgcaaaaaatccatccttatgcaacattaaaaatctatggagaaggagcacttcgagaaaagctccagaatcagatcgagtcactgaatcttaatgagaaggtttttctgatgggagccactaatgatgtggcaaaagcgctccatacggcagatctgtttgtgctttcttctgactatgagggcatgccaaatgccttgatggaggcaatggcagccggtgtgccatgtatctctacggattgcccttgtggaggaccaagagaactttttggagaggatgcttccgataaactggttccgtgcaatgattctgcgcaactggcggaagcgatttgttgtgtgttcgatggagcagagcacaacgtcgtagagaaaaaacatgcagaagccttccggccggatcgtgttaatgcaatgtgggaaaaatacataatggaaatttgtttaaaggagcgttgtagtggttgtttatgaggttgttttaggagcggtttcgttatgtgcgaatctctcctgcacgaggcagtccccgagaatgaaggactttttatattggatatgtgcaggaggaatcataatagcatctgcacttcgtagtacggatattggtgcagatacattgacatattgccaggaatatcaaaatatccgagcactttcgtttaaggaggcaatgggatttggatgggaacaaggttatgttgcagtaaattgggtgctagggcagttttttgaaagtgaccgggcattgcttgtgtttttgacgatattcattttgattccgattttcgtttggataaagaaagagtcgaactatccgttactatcacttgtgatgtttatcggaatgggaatgtggaatgcatcaatcggaatttttcgtcaatggtgtgcgatcgcaatacttaccttttcctataaatatattaaagcaagaagattcatcccatttttgatggtagtattaattgcaatgctatttcatcggacagcggcaatttttttattggcatattttgttgaaggtgttccgctgaatatgaacacaatcattgcggcggtacctgcttcggtgatggttggattgatgggagataaaatattaaattttctcaacaaatttgcacgaatttctgaggaaggaaatttcaacggaggaatttctcttttgattgtattgtggttgtgtgtagtaacaccgctgatttgttataaagggaaaattccaaaagagttgaaattttatatgaaactggtccttttttctgcatttatgcaaccggttgcttttacgttttccaactgggcacgaattgttgtctatttttcgatttcgcttctgatatgtttacccaattttgtttctaaagtgattctggaaaacaagctaaatgcaaaaatctcaattccgatggttacagcagtgtgcggactgatgtttttgtggcttggtaggctagacattggagcgtttactttcttgtaacagttgggaggattaatatgaataaatacataagagtgattaagaatttctgtgcagataaaaccattcgtttttcctacctgacaaaattgggtattttcaacggcctgtcagacgagcagtatttgaagttgaaatataaaaatgtattcggcagtgagcttgatttggaaaatccgaagacgttcaacgaaaaactccaatggctaaagctttacaaccggaaaccggaatacaccatgatggtggacaagtacaaggttcgggaatatattgcccaggcgctgggggaggaatacttgattcctctgctgggtgtgtgggatgacccggaagacatcgattttgatgcattgcctgaccagtttgtgctcaaatgcaaccataattccggattgggaatgtgcatttgcaaagacaagagcaaacttgatatcccaaaagtaaaagacgaattaagaaagggattacaacaaaactattacctaagcaatcgagagtggccctataaagatgtccccagaaagattatcgctgaaaaatacatggaagatgccagtggtgatcttaaggattataaattctattgctttaatggtgtgatgaaattcgtaatgattaattcagaccggaacaccgataaacctacgagggcagattattttgatcgggactttaactggttggattttacatggggatacagtcatgcggaggttcagccccagaaaccggaacaatttgaggaaatggttgcaattgccgaacggctttcaaagggacttccgcacattcgagtggatctatatgattgcaatggaaaaatctactttggcgaattgacattctttgatggaagtgggtttgacaaaattgagccgttagagtgggattataaaataggagaaatgttaaaactgccgtcgaaacagtgataacaaaggaaaaacatgcgaaataaattactagcaaagaacacagtagcttccttgatagcacaaattacgactttaatatgcggatttatactaccgcggctttttttgcagcattttggttcggaagttaatggtctagtaaattcaattgtacaattcttaagtgtgatttcatttctggaacttggtgtaggagctgttgtagagtcatcactgtacaagccattggcagaaaaagacaaccagcaaatcagcaaagtgatggtgtctgcaaacaagttttttcagcgattggcgcagatcctttttatctatgttttgattttgatgctagtctatccattaatcgcaaatcaaaatcttggttttttgtatactgccacactgattgctgcaatttcaattagctcatttgcacaatattactttgggattgccaacgcacttttgttaaatgcagatcagcgcgggtatattcagtataatgcgcaaaccgttacagttgttttgaataccgctgtttgtgctgttatgatttcaatgaacggtacaattcagatggtcaaattagcaacatcactgatttacctcgctaggccgcttgcgcttcatttttatgtaaaacgacactatcaaattgattggaagattaaatacactgaagagccaatcaaacaaaaatggaacggtgtagcacagcatattgcagccgtcgttttggacggaacggatacaattgtattgacagttttctcaacattgtcaaatgtttcgatttattccgtctattttttggttattaaaggagtgaagactttatttctttcgatgacaaatggtgttcaggcgttgattggggaactctgggcaaaacaggaattggagaaacttaaaggattcttcgcatgggtagaatgggttattcacacgggaactacttatgtgttttcttgtacagcagctttgatagtgccgtttgttcaagtctacacatttggaattaatgatgccaattacatacagcctgcgtttgctgttttgctcacattagcaaatgcgatgcattgcttaagacttccatacaatattatggtgctggctgcaggacattacaggcagactcaaaagaattatattgtggcggcgattttgaatattcttgtttcgatactgacagttaaggtgtggggcttgattggtgtggccattggaacattggtagccatgacataccaaacgatgtggcttgctgtatatgattcaaggcactttatattttggtcattaaaaaatgttacaaaacagtttgcaattgataccttgagcgcggcgttaatcatagtgtttggtagtcgaatgagtctcaaagaacctagctatataaactggatttttatggctgttaatgttgcagtgatggcattagttgtcgttgtaggtatgaatttaatgttttacaaaaatagagtgaaacaactagctaatagactgtggaggaaaaacacataatgtgcaaagtgatttttatcaccggttcatccggtttcatcggttccaaccttgccaaacgcatcctgaccactgagccggataccaaggtcattggcttggacaacatgaacgattattatgatgttcgtatcaaggaggctcgtctggcagagcttcagaagttcgagaattatacctttatcaagggcaaccttgcggataaagctctcatcaacagtatttttgagcagtatcacccagacattgtggtcaatctgggcgctcaggctggtgtccgctattccatcaccaacccggacgcctacatcgagagtaacatgattggcttctataacattctggaagcctgccgccattatcccgtggagcatctggtgtatgcatcctccagctccgtctatggcagcaacaagaaggtgccctactccaccgatgacaaggtggacaacccggtgtctctgtatgcagcgaccaagaagtctaatgagctgatggcacacgcttactccaaactctacaacattccctccaccggtctgaggttcttcacggtgtatggccctgccggccgcccggatatggcttactttggtttcaccaacaagctggtgaacggcgaaaccattaagatcttcaattacggcaactgcaaacgtgactttacttatgtggatgacatcgtggaaggcgttgtccgcgtgatggcaaaggctcctgaaaagaagaacggcgaggatggcttgcccattccgccctatgcagtttacaacatcggcaactctaatccggaaaacttgctggattttgtgcagattctgtctgaggagttagtacgtgccggtgtgctgcctgcagattatgatttcgaggctcataaggaactggttcccatgcagcccggtgatgtgcctgtcacctttgcagacaccgagccgttggagcgtgactttggctttaagcctcacactccgcttcgggatggattgcggaagtttgcggagtggtacaaagagttttatatggcataaggtgatgggaggaagcgcatgcgttgtgaagaacgattctacgaaatatatggaaaagatcccgttggcatcagcttttgcccctatcggatttgccccattggtgcccacagtgatcacaacttaggaaagatcacaggacttgcgattgataaaggaatccatattgcttataagcccaagatgaacggcgttgttgaaatgtgcagtcttcaattcccgaaacgtgcccagtggcatatccgggagattggcgaaaaaacgggcgattgggcggactacctgcggggtgctacctgggcgctgagcaatcggtttccgctgacagttggtctctgtggagtgatagaaggttctttgcctatcggagggctttcttcctctgcggctgtgattctgtcttttttggaggcgctatgtcaggtcaatggaatcaagctgagttcttcagcgttgatcagcattgcgttcgaggcagaaaaaaaatatgtgggtgttaatgtaggaaccttggatcagagttgtgaggttctgagcaaaaaagaccacttgctatatctggactgtaaggataacagctacgagctgattcccacgaatcccaacatgaagccctacaagattgcggtatttttcagcggtttggagcacagtctggctggctctaaatacaatatgcgagtggatgagctgcgttctggtgtatacgccttgcaggcttttgcgggtctggagtacggaaagttcaatgaggccaatgcccgtgatgtttcgtatgaaatctaccagacctataaagataagctgccggtgcaatgggccaaacgctgtgaacattggtataccgagttcaagcgtgtggaagccggtgcggaagcatggcggcgaggggatttggaagagtatggacacctgtcctttgaatctggctggagcagcatccacaactgggaatccggtgcgccggagcagatcaaactctacgagattatgagggagaccgctggcatttacggagggcgcttcagtggtgctggctttaaggggtgctgtatggcgttgatcgatcccaataaggtagatgacatccgggaagaagtggaacgaaagtatctcactgcattcccggagatgcgtggtaagtacagtttccatctgtgcgagagtgcggacggcgtagggcataagacggaggactaatatgaagtgcttgattttggccgcgggatacgcaacccgcctgtatccattgaccgaaaactttcccaaacccttgctgaaggtaggggataagaccatattggactggctggtggatgacattgacaccgctggtctggtgaatacttatgtggtcatcagcaatcacaagtatgcccatcattttgaaaactgggcggctactaagaagcaaaatattcaggtggtggacgatggaaccagcagcaatgagacccggcttggtgctgtgtgtgacgtgcaatttgccattgaccagctggggctggacgatgacctgctggtgatcgccggtgacaatgtgctggatttctctctttccaaatttgtggcttatgcccaacagaagaaaacatcctgtataatgcgctattatgaaccagaggaaaagaagctcatgaagtgcggtgtggtggagctcgacgatcaggacaagatcctttctatggaagaaaagcctgcccagcccaagagccactggtgctgccctcccttctatgtgtacactcgggcagatgccagaaaggtcaaagatgcaatttcacagaagaagtgtggtactgatgctccgggcagctttattgcatggctgtgcacggtagcggatgtgcatgctatggagatgccgggcaagcggtatgacattggcaatctggagagctatcagcaggttcagcaggagtatcagggaatcaaggcataaaaggcaacacagtgagattctgtggctagaatataagttgaaattattaaattgatactagagggcttcagatgattattattgatgaggcggcaaagaagtggagctgcagcaaaaatacggttttgtcttatgtttataaagatacactactggcatgtgtgtagatggcgagacgctgctgttacccgatattgaaaagccttatattccgcgcaaacgtatcgacggcagtttggattattacagggcactcttgcgaacaattcagagagaacagtttattgatgagcatatattaggcatatccaaagaaaagtttaatgcatacatagaagaactcgaaagtgcgggatatataaaaaaagtggagccggatgcaggcatatcgggacatattttgacggcaaagggaaacgatgaactaaacaagaaaagagaaatatcaattataaaagagttgagtctccagcctcaaattggtttaataaatgttcaaaattcgttcagtggatctgttgtataagataagatcgttatccctgtgaaagggaaactgagaaaatgtcggcaagcggcgtgagcgcggacgagatccttgcaaagctgaagcgacttgaaaatttctaacgcagtagttgacagaaatatctacgcggcaaacctactaaagtgtgtcaaaagcagaagtagaagatataaacaaatattaatttttgccgggtgcagttgagcacccccttcacattgcttgaattaaattatatttttattctacatactgcacctcttgcgaacataaaagacgagtgttatactgaagccatcaaaaaacattggaggtgtcccctatgccccgtcccaaaggaagcaagaacaagcctaggaacgtaaaagcaaccgttgactttgccgcacagatcactgaaaagcaggctgcaaaggaagccgctaccgccgaaattgcatccatcaccgctaatatcgatgcgctgaaagctgacctgaaaaccaagaaagccgagttgaaaactatcgacaaagaaatcgccagaattgaagctaaaaaggtcaaagctgaaaccaaagcagcggaatccgcaaagaaagctgaagcggaggatgtgctgaaaaagctgttggccagtggtatgacggcagatgagattctcgaaaagctgaaataaatattttggagccgtgtggatcagtcggagcgtagagttatagctctggcagttcacgcggttttcttatataaatggtaattggtgtgactcggaacgaatagaactgttctatatcaaacataaatggctacatttcccacaccatagctcaaaatcacgtccggagaaatttcagttaatcagcaggaacatgttggcaatctagctgtcatagagcttctgaggagagtgcttgggagagctgctgccccggcggaagccctaggtttcaggcgtttgaaccgtggaatgctgtaaaaatatacgttagaattaaaaatgcaggtcagaagtgaaacgaatcaaatccttgcaaatggcgctgaaacgtgatataattgtggtacgaacaaaccggttttggtacgacaacggtatgttctggtactgtaactgttgttgcaaaactgtgaagaactacttggaaaggtgcaaaaattcagcgtagctgcgacgacacctatcaggttcaggtcgtgtcctggtacgacaacgagaactcctacacctctcagatggtccgtaccattaagtactttgctgagaactgctgatcggagtttctcctgagctgaataaagcttgactgcgccctttctcttgtgtgatgagagagagagggcgctttttgctgaccattttgggcgcgataaggtgctttcgtaaaatggcacaacacatttgcagtgtgccgacaaaagcagcacgtattcgatctccatctattgcaacccttctcccgatatgataaaatggtaaaaataaatggagacaacgaaacagtatgattacgaaacgtgaaaaactgcagtatggatacctgtttctgattgatctgctctctctggttctcagcattgggctggcgtgggggctgaccgcaggtgttctgcacaagatgggggacttccagctggacgatctggtagaagcctgttttttattgctgctggcctatattctgactttttttacatttgatcagagcgaaaatatcgtgaaccgcacgccggtccgtgaagttgaaattgcggtgcggttcaattttttgttgaccctcattgatgcggcctgcctggcgctgaccaaggcttccatgctgcactcccgctattttctggtgtttgtgcccgtcatcgatgtctttgtgatgacgggcgctcatgctgtcctcaaaaagatgctggtacgctcccgctataccaaggggattcagagccttgtgggagtggtgactacgcaggagaacgcaagccccattctggaagagctgaaaaaagactggtccaagcgtgtgaccggccttgccattctggaagctgccccggagcagcttcacactgagatcgatggggtgaagatcgaggcgaacttcgataatttcatggactggctgcggcaggcagcgctggatgaagtgtatctggatgtggcgcaggagagtgaggagaacatgctgccctatctcgaggagatggagagcatggggctgacggtccatttccgcctgccggtgctggaccggattgaaaaagcctgctgcgatgagaccagtgcggtgcgcatcagccgggaactgagccgctgtgcgggcggcaatgttgtgacgatgggcacggtggaactcaagttgcgggatcaggtgctgaaacggaccatggatatcgtgggcggcattgtggggtgtatcatcagtatccccatcattgcgttggtggccattccgctcaagctggaaagccccggcccgctgatcttcaagcagcgccgggtgggccggaatggacgtgtgttctacatccacaagctgcgcagcatgtatgtggacgcggaggcacgcaaaaaggagctgatggcccagaacgaaatgaacggcctgatgttcaagatggaggatgacccccggatcacccgggtgggccgcttcatccgtcgcaccagcatcgatgagctgccgcagttttttgacgttgtgcggggctccatgagcctggtgggtacccgcccgcccacgctggatgagtaccggcagtacgagagccatcacaagcgccgcctttccatgaagccgggaattaccggcctgtggcaggtaagcggccgcagcgatattgatgattttgaagaagtggtcaagctggatgtccagtacatcgacaactggtccatctggatggatatctacctgctgttcaggacggtgggcgttgtgtttgaccggaaaggggcaaaatgaattatattctttttggtggatctggttttatcggcacccatctcattcatttgctgctgaaggagtgcgtcagacctggcgacgtgatctacgacctggatcttgtgatgcccggggaagagggcgtggtgccgggcattgtggaaaagaacgatggggtgcagtatatccggctggatgtgcgcaagcccatcgattttgagttcgttccgactccggaggatgtgatctttgatctggcagcggtccaccgcacccccggccacccggaagaagcctattttgaaacaaatatccggggcgcggaaaatgtgaccgcatttgcggaaaaatacggcatccggaagatcctgttcaccagctccattgcaccctatggcgcgtctgaggaccttaagacggaggagactctgccaacgcccaacacgccgtatgggatcagcaagctggtggcagaaaagatccaccagatctggcaggcccgtgatccggcccgggagctgactatcgtgcggccaggcatcgtttatggaaaaggggagcacggcaacatgacccgcctgtacagggggcagaagaagggctactttttttatgccggccggaaggacaccatcaaggcgtgcatctatgtcaaggagctggtgcgcttcttcaagtaccggatgctggatcattccttccacggagcagagatctataactgtacctacgagccggcttataccattgaagaaatctgcaatgcggtgcagaaggcgaccggcctgcaccgccatgtgccgttggtgcccgccggactgctgctgtttgcggcgggcattctgggacccatcgggggcaaaaaggtgggcatccatcccgcccgtgtccggaagctgatggtatccaccaatgtctgcggcaggaagctggccgccactgattacaagttccactatacgctggaggaaagcttccgggactggttcgaggattgtgaccgcaaggagctggtatgaccatggagcagaatgcacagcctatccgtgtggcccagatgatgacggatatgaactacggcggtgtggagatggtggtgatgaactactaccgccacatggaccgttccagagttcagtttgattttttcgcgctggaaggctcgaccctgccccagcgggaagagatcgaacggctgggcggccgggtgtatgtggtgccaaaatatacccacctgccgcagtatgaacgggagatcgggcggctgttccgtcagaacggataccagatcgttcactcccacatgaacaccctgagcgtgctttccctctggggggcaaagcgtgcaggggtgcccaaccggatcgcgcataaccattctacggtgggcaggggagaaggtgctaaaaatgtgatgaagtacctgctccgtccctttgccgcagtgtttcccacccggctctgtgcctgctccagaacggcaggcagttggctttatggtgaaaagcctttccgggtgttcaacaatgccattgagctcgaccgctttacttatgatgccgccaaacggaaagccgtccggcaggagcttggcctgggggatgaactggtgctgggccatgtcgggcggttctgctatgccaaaaatcacgaatttctgctggatgtaatggcggaggtctgcaagcaacggccggatgccgttttactgctgattggagaaggggaaaacgaggccgctgcccgccggaagacggaggcgctggggctgcaaaggaatgtccgctttctgggccgacagagcgatcccgcaaagttctatcaggccatggatgcctttgttttgccctcgcggtatgaggggcttggaatcgtgctgatcgaagcacaagcggcggcattgccggtcatctgttccacagaggtgccgcaggaggctcaggtcctgcccgagatgcagtacctgagcttgcaggaaagcccggcagtctgggcggatgcggcgatccgggctgcagaaaatgcccggcggcgggatacctctgtcgagatgcgggcaggcggctttgatatcgtcaccgaggcgaagaagctggaagagttttatttcgacctgctgaaatgaggagataagatggaccctttggtaagcatcatcgttcctgtttataatgtaaagccatatctgaaccgctgtgtggacagtctattggggcagagctatcagaacatggagctgctgctggtggacgacggctccaccgatggtagcgggaccctctgtgatgaatatgctgcacaggatgcccgggtgcgggtgctccacaagaaaaatggtggtctgtccgatgcccgcaacgctggtgtggacgcggcagcgggggaatacctctcttttgtggatggcgatgactgggtgtcaccttattacatcgagaacctgtaccgggcactggagcaggcgggagcggatttttcagccagctgttttgaagaggtgttcgagggccagtcggtgcagtccgtgcccatagagcgtctggaagcattcgagatcctgagccgggaggaatgcctgcgccgcatcctgtatcaggagggcatggaggtgaccacccccaccaagctctataagcgtgcactgtttgagggcgtgcgctacccggtgggcaagctctatgaggatatcccggtcgcctacgaggtgacaaagcgtgcccataaggtggcacatatcgcaaaccgggattactattatttccagcggggcagcagcatccagaatatggccttcaaccccagaaagctggacagtgtgcggcactgccacgcgctgatggaaaatgtgaagcgtgatttcccccagctgagccgtgcggcagaatgccgctatctgagcaatgtctgcaatattctgttccagatccgggacaggcagcatgaaaaaatagagaaggctctctggcaggaagtgaaaaaataccgccggaacgttctgctggatccgcaggcccgcaaaaaggcccggctggcggcggcactttcctacagcggctatgccatgacccggcgggtctatgaaaaaacgcagtggcgtggaaaaaagtaagatggagggatccggttggaggaaagagaaccgcttgtatcggtcattgtgccggtctataatgtttatccgtatctgcgggactgtgtgcagagcgtgcaggcgcagagttaccagaactgggagctgcttttggtagatgacggctcaactgatggcagcggggaactttgtgatgaactggctgtggaggatggccgcatccgggtgttccataagcccaatggggggcagtctgatgcccggaacgttgggttgcaacagacgcagggaaaatatttttacctgctggacagcgatgacctgatccgctccacggcgtttgaccaatttgtggagcgctgtgaggcagatggtgctgatgcagccctgaccccgctggagatgttctcgacagagcagccggagggacggacggaaaatccgcaccagatcccagagctgctgaaccgggaagagaccatgcgccggatgctgctgcatcagggcatcgggcatggggcaggcggcgttttcttccggcgggaggtttggggagatctgcagttccccgttggcatcctgtacgaggactatgcggtgatgtatcgggccattgcccgctgtgcaaaagtggaagtgtttccggaaccgatgtacgattaccgcatccataccggttcgaccatgaagagcggcattgccgagaagaatctggtcattctggatgtgggcgaggacgtgacccactttattgcggaaacggtccctgtgctgaaagcggaagcggagtacctgcagctggttacttacctgaagacactgaaaggcattctggatggcggctttggtagctatccggaggctcaggcacggatctgccgctttgtgcaggaacaccgggcgcttgcccggcggccctgggccaaaagagcagaccggatcaaggtggaaacacttttgatcagcaagcggctgttttatgccgtttatgggctgggagaatggaaaaataaacacacagtcgaaaaataaaatggagaagttatgctgatttatctgggggcttttgcggtttctgtgggcattgccgcctatggcgagcacctgcggacgaagaaaaacaacgagaagggcttttatctctgcctggcgctggcggtgctggtgatggcggtattggcaggcttgcgggacccgtccattggcacggacagcgtggtgtatgagggatgggtggcggatgcaaagctgcaggatggtttgctggcctgcatccggcagcggcacaaaacagagccgctgtttatgacgctggtctatctggcggcacatgtttttggtgatgtccattggctctactttatggtggacctgctggcctgcggcctgtttatgatcgggctggtgcagtataaggagtatgtctccgtgccctatggctggctggcttacctctgcctgtattatggcgatacttataatgccgagcggcagtctgtggcgctgggtgtggcatttctggcgttcagctttgtgtggaagaaaaagtatcactgggctgtcctactgctggcggtctcctgcctgttccacaatgccacctttatctcgtttggcgcgctgctgatctatatcctgcttcagcatttcgacaactggtgggtcaagggtggtctggcggcattttcggtctaccttgccttcttcagcaaggctgtggtcaggctggccctgaatgtggactttattgatcgactttacggatattattatgatgccaatgcgggcggcttcacgctgaatcccatcattgtgcgtctgccgttcctgatcctgcccattgtgctgtaccgctggtatgccagagaggaaggggagggccgccgccgctttacccgctcggatgctgatttctggatcgtgatgatcctgatcgagatggcaacggcccagctgcgcaacatcaatgtgccgctctaccgcatctgcctgtattttgcgttcttccgttatctcgccattggccgtgtggtcaagtgtgtggaggatgagcgtctgcgcaagctgctgaaggctgccatgtggggaatgctggtcatcatctggatctatcaggcgtatattcagggcaacaatgccatttgcccgtacacctcggagatcctccacattggcagagaaacattcttctgagggaacagaacatggagacagagctgatcagtgtcattgtcccggtctacaatgtggagcgatatcttcgccgctgcgtggacagcatcctgcaccagacctatcaggatcttgaggtcctgctggtggacgatggttccaccgatgccagcggagccatctgcgacgaatatgccgcacaggaagaacgtgtaacagcagtccaccagaaaaacgggggaccctctgtagcgcgcaacgcggggctcgaacgggcacagggaacgtatctctgctttgtggacagtgatgactttctggacagccggatgctggaaacgctttgccgtgacctgcaggaacaggatgcggacgtggctgtggtgggcttccggatgtttgaacgagaggaagagcttgccccggcagaactcaccgtaccggtgcagtgtatgacaggccgggaggccatccgcagcacccttgtctcggataagctgggggattttgcctggaacaagctctacaagcgggaactgttccgggatatccgctatccgctggggcggatgatggaagatcagggtacgacataccgtatttttcagcagtgcagcaaggtcgcataccgcccggtgccactgtattattactatcagcgcccggacagcatccttcaccgcaggaacatgaagttctacgaggataagctggatatgggctatcagaaatatcgggccatccgggaagcatacccgggaatgccggagaatgatgccgccatgctgagcgtggtggagcactgctatccgtatctgatgcaggacacggagcgctgcgcaaaaatggaggcctttctgcaggagtgtgacccggcggcggcaaagctgctctgcaccagcagccagcggaagtatcagctgctcagatgcagccggaggctgtatgcaaaactgttcctgctgaaaaacggcccggcggcaaaataagggaggataatttgtgctgaacgataccgtcagtatcattgtgctgatctataacaaagaaaagtatctggaaaaatgtctggacagcatcctcggtcagacctatcgggatctggaaatcattctggtggatgatgggtcaacagacaactctctttccatctgtcagcactatgcagaaaaagatccgcggatcaagatataccataagccaaacggtggcgtttcctctgcgcgaaatctgggattggaaaaaagtacaggcacgctgatttcttttgctgatccggatgattcactccacgccgagtgcatagaacggcttaaaagagtgctggatgagaccggtgcggagattgcttattgctacggtctggatcttctgggcacgaccggacgaacgcagacgaagagcgatgagacggagaaagtcagtgttatgccggtcagacgatatgactggaacagccggaaggcacatacagtgtgctggggtgcgcttttccgccgtgcggtcacacaagatgttgtgttcgatactgacttgaaaattggtgaggatacgctgtttcttgcaaaatgtatccgaaaggcagaaaaaattgcctgcatcgacaaggcgctttactattactatgtcaacgatgactcggtgacgagcgggcattattcggcaggaaaactgacagagctgaaggcatggcggcgtatctgtgaagtgtttgcagatgaaccgttcgtgtatcggtctgcacgggccggatatgcgctccggtgcagagaaattgtggtgaaatactgcaaggatgatgcttttatggagcaggcgtgtgccgaagcggaacgggagtttaagagaaatgccggcccccttctggcaggctggcttcgtgcagggcagtatcggtattttataaaaacgttgtattcgtatctgctctggaacagctggctgaaaaagaaacaggccagaaaaacttacgaagtggagatctgaatgaaaaagtccctcagtctgaatgcagcaatgagcgcattcaagacactgatgaatattatcttcccgctcatcacattcccctacgcttccaatgttcttcaggtggaaaacctgggcaaagtgaactttgcaagctccgtctgcgggtattttctgctgtttgcaggccttggcatctcctcctatgcagtgcgtgagggctcccgctatgtgaatgaccgggaaaaactgtcggcttttgcatcggagatgttctccatcaatatgatctccacggccctgacctatgcggtattggcggtgacgatgcttttctggacaaagctccatgcctataccgacctgatgctggtgctgagtttacaaatcttctttacgaccatcggcaccgaatgggtgttcacgatctttgaggagtatacctatatcaccatccgaggtctgctgtttcaggtgctgtccattttcatgctgtttgccttcgtcaagacccgggatgactactgcatctatgcaggcatcacggtgtttgcggcggtaggtgccaatgtgctcaactttttccgggcccggcagtactgcaccatccggctgacaaggaagatcgactggaaaaaacacctcaagcccatcctcatcatctttgcatccacgctggcaacgaccctttatgtcagctcggataccacgattctgggcattctgggaacagattacaatgtgggtatttactcggtggcgggtaagatctatggcattgtaaagaacctgctttcggcggtgctggtggtgtctatcccgcgactgtcccattatgcgggcgtaggggacaaggcaaacttcaacaagctgttcaacaatatcttaaacgcgctcatcgtggtggtggctccggctgtggtgggactgtttgccctcagccgggaggtcgtcctctttatttccggggaaagctgtttggatgcggtgatgcccctgcagatcctgagtcttgccctgatcgtctgcctgtttggctggctgtataattcctgcgcgcttctgccctgcggaagagaaaaggaactgttctggatcacgctggtcagcggtctgctgaacgtggggctgaacatcctgctcatcccgcggttccgggagaatgcggcggcctttaccaccctgctggcagagctgtgctccatgatgctctgtatccgctgctccaggggtctggtcacggtctcagctgaccggcgcaccgttggctcggtgctctgcggctgtgtgggcatcgttcttgtctgtaccggggtcaaggcactggctctgcccaatctcatctgcattctggcggcggtgctgggctcagtggctgcatacgcggtcatcctgctgggcatgaaaaatccgctggtgctggaatatctggaaaaagcgaagcagaagttccggaaaacatcctgaatggacaggacccgctgcgggggcgaacactccctgcggcgggtcctttttggaaaaaacggcgttttttggtgcgttccggcaaaatcaccacatttctttgcttctgcaacaaatgtttgttaataaattatccatctcccgtccttgcaatacacacgctttttgtttataatagggatgtacggggaagttcgcagtgcgcggcccccgatgaagagcaaaattcgattccgaacgaaaagaatttgagaggagtttgttaccatgggtttaggtaagaaaacgatcgacgatcagaattactgcggcaagaaggtccttgtccgctgcgatttcaatgtcccgatgaaggacggcgtgatcaccaatgagaaccgcatcaatgcggctctgcccaccatccagaagctggtcaacgatggtgctaaggtcatcctgtgcagccacctgggcaaacccaagaacggccccgaggcaaagttcagcctggcacccgttgctgtggctctgagcgcaaagctgggcaagaccgttgtgttcgctgatgacgataacgttgtgggcgagaacgcaaaggctgctgttgccgcaatgaacaacggcgatgtcgttctgctgcagaacacccgtttccgcaaggaagagaccaagaacatgcctgagttcagccaggagctggcttctctggcagatgcatacgttgacgatgcattcggcagctgccaccgtgcacactgctccaccgcaggtgtcaccgactacatcaaggataccgctgtcggttacctgatggagaaggagatcaagtacctgggcaacgcagtcaacgatcccgtccgtcccttcaccgccatcctgggcggcgctaaggtcgccgataagctgaacgtcatctccaatctgctggagaaggtcgataccctgatcatcggcggcggcatggcttacaccttcgtcaaggcacagggctacgaggtcggcaagagcctgtgcgacgataccaagctggattactgcaaggaaatgatggccaaggccaaggagaagggcgtgaagctgctgctgcccgtggatgcagcctgcatcaaggacttccccgatcccatcgacgctcccgtggatgtcactgtggtgcctgtcactgccatccctgctgacatggagggctgcgacatcggccccgagaccatgaagctgtttgccgatgctgtcaaggcatccaagaccgtggtgtggaacggccccatgggcgtgttcgagaaccccaccctggcagctggtactctggctgttgccaaggctatggctgagagcgatgctaccaccgtgatcggcggcggcgacagtgcagcagctgtgcagcagatgggcctgggcgataagatgacccacatctctaccggcggcggcgcttctctggagtatctggagggcaaggagctgcctggtatcgctgtgatccagaacgcataagcatctgaaccagcatcactgaggtgcggcggcatatacgccgccgcactttttattttgggtaataagatctctcaggcttgccgacgttcgccagctccccatccgggaggcaggagatgtcgtttatcctgcctctcctgccgggagaggcggcaccgaaggcggcggggaggtattttgtgataaggagatcgttagaatggataaggcaaagcgtaaggcaatcattgcaggcaactggaagatgaacaagaccgccactgaggcagccaagctggtggatgagctgatccccgccgtcaaggatgcttcctgtgaggttgttatctgcaccccctacaccgatctggtcaccgctgtggaaaagaccaagggcaccaacatccatgtgggtgctgagaatgtccactttgagaagtccggtgcgttcaccggcgagatcagcgctgatatgctggtggatctaggcgtggagtacgtcatcgtcggccactccgagcgccgccagtactttgcagagaccgaccagaccgtgaacaagcgcgctctggctgccctgaatgcgggcctgaaggtcatcatctgcgtgggcgagagcctgcagcagcgcgaggagggcgtgaccgaggaactggtgcggatgcagaccaagatcgccctgcgcgacgtgaccgccgagcagatggcaaacgtggtcattgcctacgagcccatctgggccatcggcaccggcaagaccgcgaccgctgaccaggccgaggaggtctgcgctcagatccgcaaggtcatcggcgaagtgtacggcgaggctgtggccgaggctgtcacggtccagtacggtggcagcatgaacgccaagaactgcgaggagctgctgagcaagaaggatgtggacggcggtctgatcggcggcgcatctctgaaggctcctgattttgctgttatcgtcaatgccgcttccaacggctgagaaagtcctctgacctgttttcccagcgcccggctgcgccgtttttccagcgctgtgccgggcgctatttgttctaaatcaaaggagattcaacgttatgtccaagaaacctgtacttctgtgcatcatggatggctttggctgggtgcccaacgagacctacggcaatgccgtggtcgccgcaaagaccccccatctggatgccctgatggcaaaatatcccatgaccaccatcgaggcctccggcatggctgtcggcctgcccgatggccagatgggcaactctgaggtgggccacaccaacatgggcgctggccgcatcgtttaccagcagctgaccctcatcaccaaatccatccgggacggtgagatgttcaagaaccccgtgctggtcaagaacatgaaggctgccattgaggcaggcaaggccatccacctgatgggcctggtgggcaccggcggtgtccacagccacgctgaccactggttcggcgtgctggaaatggcaaagcacatgggcgcaaaggaagtctacctgcactgcatcaccgatggccgtgataccgacccccacgccggcaagggcttcctggctgacctgcaggccaagctggacgagctgggcgttggcaagatcgccagcgtttccggccgttactacgccatggaccgcgacaacaactgggaccgcgaggagaaggcttacgccgcattcgtttacggtgagggcaaccacgctgccaacgctgccgaggccattgaggcatcctatgctgccgataagaccgacgagttcgttctgccctgcgtcacctgtgagggcggccgcgtgcaggatggcgataccgtcatctttatgaacttccgtcccgaccgtgcccgccagatgacccgcatcttctgcgatgacgacttcaagggctttgagcgccgcggcggccgcaagcaggtcaactatgtctgcatggccgagtacgatgccaccatgcccaactgcgaggtcgcctatcctcccgtggagctgaagaatgttctgggccagtacctgtccgagaacggcaagacccagctgcgcattgccgagaccgagaagtatgcacacgtcaccttcttcttcaatggcggtgtggaggctccctacgagggtgaggaccgctgcgtcatccccagcccgaaggttgccacctacgacctgcagccccagatgagcgcccctgaggtggctgctgagtgcgtcaagcgcatcgagagcggcaagtatgatgtggtcatcctgaactttgccaactgcgacatggtcggccacaccggcgtgttcgatgccgctgtcaaggccgttgaggctgtggataccgctgtggatcaggtggtcaccgctgtgctgaatgcaggcggctgcgcctttatcacggctgaccacggcaacgccgagaagatgatgaacccggacggcactcccttcaccgcccacaccaccagcgtggtgccctttgtggccgttggctgcggcgatgtgaagctgcgcgagggtggctgcctggcagatatcgcccccaccatgctgccctatatcggcctgcctgtccccgctgagatgaccggcaagagcatcatcgtggagtaagcactccgcaaaagagctttcctgaaacgcaaaaagacctccccgtgcaggtgctgcctgcatggggaggtcttttgctgtatcgcttagtagtgcagctggtcagcggtcagtgcttccagcaccggcagcatggcggctgcctcggccttggcggcgggcagatccatatcgcggtagttgccgcattccacctcgctggcaccggggatatccccctcaaaggcggccatgaagcggaaggaatccacggtcagctccaatgcctgcgccggggtcagcccgcgggtgagcaggtagaagccggtgcggcagcccatggggccaacgtagatcacgccatccttcaccgcgctgttgcgggcgtaggtggcaaacaggtgctccagcgtgtgggcggcaccggtggtcagataatcgccctgattgggcttcttcatccggatgtcccaggtcagcacatcaccatcctggcggctcaggtacatgccccggtccagtttggtgtgatcgacacagaagcttgcaatgcgttccatgatgttctccttcaggatcaggcctgcaggcgctggacactgccgtgggcacaatccacagcgatatccaggccgtcgcggatgtggctgcaggcacctgcagcacccacgatggtgggtttgagcagggagttgcccacgatggcagcgtggctgttcaggccgggctcctcgaccaccagagcggcggcatcgcggacatagcccagcatctcgttggtggtggagggaacgaccagcaccatgccggggcggaactttgccttaacttcctccagagtgcggcagacgcaggccttgccgctggcggagaccagatcggtcttgccgcggcccacgcccacaccggtggccaggcagttgcccaccatgtggatcttgatcatgttggtggtgccggaaacgcccacgggcacgcctgcggtcacaacggccagctcgccgttgtgcaggtagccgttcttctcggccagagcggtggacatctcaatcagctcatcggtgctgtgggcggggcccatcagcagggaagtgatgccccagctcagggagagctgacgctgcacctgctcgtccataacgcaggcaatgatgggctgcttggggcggtacttgctcagcaggcgggcagtgttgccggattcagacacggtgacgatggcggcagcgttcacgtccttggcggtcaggcaggcagcgtgagcagttgcatcgctgacgctgatctgaatctcggcgtggcgctgggcgcggtagtgctcctcgttctcggtgcgctctgcaatggcggacatggttttgagggcctccacggggtagtcaccggcagcggtctcaccagacagcatgatggcggaggtgccatcgtagatggcatttgccacgtcagagatctcggcacgggtggggcgggggttgaccatcatgctatccagcatctgggtggcagtgacgatgggcttgccgaaggagaaggagcggtcgatgatgtccttctggatgccgggcagctcggtgaagtcgatctcaacgcccagatcaccacgggccaccatgacggcatcggctgcggagaggatgctgtcgatgttgttcacaccctcgcggttctcgattttggcaatgatacggatgttggaatcgtactcattcagcaggttacggatgtcgtacacatcctgtgcggtgcgcacaaaggaagcagcgatgaagtcaaagccgttctgcacgccaaagataatgtcctcgcggtccttctggctcaggtagggcatggacagatgcacgccgggcacattgacaccctttttggtcttgatcttgccgctgttcaacacggtgcagatgatgtcggtgtcggtgacctgctcaatgtgcagcatgatcaggccgtcgtccagcatgatggtgccgccgggctgcacgtcctggggcagatccttgtaagtgacggagcagatctccttggtgccctccacctcgcgggtggtcagggtaaaggtctggccggcttccagcatctccacaccgttcttgaactccttcaggcggatctcggggcccttggtgtccagcagggcggcaacaggcttgcccagctcctcacgcagagctttcagctttgccagacggccgccgtgctcctcgtaggaaccgtgggagaagttgaaacgggccacgttcatgccgtttgcgatcaggtcgcgcaggacatcgcccttatcggtagaagggcccagggtgcagatgatcttcgtttttctcataaaatacctccaacgtttacgctataatgctctctatcttgacgcagcagcccaagctggctgctctctggcgggcagtgattgctttgcgcccgcggcggcagtatacgccaatatggctgtttcaaaaaaccataccactatacattataagctcttggatacaatagcgcaagaaaaatctttgcaaagaaactgctaagatttcatcaggtttgaacaaaaaactttccaccacaaagcgcttgcataaccggcgggatttgcttataatgaaggtaagcaaaagtgcgactgttccggggcagcccggaggaaaatggagtgaaaacatatggaaaagcgtgtatttttgatcgtactggacagctttggcatcggtgcggagccggatgcagccgcctttggcgacgagggcaccaacacgctgggggccattgcagggcatcccaatttcaactgccccaacctaaaaaagctgggcctgttcaacattgacggtgtgaccgcgggcgaaaagaccgacgcgcccgccggtgcctttgctcgcctgcaggagcagagcatgggcaaggataccaccatcggccactgggaaatcgctggtgtggtcagcccgaacccgctgcccaccttccccaacggcttcccggaggagctcattcaggactttgaggcaaaaaccggccacaaagtcctctgcaatctgccctattccggcaccgaggtgctgaaggactacggcgagcaggccatgaaggaaaatgccctcatcgtctacaccagcgccgacagcgtgttccaggtggccgcccacgaggagctggtgcctgtgccagagctctaccgctactgcgagatcgcccgtgagatgctgaagggcgcgtacggcgtgggccgtgtcatcgcccggcccttcctgggcagcagcgccgagaccttctaccgcaccaccaaccgccacgacctgagcctgaagccgccccgtgccaccatgctcgacctgctgaaggaggctggcagggatgtcatcgctgtgggcaagatctttgatatctttgacggacagggcgtgaccgaaaagatcaagaccaccggcaacaccaatggcatcgccttcaccaaggcattgcagacccgggatttcgagggcctggcctttgtgaatctggtggattttgatatgctctacggccaccgccgcgacgtgcccggctatgccgccgccgccaccgagtttgaccgcttcctggccgacttcatccccgggatgcgggagggcgacctgctgatgatcaccgccgaccacggctgcgacccctcctacaccaagaccaccgaccatacccgcgagtatgtgccgtatctggtctgcggcaagggtgtgaagcccggtgtggacctgggcacccggctctgctttggcaccattgcacagaccgtgtgtgaatatctgggtgtggatgcttccagcctggacggccacagcgtgctgcaggagatcctgaagtaatatcggccctctcagtcacgcgacagcgtgaccgagagggctattttttgtgcaaagtcttgaacaatatagtcagttgtggtagactagcacatgcacgcccggtgcgtacaaggtttacgccgggcgcaggaattgatatggtttcagaatagaaggagactatcacatgagaatcaatcgtactctgggtctggcactgaccgctgctgtgctggctgttgccatgactggctgctccaatagtgcatcttccaccgcatcctccgctgcttccagcgaggctgcttcctctgtggccgcttccagcgaagctgccgagagcgaggccgctgccgccagcgttgtcagcaccgaggatctggatgtgaacggcaccacctactccgctgactgctacggcgagttcaccctgtccaacggcgacaccatgaagctgtggaaggtgaacggcgcttacgcagacctgagcgctctgcccatgaagggcgtggccgaggagttccccatcgaggccgaggccgagcagatctatgttgctgacgtgaccagcaacggcgagaccacccgccagtatctgcgcaccgacaaggctggccgcaacggcactgtctctgtcaagacctttgagctgggcgacgctgagtaatcgcgcttccc

SEQ ID NO: 771 - DNA, 8135 bp, unidentified
  source 1..8135: mol_type = unassigned DNA
  misc_difference 2821: note = a, c, g, or t
  misc_difference 2822: note = a, c, g, or t
  misc_difference 2823: note = a, c, g, or t
  misc_difference 2824: note = a, c, g, or t
  misc_difference 2825: note = a, c, g, or t
  misc_difference 2826: note = a, c, g, or t
  misc_difference 2827: note = a, c, g, or t
  misc_difference 2828: note = a, c, g, or t
  misc_difference 2829: note = a, c, g, or t
  misc_difference 2830: note = a, c, g, or t
atggtctttgcattgatcggaaaccaaaactgcggcaagaccacgctgtttaaccagctaacgggcagcaaccagcatgtaggtaattttccgggcgttacggtggagaaaaaagaaggcgtcatcaaaaaggccaaggatgctacggtggtggatctgcccggcatttattcgctatctccctatacagcggaggaggtcgtaacgcgtgattttttgatacagggtaagccggatgccgtcatcaacatcgtggacgcgaccaacatcgagcgcaacctgtatttgacgcttcaggtgatagaattgggcctgccgatggtgctggcgctgaacatgatggacgaagtgacctcttcgggcggcagcatcgatataaagtgcctggaagaggagctgggcatcccggtggtgcccatttctgccagcaagaacgagggcgtcagcgaattggtggatcgcttgctgcgcgtggcaaagagccagacgaggcccaaaaagatggatttttgcaccaacgaggtgcaccgtgccattcactcggtggcgcatttgattgaggaccactgcgcagctgccggcattccggggcgctttgccgcgacccgcctggtggagggagacgagcccaccgtgcaggcgctcaagctcaaccaaaacgaggtggagacgctggagcatatcgcccgcgaaatggaggacgcgctgggcatggaccgcgaagcggcgttggcggatatgcgctaccaattcattgaaaaggtgagcgccaaggcagtgcataagcccagtgagaccaaagaacagcagcgctcggtggccattgataagatactgacgcataaatattttgccatccccatcttcctttgcatcatgggcgtggtgttctggatgaccttcggcctggtaggggcgtttttgagcgatattatggaaaccggcatccaggttgtgacgatgtggacggatacgttgctgacaaacctaggcatcaaccagatggtgcattccctcatcatagacggcgtgtttgccggcgtgggcagcgtgctgtcgtttttgccgaccatcgtggtgctgtttttctttctatcgcttttggaggacagcgggtatatggcgcgcgtagcgtttgtgatggataagctgctgcgcaaaatcgggcttgccgggcgttcgtttgtgccgatgctcattgggtttggctgttcggtgcccgccatcatggccacgcgcacactggccagcgaacgggatagaaaaatgaccatcatgctgacgccgtttatgtcttgcagcgccaagctgccgatctatgcggtgtttacccaggcgtttttcccggaccatgcggcgctggtgatgatcggactgtatgtgctgggcatgctggtaggcattttatatgggctgatcctaaaacggttttgctttaagggaaacccggtgccgtttgtcatggagctgccggcctaccggctgccaagcggcaagagcattaccctgcatatgtgggaaaaggccaaggactttatacaccgcgcctttaccatcatctttgtggcgacgatcctcatctggttcttgcagagctttgatttccgcctgaatatggtagcggacagcgcaaacagcatgctggcagccatcggcgcgctcatagcgcccctgtttgtgccgctgggctttggctcgtggcaggcatccaccgcgctgttgacggggctgacggccaaggaagcggtggtaagcaccctggccgtgctaatgggcgtaggggataccacggcgttgacgccgctgctttctcagctgtttacgccgctgagcgcattcaccttcctttgctttacgctgctgtatatgccgtgcgtggcggcgctggcggctgtaaggcgcgagatgggatcccgccgggaggcggcgctggccatgctggcgcagactgcgattgcatggttgattgcgtttgcagtacggcatatcggccttttgttggggtttgtataatatgggcgtgctggattggctgctgctcgcagcggtattggggctggccgtgctggccttatggcgctgtcgacgcggaaaaggcggctgcgcgggatgtcagggctgcgcgatggcggatacatgcagaaatgcaaagcgtaaaaagaaatgattttgaaacatgaccgaaatgcggaagccgaggcaggcttccgttttttgtatcgggaaaagggatactgcttagggctgttgctatggcgatggcggatcaagcctgttcaaagctggggaatttatggtaagatagatacagatatatccccagtgggcagaaagtaagcgcagcagaggaaggcgcggcaaagcgctgtatgagaatggaggaacatgcgatgatttttccgatgtatatcgatggcaagtggtttgaaggcgagggccggcagatgcaggacgtcataagcccgggcagcggcgaggtgctggggcgcattccgctggggacgccagaagacgccgacgcggccttgcaggcggcaaaaaaagcggcgcctgccttggcggcgatgacagtatttgagcgggcggaaatctgttacaggattgcgaacaagatcgacgaaaaccaagaggagctggcaaagctgctgaccgccgagcacggcaagccgtaccacagcgaagcgctgggcgaggtagcggcctgtgcgctggcgttccgcgatgcggccgagcagatcaaatggatggacggcaaggtagtggcgctgcgcgataaagatgcgcgctgcctggtgacgcgccgcccgaaggggatttttgnnnnnnnnnncctgccagtattacctggctgccggcattgcagtgggcgatccgatggtgtggaaccctgctaccaccacggcggcggtggcaagcgcgctgatgaagtgctttgaaggcgtaggcctgccggccggcgcggtgaaccttgtgatcggcaagggctctgtggtgggcgacgcgctgagcgcacatccgctgaccgcgggcatcggctttaccggctctactgttacgggcaacatcatctgcgagcgcgccaaatgtaagcatacctccatggagcttggcggcgacggtccgtgtatcgtgttaaaggacgcggatttggacgtagcggcccagggcctgatgaacggcagctttttgaacgccggccaggtatgcaccagcacagagcgcgttttggtggacgacgccattgccgacgctttggtggcaaagatcctggaaaagatgcagacccagtatcagctgggcgatccgtttgatgcaaagaccacgatggggccgatgcacctggaaagccagatcgagatcgtggaatcgcatatcaagcaggcggtggaaaagggtgccaaggtggtagccggcggaaaacggcgcgagggcatgccgacggaccgctattttgagcctaccgtggtagaccatgtgccggtggactgcatgctgcataccgacgaaacctttggccctgtgctgccgctggtgcgttttaaggacgagagcgagatccccggcttggtggatatgagcggataccgcctgttttgcgccatcttcaccaaggatgtaaacaaggcgctgcgcatggcagagcagtacaatttcggcgcaacgaacatcaacggcgcctccaactattgggacccgacaattccggccggcggcggtggcggcagccagagcgggcatggaagaagcggcggcaaatattccattgaggatatgagcgaggagcgcgcggttgtcattcatttgaactaaacgaattcggactctggcagggctttgggccctggcggagtcctttgccttttttggcggaggcacgcggacgagacgtcctaaaaatgccaagaaaaaattgcggaatttgtgaaaaaaagaacacgggagcgttgcattggcccatacattgtgatatatttatcacatagtcaaaatcagaggcagactctcatttttttcaaccaatgtacatcctttaagagtaattaaaaaacggaggaaacgaacatgtccaaaaaagttgtattggctggcgctgtacgtacggcgatcggcaaaatgggcggtacgctgacaagtgtgcctgcagaacagttgggaaccatcgtcatcaaggaagctttgagccgtgcgggcgtaaagccggagcaggtggatgaagtgttgatgggctgcgtaatccaggcgggcctgggccagaacgtggcgcgccaagcggccatccacgccgggctgccggtggaagtgccggccgttacgctgaacgtagtttgtggcagcggcctgaacgcggtgaacatggcggcgaacatgatccaggcgggcgacgcggacatcgtagtggccggcggtatggaaaacatgtccgcagcgccgtatgctgtgatgcaaggccgttatggctatcgcatgaacaacggcacgctggtggataccatgatcaatgatgcgctgtgggatgcgttcaaccagtaccacatgggcatcacggcggaaaacgtggcggagcaatggggcatcacccgcgaaatgcaggatgagtttgcggcccagagccagaacaagaccgaagcggcccagaaggccggcaagtttgacgacgagatcgtcggcgtgcccgtcaagatgaagaaagagaccgtgattttcaataaggacgaaggcccgcgcgccggcgtaacggcagagggcatcgccaagctgaagcccgcgtttaagcgtgacggcggcacagtcaccgcggccaacgcctccggcatcaacgacggcgcggcctgcgtggttgtgatgagcgaagaaaaggccaaggagctgggcgtaaagccgatggcaacgtgggtagcgggcgccttgggcggcgtagacccctccatcatgggcgtgggcccggtggcggcctgcaagaaggtcttcaaaaagaccggccttggcattgatgatttcgatttgatcgaagccaacgaagcgtttgcggcacaggcattggctgtgggcaaagagctgaaatgggatgcggaaaaggtaaacgtaaacggcggcgccattgcgctgggccacccggtaggcgcgtccggctgccgtatcctggtcaccctgctgcatgagatgcagaagcgcgatgccaaacgcggcctggctacgctgtgtatcggcggcggcatgggctgtgcgaccatcgttgaaaaatacgaaggctaagaccccggactttttaggaggcttttgcaatgagcgttgtactgtatgaacaaaaggacgcggtaggcgttatcaccatcaaccgcgaaaaagcactgaacgcgctgaattccgaagtgttggatgctttggatcaaaccctggatcaggtggacctggaaacggtgcgctgcctggtcatcaccggcgcgggccagaaatcctttgtggcgggcgcggacatcggagagatgagcaccctgacaaaggccgagggcgaagcgttcggcaaaaagggcaacgatattttccgcaagatcgagaccttcccggttccggtgatcgctgcggtcaacggctttgcgctgggcggcggctgcgaattgtccatgagctgtgacattcgcttggcgtctgaaaatgcgcgctttggccagcccgaagtgggcttgggcatcacgcctggctttggcggcacgcagcgcctggcccgcaccatcggcgtaggcaaagccaaggaaatgctgtatgcctgcacgcaggtgaaggcggacgaagcgctggcactgggcctggtaaacgcggtatacccggtggaagagctgatggatgctgcgatgaagctggccggcaagatcgccaagaacgcgcccatcgcggtgcgcgccaccaaaaaggctgtcaacgacggcttgcaggtggatatggaccaggccatcgtcattgaagaaaagctattcggcagctgctttgagacggaggatcagaaaaacggcatgacggcgtttttggaaaaacgcaagcccgaaccgtttgtcaacagataaatcggcatttagccctttataaaagattgtatttggaggtacatcatgaaagttggagtgattggcgccggcaccatgggcgctggcatcgcgcaggcgtttgcagtaaccgacggttatgaagttgttctttgcgacatcaagcaggaatttgctgatggcggcaaggccaggatccaaaaggccctggacaaacaggttgccaaaggccgcatggagcaggccaaggtagacgagatcatggcgaagatttctacccatggcgataacgaagctgtggcggactgcgatctggtcgtagaagcggccatcgagcgcatggacttaaagcaggagctgttccaaaagctggataagatctgcaaaccggaagcgatcctggcttccaacacctcttccctgtccttaacggagatctccaaaggcatgagccgcgctgtggttggcatgcacttctttaacccggcaccggtgatgaagctggtagaggtcattgcgggcatgaacaccaaggcagagaccgtagagcgcatcaaagagatctctgtggagatcggcaagaccccggtagaggtaaaggaagcggccggctttgtggttaaccgtatcctgatcccgatgatcaacgaagcggtgggcatctacgcggaaggcgtggccagcgcagaggacatcgatacggcgatgaagctgggcgcaaaccatccgatgggcccgctgtccttgggcgatctgatcggcctggatgtatgcttggccatcatggaggtattggaaagcgaaaccggcgacccgaaataccgcccgcacccgcttctccgcaagatggtacgcggcggcttgctcggacgcaagagcggcaaaggcttcttcgattacaccaagtaagagttcagacggtcctaggactgtaaattttgattaggaggaacgagtatggacttcgtactcagcaaagaacaagaaatggcacgcggtctgttccggcagtttgctgaaacagaagcaaaacccttggcccaagagattgatgagaccgaacgcttccccattgaaaccgtaaagaaaatgcagaaatacggctttatgggcattccgttcgcaaaggaattcggcggccagggctgtgattccctgacctacgcgatctgcgtagaggaattgtccagagtttgcggcaccaccggcgttatcgtttccgcgcacacctctttgggcgcagagccgatcaacaagttcggtacgccggagcagaaggaaaaatacctgattccgctggcaaagggcgaaaagctcggcgctttcggcttgacggagcccggcgcaggcacggacgcggccggccagcagaccaaagcggtgctggaaggcaaccactatgtgctgaacggcagcaagatcttcatcaccaacggcggccaggcggatatctacatcatcttcgcgatgacggataaatccaagggcaccaagggcatctctgcgttcatcgtagaaaaggatttcccgggctttagcatcggcaccaaggaaaagaagatgggcatccgcgggtcttccacgaccgagctgatctttgaaaactgcattgtgccgaaggaaaacctgctgggccaggaaggcaaaggcttcggcattgccatgaccacgctggacggcggccgtatcggcattgccgcgcaggcgctgggtctggcgcagggcgcgtttgatgaaaccgttgcctatgtaaaggaaagaaagcagtttggccgttccatcgccaaattccagaacacccagttccagctggcggatatgaagaccaagatcgaggcggcccgcctgttggtctacaatgcagccaaagccaaggacaccaaaaaacgcttctctgtggaagcggccatggcaaagctgtatgcggctgaggtcgctatggaagttaccaccaagtgcgtacagctccacggcggctacggctacaccagagaatatccggtggagcgcatgatgcgtgatgcgaagatcacggagatttacgaaggaacttccgaagttcagcgtatggtcatctctggcgacttattgagataa

SEQ ID NO: 772 - DNA, 29294 bp, unidentified
  source 1..29294: mol_type = unassigned DNA
  misc_difference 15867: note = a, c, g, or t
  misc_difference 15868: note = a, c, g, or t
  misc_difference 15869: note = a, c, g, or t
  misc_difference 15870: note = a, c, g, or t
  misc_difference 15871: note = a, c, g, or t
  misc_difference 15872: note = a, c, g, or t
  misc_difference 15873: note = a, c, g, or t
  misc_difference 15874: note = a, c, g, or t
  misc_difference 15875: note = a, c, g, or t
  misc_difference 15876: note = a, c, g, or t
  misc_difference 15877: note = a, c, g, or t
  misc_difference 15878: note = a, c, g, or t
  misc_difference 15879: note = a, c, g, or t
  misc_difference 15880: note = a, c, g, or t
  misc_difference 15881: note = a, c, g, or t
  misc_difference 15882: note = a, c, g, or t
  misc_difference 15883: note = a, c, g, or t
  misc_difference 15884: note = a, c, g, or t
  misc_difference 15885: note = a, c, g, or t
  misc_difference 15886: note = a, c, g, or t
  misc_difference 15887: note = a, c, g, or t
  misc_difference 15888: note = a, c, g, or t
  misc_difference 15889: note = a, c, g, or t
  misc_difference 15890: note = a, c, g, or t
  misc_difference 15891: note = a, c, g, or t
  misc_difference 15892: note = a, c, g, or t
  misc_difference 15893: note = a, c, g, or t
  misc_difference 15894: note = a, c, g, or t
  misc_difference 15895: note = a, c, g, or t
  misc_difference 15896: note = a, c, g, or t
  misc_difference 15897: note = a, c, g, or t
  misc_difference 15898: note = a, c, g, or t
  misc_difference 15899: note = a, c, g, or t
  misc_difference 15900: note = a, c, g, or t
  misc_difference 15901: note = a, c, g, or t
  misc_difference 15902: note = a, c, g, or t
  misc_difference 15903: note = a, c, g, or t
  misc_difference 15904: note = a, c, g, or t
  misc_difference 15905: note = a, c, g, or t
  misc_difference 15906: note = a, c, g, or t
  misc_difference 15907: note = a, c, g, or t
  misc_difference 15908: note = a, c, g, or t
  misc_difference 15909: note = a, c, g, or t
  misc_difference 15910: note = a, c, g, or t
  misc_difference 15911: note = a, c, g, or t
  misc_difference 15912: note = a, c, g, or t
  misc_difference 15913: note = a, c, g, or t
  misc_difference 15914: note = a, c, g, or t
  misc_difference 15915: note = a, c, g, or t
  misc_difference 15916: note = a, c, g, or t
  misc_difference 15917: note = a, c, g, or t
  misc_difference 15918: note = a, c, g, or t
  misc_difference 15919: note = a, c, g, or t
  misc_difference 15920: note = a, c, g, or t
  misc_difference 15921: note = a, c, g, or t
  misc_difference 15922: note = a, c, g, or t
  misc_difference 15923: note = a, c, g, or t
  misc_difference 15924: note = a, c, g, or t
  misc_difference 15925: note = a, c, g, or t
  misc_difference 15926: note = a, c, g, or t
  misc_difference 15927: note = a, c, g, or t
  misc_difference 15928: note = a, c, g, or t
  misc_difference 15929: note = a, c, g, or t
  misc_difference 15930: note = a, c, g, or t
  misc_difference 15931: note = a, c, g, or t
  misc_difference 15932: note = a, c, g, or t
  misc_difference 15933: note = a, c, g, or t
  misc_difference 15934: note = a, c, g, or t
  misc_difference 15935: note = a, c, g, or t
  misc_difference 15936: note = a, c, g, or t
  misc_difference 15937: note = a, c, g, or t
  misc_difference 15938: note = a, c, g, or t
  misc_difference 15939: note = a, c, g, or t
  misc_difference 15940: note = a, c, g, or t
  misc_difference 15941: note = a, c, g, or t
  misc_difference 15942: note = a, c, g, or t
  misc_difference 15943: note = a, c, g, or t
  misc_difference 15944: note = a, c, g, or t
  misc_difference 15945: note = a, c, g, or t
  misc_difference 15946: note = a, c, g, or t
  misc_difference 15947: note = a, c, g, or t
  misc_difference 15948: note = a, c, g, or t
  misc_difference 15949: note = a, c, g, or t
  misc_difference 15950: note = a, c, g, or t
  misc_difference 15951: note = a, c, g, or t
  misc_difference 15952: note = a, c, g, or t
  misc_difference 15953: note = a, c, g, or t
  misc_difference 15954: note = a, c, g, or t
  misc_difference 15955: note = a, c, g, or t
  misc_difference 15956: note = a, c, g, or t
  misc_difference 15957: note = a, c, g, or t
  misc_difference 15958: note = a, c, g, or t
  misc_difference 15959: note = a, c, g, or t
  misc_difference 15960: note = a, c, g, or t
  misc_difference 15961: note = a, c, g, or t
  misc_difference 15962: note = a, c, g, or t
  misc_difference 15963: note = a, c, g, or t
  misc_difference 15964: note = a, c, g, or t
  misc_difference 15965: note = a, c, g, or t
  misc_difference 15966: note = a, c, g, or t
tcattttcaggcaacaatgccttgggctctaccagtaccggtgcatatacggtgttgaatttgtgtacgatctctctggtctgttcgatcatgggcagctgatcaccacctacgggaacggtggtcgccttgaaagcggtaatatcggaagcctggctgatgggataggtaaaaaatcccacagggatgctggcttcgaagttacgcatctgaatctcactctttacggtcgggtttctctgtaatctggctacggttaccaaatccatgtaatagaaggtcagttcacacagctcggaaatctgagactggatgaagattgttgccttactgggatccagtccgcaggacatgtagtccagcgccacttcgataatattctgacgcaccttctcgggattctcgatattgtccgtcagtgcctgtgcatctgcgatcatgataaaagttttcttatattcaccggaattctgcagctctacacgtcttctcagggagcctgcataatgtcccacatgtaatcttccggtaggtctgtcacctgtcaaaataatcttgtccatttcgtcctctcaatccgccgtctacgcggctatacatcattgcttctatcataccatctttttgcatagaagcaaatgatttttctacagaattaacgctttgtgtgcaagccccctcgcattcgttctgctgttctatggctgaactattgcaagcagcttatccagaattttatgtgccacctgttccttgctcatcagttccaggctctcctcggaattctttgtgatcagtgtcacaatattggtgtccgtgccaaagcccgctcctgcgctcttcaaactgttggcacagatcatgtcacagtgcttgctctccagcttcttccgggaattctccagtacattttccgtctccatggaaaatccacacaaaatctgtcccggtctcttgttttccccaagggtcttcaaaatatccttcgtccgcaccagagggatcgacatgtctccgtcttttttcttaatcttattgtctgctgtcactgccggggtgtagtctgccacggctgctgccttgatgacaaaatcatagtcctgcgctctggacacgattgcatcgtacatctcttctgccgtctgtaccggcaccacatttacaaacaaaggcggctccacatccgtatgggctgccaccaccgtcacttctgcgccgcggtgcattgcagctctcgccagggcataacccatttttccactggagtgattcgtgataaaacgcaccgggtcaatgggttctctggtggcacctgcggagatcagcacctttttgcccgccagatccttctcgcaggcgatctccttcaccacggcttcgaacagtacggactcctccggcattctgccgtcaccgatatcgccgttggccagcattcccgtggccggagtgatgatctcatagccgaaatgctttaatttttcgatattatcctgcacgatggggttgtgatacatattatgattcatggcaggggacacaatcttcttgcagggacatgccatgaccgtagtagtcaacatatcatctgcgatgccgtttgcaatcttgccgatcacattggcagaagccggtgccaccagaaccacatccgcccgctttgccagtgccacatgttccacactgtactggaaattgcggtcaaaggtgtccaccagacatttatgtcccgtcagactttcaaaagtaatggggttaatgaactgcgtggcattctgtgtcatcagcacttccacatcacagtgctgttttaacagcatccgcgctacattggccattttatatgcagcaatacttcccgagattgccagaactacggtctttcccttcagcatagtcgtctccttttgcctgatttatcaaaaatacttcaaaactgtactcctaaaataccataagtgcatattttatgcaaatatcacttttctttttgtccgggatatgatataaacagtaggagtgtcccgaatcaccggggcagcttgtattgtatctcccagagggagaatggtaacaaggaggaaaatttcatatgaacaaacaaagtaagacaatgcgactcacgttgatgggattgtttgctgcggtacttttgctgatggcttataccccgctcgggtacctgaacatcggccccctggcaatcaccttcaatgtcatccccgttgcactggctgcaatcactcttggccctgtaggcggagccgccatgggagcagtattcggattgaccagctttttgcaatgcatcggcgtgggaggcaccagcgccatgggagcaatgctttttggcatcaaccctgtgttggccttcatccagcgtttcatccccagacttctggacggatttctgttgggatatgtcttccgttacagccgcaaagccgtaggagacagaatcgcctgcatgatcaccggattttgcagcgcatttttcaacaccgcatttttcatgtcccttttagtactgctgttcggcaatacttcctatgtgcagggactgatgggtggtaaaaacgcgattttattcatctgctcttttgtaggtgtgaatgcggtcttcgagatgtgtgcatccacgttcctgaccggagcggtagggctggcactgatcaaggcaaaagtcattcctgtatatcagaaagcagagtctgcagcataacaggagtatacccgtggtactgacaatcgacatcggaaatactacgatcggcatcgggggatttcagggaaataagctgctctttattgagaagatatcgtcccgccgtcccctgtctgatgccggatatagaaaaaaactgaatatgatcttgaacaaacacggcctgtccgccgaagcctttgagggatctgtgatctcctcggttgtgccttcggtgacagccgttttttcctctgctctggaagcttttctggggcagaagcctctgcttcttacccatgaactggatcttggctatgagatctgtacggaatttccggaaaaggtgggctgcgaccgcctggcagatatcgccggagccatttcccgctatcctctgccactgatcaccattgatctgggcaccgccacgacatttaacgtgttggatgagaaccgtcgctttttaggcggcctgatccttcccggcgtgggaaccgcccacagggcacttttaggcaggaccgcccagctcccgaaaggggacattcatatgcccgcccacaccatcggtgcgaatacgcaggaatgcatcaccgggggaatgctcttgggcaacgcctgtgccatcgacggactgatccgccgtatccagacagagttagggcaaaaagcaacggtcgttgccaccggagggtacgcaacgaccgtcattccacattgtgaaacgaagatccatatcgatcagaatcttcttatgaagggtctgagatccatctacgagaataatacctctactggatcaccagattagagtagcccatcaggctctcatccacagcatgtgcggcttctctgccttcacggatcgcccacaccaccagggactgtcctctgtgcatatcaccggtgacgaatacattttccacactggtctggtatttgccgggggcagtttttacgttggtgcgttcatttaattccaccccgaaagcatcggtaatatatttctgacttcccaaaaatcctgctgcgatcagtacaatctccgcatccaggatctgctcacttccggcgatctcctgcatcttcatgcgtccggtagccggatccttttcccaggacagcttcacgatcttcacggctttcaggctgccgttcttatccttgataaattccttaaccgtagattcatagattctcggatcatgtccgtagactgcaatggcttcttcctgaccgtaatcggtcttgcagaccttcggccattcgggccagggattgttctctgctctcttgtccggagccttgggcatcatctcgatctgggttacagacttggcaccgtgacggatggaagttcccacacagtcattaccggtatcaccaccgccgatgatgaccacgttcttacccttggtctccacatatttcttatcttcaaagttcgaatccagcaggctcttggtattggctttcagaaaatccaccgcgaaatagattcccctggcatctctgcctggcgcattgatgtctctgggattggaagcaccacaggccagtacgacacggtcaaaatcatgtaacagcttggatgccttgatgtccttaccgatatccgtaccggtgacaaaggtgatgccctcttccttcatgatggctatcttacgatcaatgatctgtttttccagcttcatgttagggatgccgtacattaacagtcctcccacacggtcggagcgctcaaatactgtgacctgatgtcctctctggttcagcagatccgccgctgccagtccggaaggaccgctgccgatgactgccacctttttgccggtacgcaccacagggggcttggctgccgcataaccctcgctgtaggcgttttcaataattgcatattcgttctccttggtggagaccggatccccattcaatccacaggtacatgccgcctcacacagagccggacatactctggacgtgaattcggggaaattgttggtcttcttcaggcggttgtaagcctgttgccagttgccggtatataccagatcgttccactccggcaccagattgtgcaggggacatccgctggccataccgcagatcatcatgcccgactggcagaacggcacaccgcattccatacatctggcaccctgtaagcgctgcttttccttcggcagatgctcatggaattcgttaaaatgctgtattctcttcttaggatcctcagccacgctgacttcccttttatattccataaatcccgttggttttcccatgactctctccattctgcagacgcttcggcgtcggaagaatcgcgaactaaatttcatatttagttctgcgataaactaatttgtggcgcccgcggcacaaattagtcgtgtgaaaagcaatctatcaagattacttttcacactggcctccatttactttctggtgttggcatagaatgcttcgatctgtgcctgctctgcgctcagtcctttttcctccatctggacgatggtctttaagactctctcataatcatgagggatgatcttcttgaacttgggcagatactctccaaagttgtccagcacttccttacccttggcggaattggtcagtgccacatgctcctggatcatggatttcaactccagcacatcatatttggatgtgatctcgctggaggataccatttccttattcagacgcttgtacagatcgttgccttcatccagtacataagcgataccgccgctcataccggctgcaaagtttttaccggtgggtcctaagactaccacacgtccgccggtcatgtattcacaaccgtgatcacccacaccttcgactaccgcaatggcaccggagttacgcacgcagaaacgttcgcctgccacaccgttgatgaatgctttaccggaggtcgcaccgtacagtgccacgttaccgatgatgatgttttcctccgccttgaacctgctgccctggggaggatataccaccagcttaccaccggataagcccttgccaaagtagtcgttgctgtcgcctaccagttccagagtcaggcccttggggataaaggctccgaaggactgtccgccggcacccttgcacagtacatggtaggtatcctcttccacatcatcgcccaattttctggtgatctcacttccgaggatcgtaccgaaggcacgatcggtgttgctgacgtctacttcgatgctgcgcttctgtcctgcgtcgatggcttttcctaactgctttaacagcaccttctcatccagtgtcttctctaactggaagtcatagacctgcctgggatcaaaggtcaccttctgcttgctgccctcgtaaggattgcttaaaatctgggtcagatccacttcctcctgacgatcggtcagatgctcttttctcttcagcagatcagttctgcccaccagttcatctacggtacgcacgcccagtgctgccatgtattcccgcagctcctgtgcgataaatttcataaagttttccacatattccggcttaccgcggaagtttttccgcagctccgggttctgggtagccacgcctaccgggcaggtatccagattacatactctcatcatgacacagcccatggtcacaaggggtgcagtggcaaaaccgaactcctcggcacctaaaatggctgcgatggctacgtctctgccgctcatcagcttaccgtcggtctcgatgcggactttattacgcagaccgttcatgatcagggtctgatgggtctctgccagtcccagctcccagggaagtccggcattgtggatggagtttctcggtgccgcaccggtaccgccgtcatagccggataccaggatgacctgggctcccgccttggctacaccggctgcgaccgttcccacaccggcttcggataccagctttacggagattcttgcctgggtgttggcatttttcagatcatagatcagctgcgccagatcctcaatggaataaatgtcgtgatgagggggcggagagatcagggacacaccgggtgtggagtgtctggtcttggcgatccagggatatacctttcctccgggcagatgtccgccctcaccgggttttgctccctgtgccatcttgatctgaatctcctgtgcacttaccaggtaacggctggtaacaccaaaacgtccactggctacctgcttgattgcggaacaacggttcagtccgtccggtccgacggtcagacgatccaggtcctcaccgccttcaccggaattgctcttgccgtgcagatggttcatggcgatggccatggtctcatgggcttctttggaaatggaaccgtaggacatggcaccggtcttgaatctggtcacaatggactctaccggctctacttcctcaataggcacaccctttttcggataattgaagtccatcagtcctctgagattcttgatggaatcttcgtcgtttaccatggcagtgtactgtttgaacatctggtaatcaccgcgtctggtggattcctgtaacatatggatggtagcgggattgtacagatgctcgtcaccgccgctgcgcatcttgtgatgtccggggctgtttaaggtcagatcgtttttcagtcccagaggatcaaatgcctgagagtgcaggtcgtctacctgctgctcaatatcttttaaggtaatacctcccacacgacatacggtgttggagaaatacttactgatcacttccggtgcaataccgatagcctcgaagatctgggaaccctgataggactggatggtgctgatacccatcttggatgcgatcttgacgatgccgtggaggacagcattgttgtaatcatccactgctgcatagtaatccttatccagcatattgctctcgatcagttccttgatggtatcctgtgccagataagggttgatggcgcaggcaccgtaacctagcagcgtagcaaaatggtgtacctctctgggttcgccggattccaggatcagtgcgactctggttctcttcttggtgcgtaccagatactggttcagggcggatacggccagcagggaaggaatgggcacatggttctcatccacgcctctgtcggacaggatcaggatgttcacgccgtctctgtaagctctgtccacttccacgaacagtctgtcaatggcacgctctaagctggtgttcttgtaatatacgataggtacgacttctactttgaatccgtctaccttcatgttcttgatcttcaacagatccgtgttggtcaggatcgggttgttgaccttcagaacattacagttcttcggggtctcctccagaatgttgccctcggtaccgatgtatacggtggtggaagtcacgatctcctcacggatcgcatcgatgggcgggttggttacctgtgcaaacagctgcttgaaataatgaaacagcgggtggttcgtcttgcttaagacgggaagcggcgtatccacacccatggcggcaatcgcttcactgccgttctttgccataggcagaatgctctgtttcatctcatcgtaggtataaccgaaagctttctgcatccgctgacgctcttcgtaggtgtactcagggacacgctggttcgggatgtgaatactcttcaattctgtcaggttgttgtccagccattcaccatagggctgtctggaagcatatttttccttgatctcctcatcgtcaatgactctgccctgtacggtatcgaccaggagcatcttgccgggacgaagtctttcctttaacttgatcttcgtgggatcaacaggaaggacacctacctcggaagacaggatcagggtatcatcgtcagtgatcagataacgggaaggacgcaggccgtttctgtccagtaccgcacccatgatatctccgtcggagaacaggatggatgcggggccgtcccagggctccatcatggtagcgtaatactggtagaaatctctcttggtctgggacatggccttgttgttcgcccagggctcggggatagcgatcatgaccgccagaggcagttccatgccgctcattaccaggaattccagcgtgttgtccagcatagcggagtcggaaccggtcttgctgatggcaggcagtactttgtgcagctggcctttcagatgctcggattccatgttctcctccctggccagcatcttgtcggcattgccgcggatagtgttaatctcaccgttgtgtaccatcagacggttcggatgggcacgttcccagctgggattggtattggtggagaaacgggagtgtaccatggcaatggcggattcgtaatcttcactctgcaaatctgcgaagaaagtacgcagctggcctaccaggaacattcctttatatacgatcgttctgctggaaagagaaactacataggtatcatcggaagactgctcgaagacgcgtcttgcaatataaagtctgcggtcaaagggcagtcctttttccacatcggcaggctttttcacgaatccctgcatgatatagggcatgcactctacggccttatgtcccagcacattggggaaggtaggcacttcacgccagccgaggaattccattccttctttttccacaatgatctcgaacatcttcttggcttgattgcggcgcagctcttcctgtgggaagaagaacatgccgacaccgtattctctctctccgccgatgtccatgcccagagccctggtcactctggcaaaaaatttgtggggaatctgggtcagaataccgacaccgtcaccggtcttgccttccgcatccttaccggctctgtgctccagattctctacgatcttcagcgcattctctacggtcgcgcggctcttctctccgtgaatattgacacaggctccgataccgcagttatcatgctcaaattcttcccgatataacggtgccttgggcagctcctgttttacatcaaacatatagttctcctttccgggtttctatttctctctttttcatctgtctgttactattcataacctcatttgcaagactgtgctttcagcacttttctgcaactaaaaaaggtcgcaatgagactctttcgagcgcctcattgcgaccttttctgtactatacacctatttttctcatttgtaaatatagatttttccttgaattgtcagataatttgtcaattcagttattcgcacggctgttgtctgttaattgtgtttattttcttttttaagccatgcttttagcacaactcttcggggattttccctatttttcctgtctccgaccatacactttgcttgtcagtccctgatagattgcagagaaatgtctgctttctgccattgcggtccggagaggtgccagggtcagtgccatcacagcgcggtaacggaacagttctacgggtttcatgtattttgccgtgatctccttatgctctgcggcactgcgtttcaggttctcctttgtctcggagtagccgccgccttcgtaggaagatacggtaagccccagatactgcatgggagccttcgcccggtaatagcaccacagaaaatgttcataatctgcgcggatcttgtatttttgttcgtagggcttctgtcggcacaggtctgcggcatagaagcaggactgatggcagggaatgttgcggtagcagacaaagccggtgattcggggcggggatgatatcttcgtgtccgttttcacgctgtaggtatctccgtaatagatgccttgcagtttcatagggtgctgttccatgaattgtgcggtgtgtgccagaacttccttgtcatagaagaggtcaccgcagtttaagaacagaatgtaatctccggtcacatgagagaccgcctggttcatagcctcgtagatgctgtgatccggttcctggtagagatggatccgcccgtcagtgcgcatggactctatggatccgtcacggctgccaccgtccttgacgatgacttcgaagtctggacaggtctgggccaggatactgtcaagggtctgattcagtttggtgccggggttcaggcatactacgataatgctgaatttcatatgttgctccttttaagatgtaatatctccgcagtcgagaacagggcaaggaacgcggcacgttcgcactctgtcgcagagcgtagcggcacataagtgaccaaagtacggtcactaagtgccgacgtctgcttacggcctgcttatccttaccctgttttcggctgctgggttatgaagtccagttcaatacagtttatgaatgcggtcagaactggtaactaatgtgttttgttatctcattaaaatatatttttctgtttgtgcaaagtgatcaaggatacaactgccactgccaggaaaatcacgcatacaggccagctgacgaagccggtgacggcgatggcggtataggagaggcagtaggcgaggacattggatgccacatggacaaagactgccattttgaactctccaaagtattcgtaagcatatgccatcaggcagccgatgaggaaaccgtatacgccctggacgtagttcatgtggtagacaccgaaaattagggcggacagggctatggcgagtttgatatccatgaatctgcggagatatccgtagataactccgcggaacagaagctcctctgctatgggggagatgaagccgaatacaaggattcctacgataaagtgtgcggaatattgctgggctgcaacttcggtataggcttcggatttgttggtcactcccaggagttcaaacaggaggttgcatccgataacggcaccaatagtggttgccaccagcagggcatattttgccttaccttctttttttagatggcttaaatgcatatcctctttgttcttcgtgatcagaagctttgccgtggaccataccgccagtgctccgccgatgaagcccagtgccgctatgatactggacacatctccggaatagccgttatatgcaccggtctcatccctcaggatcagcagatctaccagtccaccggaagcaccggactgtgccagctgatacaacagtgccagcagcgcatactgcaccgcattgcgcaccaggataaacatcaggaacgaatacaccatggtccagattctctggtacatgggatttttctttttattgtcgggattgctgttcaccagttcctcgctgccgcgaagcagaaatttttccagttcttccacggattgtacgatgtagtccgcttttgcttcctttaactcttccttgcttccgtagccataagtcacgcccacgctctccacgcccaacgctctggctccttccacatcgaactttctgtcaccgatcatgtagacctgatccggctctatgggattctccttgaacagctgatgcagggtctcctgcaccacctgatccttcgtctctctggtgccgtccagctcactgcctaccaccacggcaaaatattttttcagatcaaaatgctccagtatgcgttccacatagatctggggtttgctggaagccagtgccagaaaatagcccttggattgcaggttcttcagcatctccggaataccggcataaacttcattttcaaaaatacccgtattctgaaaacgctctctgtattttgccacggcctcctccgcctgctcagcggtaaaactgtagaattccataaagctgtcccgtaagggcggtccgataaaaggctccagcttgtccagatccggttcctcaataccgaaggagtgcagcgcatactgcacgcaggtcgtaattccaattttgggatctgtcagtgtaccgtccagatcaaacagcagatattttttcattcttataattcctttttttgtatctgttccaagccctgtaactatcgcaaaatattcattgaataccgggatccgcaagaatattctgtaattgttatgagactctgaatagttaccctttctttctatagcttgtggggtccgcaaagcattagaagctgcggatcttgtccccgtcatcctcagtgtttttcagtgccttgatctctacgtcatagcccacattggcattgacctgcacatggaccatatcgcctacttttttaccaagcagtgccttgcccagaggagattcgttgctgatcaggccttccagggaattaccgcgaacggtggtcacgatcttgtaatcctcttccgtgccgtcgtcgatgaattccacggtaacagtgttgttgatgcccacctcatccacggcggagttctcggagatcacctttgcggtcttgatcattctctccagataacggatccggctctcgttctgattcttgtattttttcgctgcataatattcaaaattctcactgagatctccgtgggctctggcttccttcacgtcctccagtgccttgggacgcaccaccagcttacgatactcgatctcatcttccattttcttaatgtcagtgggggttaattcgtcgtacataatataatccttctttctacagctgcatcgcatagatcactgccagagacagaatgatctgaataatggcaaaacggaatacagtctgtgtattggaccagtcccacaccttacgcacatgatcatgcaagggagtacgcacatttttcaaaatatgaatcttcaggaagcggagcagggaaaccttaagcagtcccaaacctccgtccagaatcagcaccagagccagcggaataaacaaaaacggacagccgctctttaaaatagcgatgctgatgaacagtcccatggcccgggaacccgcatctcccatcatcagcttactgggtgtggcattgtaccacagataacccagaatgcatacggcaaacagcaggatcaggaaagaataggtctcattgacgtccttcatacggtccacgatatagatggacatgatcgtaatgatcgacagggttccggaaagtccgtccacaccgtcggagcagttggtcacgttcacggaggtccataccaggatcaccgtgagaatggcgaataccacaggcggcagggtgaactttacatgaaacagtgccagctccaccacgttggaattatatttcaggaacgtgatggctaccagtgccgccacgcacagatctaagaaaccttttttgtactcaccccagggagtcttggaagcatcgtccagaaatcccgtcatcatgcataccacgatcagcagcagatagatcaccagctctgcgcttaaaggggaaaacagcagaacggatgccacaaatgccatgacaaaaataattccggcacctctgggtttccccgcagacaattttccgtcatgggcaaattctcttcctgcatccttgggcagatacggacttaatttcgccgttgccagtaccgtcgctccaaaagcaaaaaggattccaaaaaaagcaaggagagaactgcttccctccggcaagatcatctgtaacatactatccctcgtttccacatgagatactcacttttgtactctcatgctgtattttctgataaattccgtaactgttcacaggggcattcgagaaatgaacacctcagaacagtcacaaaatattttaacacaaatatcccggaatctcaaataatttccacaacagttcagttctgaacatatctgggcgcagaaatcatgcttgcatgattttgcgggcaaatatgtgcaggagctaagcgccaatctatgagcaaaggtagtcacgaagtgacataaaagcgtgttaacgcgactcccgtgaacggtgcggctgaactgttgcgtttgacagttcccccacagtggactactatattcttatgaacactttctgaaaaatagccataaaaggagaaatactctatgatgatccataagatcgaaccgcataaatattacccggaattccgaagccaggatcctaaaccttccgattatctgctgttatttgacggagaaaaggtctatctgccctcccatacagaaaacagtgatgtaacggatacttccgccggtgccggcatctctgaacatcctcaagtatatcttcctacttttgaagaagtccatggactcttgggaatccgtcagcctatggaacgtttttttctggactgtgaatatctcttttccattgatgaccgagcattcttccgcaagacgacggaggatgccggtgctctcatgctcccggaagaagacctctacgcttccggtgtgttccgtaattttgagccggaatatctggcatttgctggaatcactgccacccagatcaatcgtttccgtctggaccggaaattctgcggccgctgcgggcatcccacagttcccagcactacggaacgggcctgcatctgtccggagtgcggtcagatcgaatatcccaagatctctccagccgtcattattgccatcgtggataccgagcgggacaagatcctgctgacccgttacgccggcggttcctatcgtcactgggcactggtggccggcttcgtggaagtcggtgagaccttcaagggtgctgcccgccgggaaatcatggaagaagtcggtttaaaggtcagcgatctggtctattacaaatcccagccctggtccttcagcgattccgccatgatcggcttcttcgcgaagctggagggggatccttctattactttgcaagaatcggagcttggcgaggctgcctggttctccagagaggatgtcccggatctgccctccactatcagtgtcggtcaagaaatgatcacattattcaagaatggtggggatccgttctgccagagataattgatacatttgaaagtttttcacttctattccatgatataccttgactttgtgcccccgtggtttcatgccccgggggcttatttagtttcttttcctctctgcgccccgccctctcgatctccccggggcttaatcagcttctttggttctctgcgccccgctctctcaatctccccggggcttatttagtttcttttcctctctgcgccccgctctctcgatctccccggggcttaatcagcttctttggttctctgcgccccgctctctcgatctccccggggcttaatcagcttctttggttctnnnnnnnnnnnnnnnnnnnnnnnnnnnnnnnnnnnnnnnnnnnnnnnnnnnnnnnnnnnnnnnnnnnnnnnnnnnnnnnnnnnnnnnnnnnnnnnnnnnnagcttctttggttctctgcgccccgctctctcgatctccccggggcttaatcagcatgctccttatatctacgccccatgtacgcaaaaatctgcctccgacaataacattgtcatgaggcagactcctttctgtacttattctcttcactgtttcttcacctagagcatcgtagctgtcatcgcttctcattatctcaataagcggcacttcttcgctaccttcactaacagatatcccttcgggaagcttcgaagctcctgctccgtgatgccccgcatcaatatcagcatgacaaaatagactacagcagcaattacgatcgcaggaatgacagagatccgcatggacttcgtcaccatatacagaccctcgtagattgcccaggctgccgctcccataaacgcggaggcgaacgccggaatgacgaaagtctttacgatctcctgccggtagcctaccgctcttcttaccgcccactggttcagcacacacatcataccggaatacagcgtattagcgatggcaatgctgtacagatccagtcttgtgaacatcagaagcagcactgctgccaccgtctgcaccaccagcgagatccccgcattgatgatcggggtatttactttgccaagcccctgtaagatcgaactgttcagagtcgacagtgcataaaagataaccgacagtgacaatgtcattaaaagagctgccgccagattcaattcctctgccgtcttattcgtgaacagcagactgatcaccggcttcgccagcacgaaaagtcctaccgcacagggaatggagatcaccatggtcgtcttcaccgccagaccgatcttctctctggctcccttcacatcccgggctgccatcagctgtgctacggaaggaatcatggcagaagccatagcagatgcaaaggctatgggaatattggacattgtcaaggactgtccggagaaaataccatatttttcataaatagataccgtatccagattgcgaagggacggataccattttgtgtagatactgttgttgaccgtactgcttaagttatatacagccgtactcaaaataaacggtgtcaccaccagtgtgatcgtcttgaatatctgtccgtaggaatccacatgttcatgcctgtcacgctgcactctgcgcaggatcattccacgattcagagcatagactcccgccataaaaagcagagccactaatacgccgacacctgttcccaatgcacttcccacagcaccgtaggttgctctcatcacctgccctgcctgatccgccggaacctccatcgttcccataaacatttggatcagaaggtatgccgcgcctacgctgactaccgcattggcgatctgctccaggatctgcgatacggaggtctgcgccatgctcttatgtgcctgaaaataccctcgtaaaactcccaggataccatagacgaagatcgtcggtgcaaaggtgcgcagtactgtgaccgctgctccggacacgaataatcccgctccgaaaaacagaaaaaggctggctataccgccaaccaccagtacatagatcatggctccgtggaacagtctgtgggcgttacggtattccttctctcccagcttctgtgcgatagctttggaaatcgccgaaggaatactataagaggagatcaacagaatgatcgtataatagttatacgctgactggtaataaccaagtcccagattcccgatgacactctgtaaagggcccctgtaaaggagccctatgattctgctgatgattccggctgccgccagaattcccgcctgcatgataaaattgttcttggaactgttcttatctgccatatgtaatcttaccttattccagttctttatccgatcagccagtcatacatctcctggtattttccggcggataccttccaggagtagtcggtggccatggcacgatccacgatcttattccactctctcttcctgtcgtaataaatatgctccgcataacggatcgtattcagcatctcatgtgcattgtaattcgtaaagctgaagcctgtaccggtgctctcatactcattatagggctgtacggtatccttcagtccgccggtctctctgacgatgggtacggtaccgtaacgcagtgcgatcaactgactcaggccgcagggttcgaacagagacggcatcaggtaagcgtcacaagccgcatagattttatgggacagtgcatctgaataataaatattggcagacaccttgtctccatacttccagtcgaaatgacggaacatattttcgtaacgttcctcaccggtgcccagtaccacgaactggatatcatcctgacacagttcatccatgacataagcgatcagatccagacccttctggtctgtcagtctggataccagaccgatcatcattttcttatcatctacgcgaagtccaagctcttcctgcagggcacgcttattcttcaccttttccttgcggaaattcactgcattataggcttttacgatatttttgtccgtctccggattgaactctccatagtcgatgccgttgacaataccgcgcagatcatggcttctcgcacgcagcaatccgtccaggccctcaccgtaaaacggagtcttgatctcctccgcataggtatcacttacggtggtcactgcatctgcaaatacgataccgccctttaacaggttcgcatccttataagcctccagcttgtcagaggtaaaataatactccggcagtccggtaatgctctgtaccgtcttcacatcccattttccctggaatttcaggttatgtatggtgatcacagacttcatgttgcggtagaaatctccaccatggaaacgctccttcaggtataccgggatcagaccggtctgccagtcatggcaatggatcagatccggctggaaattcaaaagcggtaatgccgacagcactgccttgcagaaatatgcgtacttctcgatctcatatctgggatcatccccataaggcttgaaaccaccgaaataactctcattatcaatgaaataataatgcaccccggcttcctctgcctccagaacacctacatacacattctgccagttgaaatccatgtagaaatgtgtcacatacctgagcttatccttcatctcctgcttcatacaggtatacttcgggataaacactcttacatcaaaatactccttgtcaatatacttcggcaaagatcctacgacatccgcaagtcctccggtcttgataaaaggtacgccttccgatgcggcaaaaagaatttttttcatgtaaaccctccacatatgctacggcttgtattcaaaatatagattgattataccatgtttacgattcatagaaaagagggcatcgataatttacaaatcttttagagtctgccggttccacctcagcttctgtaggaaagccggatcctgtcagcgatcagtgcgataaattccgaattggtaggtttgcctttgcccgtgtcgatcgtgtaaccgaacatggcatccagagtctccatgcgccctctgctccaggcaacctcaatggcatggcgaatagcgcgctccacgcggctgggtgtggtctggaaccgcttggcgatggtcggatacaggatctttgtgatagaactgatcattgccggatcctctaccgacatcatgatagcttcccgcagatactgataccctttgatatgtgccggcactccgatctcatggatcatatccgtgacatccttttccaggtcatggatgacttcctgggtctgttcctttttttctgtcgcttttactgtgctgtctttggcgtttttcgtagaaggaaccgtgatcataatttggaattccttgttggcattcatcagatcccccaggattttgtatactttttcattatcctttgtagttgtaatgtttaatttttccattaaactacctccatgactacaaaactacttttttcacgtaccgttctattataaatagatatgcgtcgtagcttcaagcagaacccgtcgcaagatttttccaaatttcgcaaaaaaaggcgcccggaatgaaccggacgccaataagagggaaaatgtataagtagaaaaactacgagtaaagcaaattaaattaatgatgctctgccagggtgtgaagtgcttccttgatggctgtcttcacggtctcatcctgttctgcattcagtctgtgcagtagataggtcttggcatattcggtgccgatgcttcctaacgcttttgctgcttcgacacggatcttcgtatccggattgtcgatcatgtgggcaatgctgttgacactgtcttcatccttgatccggctcaacgcttccagtgcggctaccaccaccgtgtcatcggaagaactcagatatttgatgatcttgtcggattttcctttctcctgtaatttttgaatcttacttaaatcatgttgttccataaacacgcgcctctttctttctgccagcgcgggggcggtaaaatcgtctccgggtcatcactgtatgtcgcctgtggtgattggcttctcttgataatgttatgataacaccttatctgtcagaaaacaattatagtaaaatgaaggatttctaaaaattctataacctcattctacttgcgttcaaataaatcgcaccgggcttctaatgcataataatccaatgctgactttacatatcctgccgttgtatcattcattgctttctgcttatataacaattttgcattatccataatcttttcacggtttttacgaataaatatcatctcattttgtacaaggtccttatagttactatcctcttcattttccaaatcatacaattccagctccgatgccggaaccggtatcatgtggctaattcttaatgttccctttaattcctttttgcctgcggcatttttgactacgatgcgaatgattggtataatactttttctgatcaccttatctttacccgccatctgataatcggaattcttcggcgacgacataggtatataataattgtatctgtcaatatgtagcaccactcccaaatattttcttgtatgtgtccttgcattcactttgttggaatatacattggggaaatcctctcgaagccattccacatattcatccgaaatactgtacaatttgaattctttcattatacttcctttcttcggtataaaatcataaccaccggctgagccggtggtttgttctgcccctataaggggctgttaccggcactgggtctaaagacccgttgaaagctcgccagccgcaacatcatttctctgcagagccctaaagggctcatcttatttgctttgttttactggctcacccgtaaacgggtcaatatactcttttagtgtcatttggtcgtattccaaatcctcttttaattggttctggatatactcttggatctttttcgcattttttcctacagtatctacataataaccaaaaatgccgattgccatacttatacttcaggtttgcatgcctttcaaatatcatcagtgtactttttccttttagctaacctacaaaacttgctacactgatgtttggcggaatctctacaagcatatgcacatgatccggacatatctctgcttccactatattgactccttttcttttacacagcatgctcaaaatatttgctatgtcctgacgtaacgctccatatgctacttttcttcggaactttggcgcaaacacaatatggtacttacaattccatttaggtcagtttacaaggaactacacacaaaccactgaacggggctgctgacaacaaataaaggctgaatatcaagcaccgggaaagtgcgagatattcagcctgttttgttgtctggggtttccaaaggggcttgccccttggcacacgactttgcttgcaaagtgtagtgtgttatacgctctgtcggcgttgctgcgaaaatgccgttgccgccggggagggcaagggcatttgaaacggcaggaaaacagggctgtgattgcgtggcgtggagccgcaagcgcaggactggtttcatcagcagacagggcgtatatgaaagccccgtccctcgtcctacgccggacttcgggacaaaatgtcccgaacttgtggacacactcacgaaaaagcagacagatttttctctcaaaattgaaatgggcgggaagccattttagggctttcccgccttgattaccctttagcaaagacgggcggggctgtcaacggcggtgcatttatatgcaccgttcatcttgaccgttgactggctcggctggctttgctatctccccgatgttatgtatattctattttgtacttctcaactaagctattgtaatcctctaaatacttttttaatttatcatcatcttttccctttattagttttcgtttccctttgcagagaagataataggtcgttttttccccgctttcaataatgctacactccttgtaaggtttcgttatttctcctgttaaatctggaatgttagcaaccagtcgagccagttcatctatcgtaaaatgcctaataaacatatctaattttttaatacgattatccgctaaacacagataatcattatccaaaatttttgctccccaccatccaaagtgtgtaatttgactatgaattaaaggctttaggctctctatttccattttgggccagacacgatttcctatggaaaaataattcaaatatggtgcggtagcaacttttacaaccgaatgtaatttggaaaaatcataaatggacaagccacttaacttctcattacgctccatattccacaaatccgtagctttttgattaaagaaaaaatgaatgaattttacatttgttaaatcctctaatggtgacaagtcgctgactgatttatttttccaaaaggaaatagcttcaaactgactaccataatgtttgattaaatattcaaaacattcctgatttagtcccgatataatcaacgattttgctgttggatattcctctaaacaatctatgtcctctttctccgttttcccgcctccaacatctctttgcacgattgatacatcaaacaaagatacatctgatgtttcaaaattagatagatttattttcatagacaaaattcctctcagttcattccaatttatcgctctcttatttcctccccctctgtgggtttggatttttcagcaagtccgacttctgtgcaatctttttcagccacttcttttcatcttcggacagctttttcaaattcaatttgagccgcttacagataaacgccaaagctgcttgctccgggtcgctgtctggactggcagtttcctcggcggtctgcaagaaatcttccagtgggttgtcctccggaacgctgaaaaaatcgtccttatgggcttcccgcaggtcgagggctatcttgtttatgtcctgctgtatcacatagcggcaaaagctgtcatcatcaatatgggcggcgataagctgtcttaactgcgggtcggacaagccgggattgtgctgcttcataatggttgtgctcacagcgtctacaatggcatttgcactctgcacctgtttgccagcgataccgtttacatagatttcaaggtcagccatgagccggggaaaatccgggtgtgccgccagctcacacaagagggaattatccacccgcccacttttcaacagttcaatcatatcatcactcaaacacaggtctgcaagatcggcgtttgggtgatttcttgtttgggacagtcccagcagataatcggcggtcacgccgtaaaacttcgccagcttgataatggcatagtggctgatgtccttgaagtcctttgcttcataactgcccaacgcagacttggagagatttacctgttcttcaagctgctccagcgtcagcccacgctccacacgcaggtcttttagtcgttcttgtatggataattccatgcgctccctccttgtctgcccaataaatgggaagctatcgcttacatcatataaagaaaaattatattaaattctcaataactgtttccgtcattttcagtgcttcggtaatgttcggagcgacataatagataaaatccgggtcatgcacataacaaataatttgaccgatttcacctttctcgcttgggttatagtccaacatcagataaagagaaccggcatactcagcaaagggaaaccaacgctcacaaaacagatatggctttatgcgttcgtctaattgttgcagttgtttttcaccaattacatttggaaactctgtcattttacagtttttattttgaaaaagagattttaacttgattatttcttttagtgacagtaggcgatacccgcgataaaatccctcctgcggccaaattaagctcatatagccgctgccgtttttgtatgaatatacggttttaaaatcctctggcaatcttatttgaaattgattttcaaaggcgcttaattcttcttttgtagcaccttgaattttaagatactcgtcaatatcttcctgttctacttcctcatcatttagtgcttcagcattttcaaggagaagctgctcatttctcttgacaagttccactatgctatccattttgaacacctcacaacttccgatttatcgtcttgtatttattattttaccacaattccgagagcgtggaaataaagagttttccgggctgatttccgaccttatggatatacggggcgggcggtcttttaggtgtagacttagggtagttcatcgatgagctgcaccttgaaaaatgaatgaccgtccgaaaaggaataccccggcaggggaagcaccgcaacgagccacttcgggacaaaatgtcccgaagtccggggagcgtgccaacgccggaacacgccgcaggaatggggcaggaagccttttcggggagaacggctaaggaaaaatggagggaacacatgagagagaacccatataaacgactgccgcccatagagcgcaggcaggacggttccctttaccgcatgacaccggcacagaggaaacaggcaaacgccctgatccgccgggagtgctgctgttatgaggacgggaactgtatgctccttgacgatggggatacccacacctgcccccagaccatttctttctcggtctgctgtaagtggttccgctggtcggtcttgccgcaaatcggaacgctggaagcagagattttccgggataaggacttgaaacgctgtgcggtctgcggcggtgtgttcgtccccaaatccaaccgggcaaaatactgccccggctgtgccgccagagttcacaggcggcagaaaacagaaagtgaacggaaaaggaggtcttgtgtggacagttaggggctgaaaagtccttgatttacaaggctttgcaagcacagaacaggggcaggcaatagaaactaccgtctgcccccggaaacaggcttctaaccgtccacaaaacacgatatgacaaacaccatttatatccatcagccggaaaaggcggtcagctttacccggcttcccaatttcctttttgaagcccccacattcacacccctgtccaacgaagcaaaggtactgtatgcctttatcctgcgccggacggagttatcccgcaagaatggctggtcggacgagtacgggcgcatttacctgtactatcccatctgtgaggtggtggacttgctccactgtgggcggcagaaagccgtcaacaccttgcgggagttacagtatgcagagttgattgacattaagaaacagggctgtggaaaacccaactgtatttacccaaaatcctatgaagcggtttcaaacaccgacttcaagaaatccggttatggaacgccggagaactgaaaaccgcactccacaagtacgataatcaatcctcttgaagtacgaaaaccggacggtatatagaaatacagagattaaaacgattttatttatatcttatccattcctatcctatccgagatattttctgcgggattttcctgtggaaaagtcccggaaaggaacggaatggggaaaggagtttcatggcacaacacgcaattttgcgatttgaaaaacacaagggcaatccggcaagaccgctggaagcccatcacgaacggcaaaaggaacagtacgccagcaatcccgacattgacgccagccggagcaagtacaatttccatatcgtcaagcggtcgggcaggtactaccactttatacagaaccgtattgaacaggcaggctgccgtacccgcagggacagcacccgttttgtagatacgctcataaccgccagcccggagtttttcaagaagaaatccccaaaggagatacaggcgtttttccagagggcggctgatttcttaatcgggcgggtagggaaagaaaatatcgtgtcggcggtggtacacatggacgagaaaacgccccacctgcatttgacctttgttccgctgacaaaggacaaccgcctgtgtgcaaaggagattatcggcaaccgggcaaacctgacgaagtggcaggacgattttcacgcctatatggtggagaaatatcctgacttggagcgtggggaaagtgccagcaagacaggcaggaagcatatccccacccgtctgttcaagcaggcggtcaatctctccaaacaggcaagagccattgaagccacgctggacggtattaccccattcaacgccggaaagaaaaaagaggaagccctctccctgctgaaaaagtggtttccgcagatggagaacttctccgggcagctcaaaaaatacaaggtcacgataaacgaccttttggcagaaaatgaacagttggaagccagagccaaagccagcgaaaaaggcaagatgaaagatacgatggaacgggcaaagctggaaagcgagctgaaagacattcagcggctggtagaccgtatcccgccggaggtgctggcagaactgaaacggcagcagcggcacacaagggaacggtgattgatgacagaaaacatttcacgccgcagcatggcggcactgcactttgaaaattaaatacggaggtactatggagcatatcagatacaagaaagaaaccgaagtcgtgacttttcagggaaaggaaatcacgctggaaaatctctccccggtgttcacgccggagcaggaagcggcaaaacgccgggagctggaacagcagctttatgaggtgttccgcaagtatgccgacaagcggcagagtgaggaagccggggcataaggttttccgaagccatcgttgatttgcggggctgctggcggtataataaaactgtcagcagctccgtttcttttttaagaaaaggagcgacaatatgaacaatcgaatagacgcaatctatgcaagacaatcggtagacaaaaaggacagcatttccattgaaagccagattgaattttgcaaatacgagttgaaaggcggtaactgcaaggaatacacagacaaggggtacagcggcaagaacacagaccgtccgaagtttcaagaactggtgcgggacatcaagcggggcttgattgcaaaggtcgtggtttacaagctcgaccgtatcagccgttccattctggactttgccaacatgatggagctgttccaacagtacaatgtggagtttgtgtcctctacggaaaagtttgatacctccaccccgatggggcgggcgatgctgaatatctgtatcgtgttcgcccagcttgagagggaaaccatacagaagcgggtaacggacgcttactattcccgcagccagcgaggtttcaagatgggtgggaaagccccttacggctttcatacagagccaatcaagatggacggtatcaacacaaaaaagctggtggtaaatccagacgaagcggcaaatatccggctgatgtttgagatgtacgcccagcccactacctcctatggggacattacccggtactttgcggaacaggggattttgttccatggcaaagagctgatacgccccacgctggcgcagatgttacgcaatcctgtctatgtgcaggcagaccttgatgtgtacgaatttttcaaaagtcaagggacggtcattgtcaatgacgctgccgattttactggcatgaacggctgctatctgtatcaagggcgggatgtgaagcccagcaaaaagaacgacttgaaagaccaaatgctggtgctggctccccatgagggcattgtcccctccgacatctggctgacctgccgtaagaagctgatgaacaacatgaaaatccagtctgcccggaaagccacccatacatggctggcgggaaaaatcaagtgcgggaactgcgggtatgcccttatgagtatcttcaatccctccggcaagcaataccttcgctgtacgaaacggctggataacaagagttgtccggggtgcgggaaaatcattacttcggaactggaagcggttgtttatcagcagatggtaaagaaactggcaagctacaagacgctgacaggcagaaagaaagcggcaaaggcaaacccgaaaattgccgccctgcaagtggagcttgcccatgtggacagcgagattgaaaagctggtggacagtctgacgggtgcaaacaatgtcctgctctcctatgtgaatgtgaagatagcggaactggacgggcgcaagcaggaacttctggcgaggatagcggagctgacggtggaagccatcagcccggaacaggtcagccagatttccggctacctcgacacttgggagaatgtatcctttgacgacaagcggcgggtggtggatttgatgattaccaccatagccgccacaagcgacagcttgaatatcacatggaaaatctgacgggcggaacccctcccgtcagatacctactctgtgtagtcccttgtaaactgtactttactgtgtgataaactatttacatccactttggatacctcctttgattagtgcggttggcgaaccaacactattatatcattggaggtttttactgtaagctaaagcgattgttgtccacctgcatagcaggtggtttttttaaggattaccttacaacaaaaagagagcaaatattttactatttgctctctcagaatttaagattctccacttatatggcaggagctctcccgagtttaaaatcttccacttatatggcaggaactctcccgataatcaattccttatctgttaatcattatatgctttcttaatgaaaaaagca

SEQ ID NO: 773 - DNA, 26697 bp, unidentified
  source 1..26697: mol_type = unassigned DNA
ttacagcatcctggaaaggaaagccttcagacgaggatgcttggggttcgagaagagctcctgcgggggctcatcttcctggatcctgccttcatcgatgaagatgacgcggttggacacctcgcgggcaaagcccatctcgtgggtgaccaccagcatggtgatgccggtgtgggccagctccttcatcagctccagcacctcgccgaccatctcagggtcaagggcggaggtgggctcgtcgaacaggatgacatccgggtccatggccagagcgcgggcaatggcaatgcgctgctgctggccgccggaaaggctcttggggaacacattggctttatcggacaggccgacacgggccagcagctcctcggcacgcttggaagcctcctccttgctcttgagcttgagcagctccggggccaggcagaggttctgcttgacggtcaggtgggggaagaggttgaagtgctggaacaccatgcccatcttctggcgcacggcatcgatgtgggcatcatccacctcgatgccctcaaacttgatggagccgccggtggggatctccagccggttcaggcagcgcaggaaggtagacttgccgcagccggaggggccgatcaggcagaccacatcgccgcggtagatgtcgatgtcgatgcccttcaggacatccagggtgggggtaggctgctttgcgccctttttggcctcaccgccgtaggtcttggtcagaccacggacttccagaatcttttcagcatgattagcggtcaccttgcgccatcctcctctcaaacttcgacagcagccatgtaaagagcatgactaagaccagatagaccactgcaacgcccaacagggggaacatggcctcgtaggtacggttcataatgccctgcgccgcatacagcagctccttgccgccgataacggtgatgagcgaggtatccttgagcaggacgatgaactcgttgcccagtgcaggcagcaccgcgcggatggcctgcggaatgacaatgaccaccatggtggtcatgtagttcaggcccaggctgcggccggcttccatctggccggggtccaccgccatcaggccgccgcggatgatctccgagacgtaagcgcccgagttgatgcccagtgccagcgcaccgaccatggtaaagttgcggctgttggaaaagatgaccatgctcataatgagcagctggaccatcatgggggtgccgcggatgatggtggtgtacacctgacagacggcattgaagaagcccagcaccgggttcctgcggccgggacgctgctggtcgtgcgcaacacgcaccagtgccaccacactgcccagcaccacgcccagtgccagcgcaatggcggtgaccagcagcgtagtgcccacgccctggatgtactgcacccagcggtcgttcaggatgaacgcctgatagaatttgaagaacatttcctgcccgaagtccagcttcgtgccgctgttgagcagctctttcagcagttcgtattgtgcggccattcgcatcctcgctttctaaaattgttagaattttgtaacctgttctttccaaaaaaggggaggtgccccagatggggccgcctccccgtgatacaaggtacagctgaattattcagcagtgatgtacttgtccacgatggactgcagggtgccgtcagccttcagctcttccagagcggcattgatagcatcctccagagcggaaccctttgccagaccgatggcgtaatcctcctcggcgtagctggtgtccagaatgaccagaccggggttggcggcaacgaactcctttgcaggagcattgtcgatgacaactgcatcgacctggccattgttcagagcctgcacagcggtcaggccgtcgtcgtatgcgaccacagcgtcatcgccgaagtcatcagagcagtagatgtagccggtggtgccgcgctgggtgccgatcttcttgccagccagatcatcgggagaagcaatgtcagagccctcgggcacgatgatggactggatgccggtagcgtagctgtcggagaagtccatcacagccttgcgctcgtcggtcacggtaacgccagccatgacgatatcggccttgccctgctgcacgctcagcagtgctgcgtcgaagtccatatcatcgatctgcagctccaggcccagcttctcagcaatggccttggcggtgtcgatgtcgatgccctcgaactcaccggcatcggtggtcatctcgtacggagggaaggcagcgttggtggccatggtcagcttgccagcctcaacggtggtcagctcagcggcagcgctggtggaagcagcctcggaagaagctgcactgcttgcagtggaagaagcggtgctggaggcggaaccgccgcaggcagtcagagccagagcggcagcggtcagaccagcggcagccagaaagctgcggcgattgatctttttcatattcaaacactcctctgttgattgtataatttttcactttcccggcacgatgcgcttcatcgtgtcatcaaggaacaggattagtatatgttgtacaaataaaaaagtcaagtgttgtgcaaaaaatcggaacaaatgaaacccttttgaaaacatttatacatacagcggcccgttcttaatgtatatatacattttgcttctgtgtttctgtcattccgttgtattctgctagtgaatcttcccacggaacttaatcccggacattgacaccttttccttctaattggtataatcaggctggaagcatggtaaaagcagccaagctcaaaccgcgctgccccgccgggatgcggggagaaaggatccttctatgaaaaatcgtatactgaaagccctggcctcctttggtctgtccgtctgtgtgctggcaggcagttctgtggtcagcatggccgaagagaccccgggcaaaaccgagtgcaaagaacacacctggaagaccacgacagagtataagactgagtgtgtggagaccaccttccagcataagctccccgatggcaccaccgagacccttacactttgccccgaatgcggcaaagtaaagaataacacccagctgaccaaggtaaacggtgtcttctccaacttttccaacctgactgttcacaccgggactctgaaaaacggtgagcaggtaatgacagcagcattctactatcccactgttattgaacgagtcatctgcgaaaagtgcggcaccgtaaagagcgaggaggtcacccccgcccgtgtgatggcccagccggtcattgccagcatcgaggtacctgccaataccgtttccggctacagcctgatgcagatcaatgccgacggtactgaaacaccggtcagtgtctcctacaacaccgagctgaacaaggcatatttccggctggatgtcaccaccggggcccagctgctgcggatggttcccaccacctgattttcccgcataaccaacgagaccgcccggtgggcggtctcgtttttgttttatcggcgtttctgtggcagggggatgcccagcaccagggcaatgcccacggccagcgccacggcgatcttgaaggtggagatgccgtttgccagcgccagagcgttgtcgccctgaatgaagtagtaggcgctgtaatagatgcccgcaccgggcaccagcggaaagatgccggtgagcaggaacaccgtcaccggcgctctgagggtcatcgcaaggatgcgggccagcagcgtcagcggaatgaccgccagcagcgaggctgcaaaggcttccatcccgaacagctccgcgatctcatataccagccaccccactgcgcccaccagcccgcagtagggcagggtgcgcctggggcaggcaaagaggatggcaaaactcagggtgcccgccccggccagcaggaactgcagggccagacggcccagctgctccccggtgaaaagaagctctgtcataccacggccacccccttcaaaaaggcatagaggctcagcacaaggccggcgccgatggcgatgctggccgcaatgagcagcgcgtcgatcatccggatggtgccggacaggtaatctccctgcacaaagtcccggatgcccatggtaaaggcgatgccgggggtcaggatcatcagggtgccgatgatggcgtgactggcttcagtgcccagcaggctgcagcccagaatacagcacagggtgatgagggcggcggtggagatggttcggaacccgccccccacgccgtgccgcccgcagaacagcaggtaggcgttggccgcaacaccggccgcagcggcggcaagccctgctttcaggtcgccgccaaaaatcagcgcaaagcagaacgcgccgcccatgcccgccgcaagctgcacccagtccttcggaaaagggatgcacctggcctgagccagccgggtctcggcctcatcgatggtgtccacttcccccgatgcgatctggcgggaaagctgattcaccgccgccacccgccccaggtgggtggtacgggtgggcacgttgcgcacctcgctcatctccgccgtgcctgcgctggcaaaaatgccgttggtcagcacatagacatggaactcccgcaggtggaagctggccgccatgatctccatggtctgctccacccggaacacctctgccccgttctccaaaagggtctgaccggccgccataataaaatccatgatgcggcggcgctgttccccgtccggatacaattccctctctgccatgctgtggtctccttaaaattggcataaaaaatgaccgcctcaacgtttcagtgcctgagcggtcatttttcttgacgaatctatttgtagtatagtcaatctccggcggcttgtcaagcaggcacgccgttttttcagaacttgaacaggttcacgatccgctgccacaggcgggtgaagaagttgccttcctgcacatcggcggtggtctcggcggtaacatccgcagcggcaaccgtctcaccggtcttatagacgaacttcacgctgccggaagcatcctcggacttaccggcaaagctggtgtagtcctccagacggctggtcatctcgtccagcacggtcttcaggccatggatctgctcctcgtccagagcgccggtcagcttggagatgccctcctcattgaactggttcaggccatcgttcagccggaccgtgccatcgctgagctggcctgcgccatcgttcagggtggtcacgccgtcatacagggtcttggtgccatcggccagctgggcggcaccgtcctttgcggagtgggcaccgtcagcagcggtggcaacaccgttggtgtactggttgacactggatacgaaatactggatctgcgccagactgttcttcagggcacggacatctgcgatatcctggctgttctcagcctgatacttcagctcgtcatgcacggtctgcttggcgctggcagtgctcaggtcaagcatggcgctgaacatggaggggtcgtagctctgcatcagccgcagagcagcttccaggtcgtggttggtcttggttgcggagagatacagggcaatgtccagctggctgtccttgaagctgggctcctgctcccagacggtgcgcaccatcttcttgcgggcagcggccagtgtcttttcgttcatggtcagcacttcgtcaatgacggaagcgtagttgtcccaggtcatgggggtgtcgatcaggccgccctccatcagggtgctgttggcggaggccagaacaccatcggccacctgctgggcaccggcctgcagggcagcgttattagagctcagggtatccaggccgttggtcagctggcccagaccatcgtccagggcagaagcaccgctgttcagctgagaagcgccgtccagcagggccagggtaccgttggccagctgggaagcaccgtccaccagttgggcggcaccatccatcagctggttcatggcatcgttcagctggctgatgccatcggtcagctcgttgaggctgctcaggtcaaaggcattggtgcccagcgcatcggcgttggtggcacaggccagcatgacctgcggtgcggtcaggttctcgacatcggcttccacggtgacgctgtcctgcagataatcctccacagtggacaggtcatcgggcagcaggccgtccagagagtccttcacgccgggcaggcagacgaaagcggccacgctgctcttggcggcggattccagcattccgtgctcagcgctcaggttggtggcatcctgaccaaagatcacgcccacagcagtgatgagcggggtgacaacggtacgttccttgccgttgacggtcacggtgccggtctcgttgttggtcaggtcgacggtcacggtcaggtggccgctcttgccgatcaggttctcaaggctgtcggtcacgccgtccagcgtataggtgacatttgcggtgatgggcagggccttgtcggtattgcccttatagtacacgtcggtgtcgtcggtgttccagaccagcttttcgccgtcctgggtgaacgcggcatcgctctcggtgttctggatatcggtcagggtgctctcatcggtgacattggacaggccggaagcgctgtacaggtgctcgctgacggtggtggacttgatagagccgtcggcgttcatcacggcgtagaccgtctcgtccttggaataatcggccttggcggctgcaaaggcgggcagggccatgcctgcggcgagagtcagcgccagcgccgcactggcgaaacgaagcgattttttcatggtaattactccttatcagacttcttggcgttggaagattcagggaccagccagtgcatggtggtgtggcggatgacccagtccagcagcatcagggcggcgggcagaacgaccagaatgacagccatactgatcagtgcgccgcgggagatgagccggcagatgctctgcagcagctccatcttactgatggcggccacgccgacggtagcggcaaagaaggtcaggccgctggtcaggatggactggctgcagtgctccagcgactgctgggcagcttcccgcggggtgcggccatagctgcgctcctcgtgataacgggtggtcatcaggatggagtagtccacagtcgcgcccagctggatggtgccgatgacgatgctggcgatgaagggcagctgggtaccggtgaagtacgggatgcccatattgatggagatggcggcctcgatgctggcaaccagcagcacagggatggacaggctccggaaggagatcaggatgatggcagcgactgccatgatcgaccagacgttgacgttcttgaaatccacgtccgcgacctcgatcaggtccttggtcatggcaccctcgccggtgatgacaccgttggggtcaaccgccttgataaggtcgttcatctcggtcagctggttgttgatggcatcggtaccggtcttataggagctgttggccagaatgagcttgtagccgccggactgcaggatctcggtcacgctgtcgggcagcagctcggtctggaagcccggaccggtgatggaatccaggctcaccacctgggtgatgccatccacatccttgagctcatcgcagaggtcagacacctgcgttgcggtcaggtcctcatccaccagaataaagtgggaggtggtcatgccaaagtcctcgcccagcttgttggtgccaacgatgccggtcagatcctggggcagcgagtcgaacagggtgtagtagacctcggtcttttgctgggccaccacaaagggcaccagcagcacaagaaagacggccacgatgggcattgcgtgcttggaaacaaagtagctgagcctggtcagcttgggcacgatggtgcggtgcttgtacttttcgacctgctgatcaaaggtcaggatcaaagcaggcaggatgacgatggtgcagatgacacccagcgccacaccctttgccataacaacaccgatatcgcggcccagcgtcaggcgcatggcgcacagtgccaggaagcccgcaatggtggtcagggaggaagcggtgatggaggtcatggtcttgcagatggcggtcaccatggcttcctcgttggaggagcggagttccttttcctcctgataacggtggagcaggaagatggagaagtccatcgtcacacccagctgcagcaccgtggaaagcgcctgggtgatgtagctgatctgacccaggaagatgttggtgccaaagttgtacgcaatggggaacagcaggcccagcatgaacagtacgggcgtgatggtgctctccagcgagaggaacagcaccagcatactggcacccacagcgcacaggatgtacagcggcatctctttattgatcagtgccttggtatcctgcaagatgacgctcatgccgccaaagtagcagtcgtgccgcagcacctgtttgatctgctggacggcgttcatcgtctcgtcgctggcgctgggcgcatcaaaccggacgatgagcatggtggaatcgtttttgccgaacatgaactgctggacatccgcgggcagcatctcggtggggatgctggggtcgatgacatcgctgagccagaaggtctgtgtgacaccgggcaccgcatcaatgtccttcttcatggcgatcagttcattggtaggcaggccttccaccgtgatcataccggtggaggccagatggaagtcgtcctcaagcgctacctcgccgatcatggagtcgagctcctgcggcagataggtcaggacatcataattgatgcgggtagcaaccgcgccgattgcggaagggatcaacagcaggaccgctactgttaagatcagcttgcgcagacgcacgatgctctgtgcgatctttttcatgggaaccctccatacgaaagttgattggatctgccctaaaatgacccgtggtcatttctgagcaagcactattataaccaatcgacgcaaggtgtcaagataaaaaatgaccaaaagtcagttttcttatcacaaagcaaaaattgtatagcttgtccgggggcttttgctcttgcgctcttcccttctccctgctaaaatattgtttacacgacaaaacaacgtcagaaaagaggatgcagcaagctatgagcaccgtggaaggaaagaaacaggaaaagcgccgcgcgcttctggatgcagcttacgagctgtttctggagcggggcacctccaagaccagcgtggaggatatcacctcccgcgccaaggtgggcaagggcacattctacctctattttgccgataagggttcggtcacgcaggccctgctggcccgggtgagctaccagctgctggacaacgcctgtaccgctgccgagcagcacgccgccgagcttaccagcttccccgaccagatgatctttgtcattgaccatatcatcgaagccctgcgcgcggacaccctgatgctccgcttcctggagcgcagctttgtctggcccgggctggatcagatcgaagccagcggcgaggccgagccgctgatgcgcaaggtcctccagatcgtgatgtgcagccccgagatggcgggccgcaccgagcgggagatctaccagcgcatcacagccttgggcagcatgtgcatatcggtgtgctatacctccgtgttggagggcaagcccgacaatatcgacaacatgaagcccatcctctatgacatcattcgccgggcgctctgagcgcacctctcctctgccagcccccgcaaaggggcctttgcgccaatcctccggggcaaaaaacggaaaaggcagacttttttcaaaaaagcccttgcaattgcgcaaaaaatgtgatatcatactcaagtcgatacgacatctggacggttagctcagctggtagagcatctgcttgacgtgcaggaggtcacaggttcgagtcctgtaccgtccaccatacagtttgtacccgaacccgattctttacgaaaaagggttcgggtacttttttgtttcacaagatgttctctatgccgagagtatgcagaacggtaaacaagaacgaacaaaggcaggataccaccatcacggtgacaccctgccttttgtgctacaaggatattctgggggcgatcgctgcgcacaaagtgccttaagcccctgtgtttgcttcggtcagcacaaaggtcagctccgctgtggcggcgcacttgccatccacataagcagacgctttcccgatgcccaccgggccgcgctgttccaccagctcacaatggagcgtaagaacatcccctggggtgacctgtttgcggaagcgggcattcttgatgccgccgaagagggccagtttgcctttgttttcggggatgctcagcgccgcaacagctccggtctgggccagtgcttccaggatcagcacccctggcatgaccggctggcccggaaagtgaccgcagaagaattcttcattgcgggatacgcacttgcggccaatggcccactgacccggctcgtagtccaggatacggtccacaagggcaaaggggtagcggtggggtagaagggctgcgatctgctcactgttcagagcgtttgcgttctcccgcacggtgcgcggttctgccatggctcagccctcccatctgcgcagggcgatgcaggcgttgtgcccgccaaagcccaggctgttgctcagcgcgtaggtcatggcctgggcacggcctgcattgggcacatagtccagatcgcattccggatcaggctgctcgtagtggatggtgggcggggcaaactggtctcgcagggccagtgccgtgaacacggcctcgatgccgcccgcaccacccagcaggtggccggtcatgctcttggtgctgaccacggtcagctgctttgcgtgctcaccgaacacggcatggatggcagccgtctcgcaggcatcgttcatgtgggtgccggtgccgtgggcgttgatgtgatccacctgctccggggcaatgcctgcatcggccagtgtcagcttcatgcagtcgatggcacctgtgccgccgggagccggtgcggtaaagtggtaggcatcgcagttggcaccatagcccaccacctcggcgtagatatgcgcaccgcgtgcccgggcgtgctccagctcttccagaaccagcacaccgctgccctcgcccatcacgaagccgccgcggcgggcatcaaagggcaggctggcagcatccgggtcggtggcggtggaaagcgccttcatgctggtaaaaccgccgatgcccagtgggctgatgcagctttcggcaccgccgcagaccatggcagtctcgtaaccgtcccggatgcggtggaaggcatcgcccacggcattggtgccgccggcgcaagccgtgaccgggcaggtgcacatgcccttcaggccaaagcggatggccacctgtgccgccgccatgttggcaatggacatgggcacaaagtaggggctgaccttctccatgcctttctcttccccgcgggtgtgctgctcctcgatggtgggcaggccgccaatgccgctggaaaggaccacaccgatgtttttggcctctgcttccgtgttcaggccgctgtcggcaatggcctcggctgcagcagccagtgccagcagggtgaagcgtgccatcttgcgggcttcctttttgtccacaacggtctcggggtcaaagtttttcacttcaccggccagcttgcacttgaaatcggtggtgtcaaactgggtgatggggccaatgccgcaccggcctgcctttgcggcagcccagctgtcggcagcagtgttgcccagcgggttcacggtgcccagaccggtgatcacgactctgcgtttttccatagagaatttctccttttacattgccatgccgccgtccacacagagcacctgcccggtgagatagctgctttgttctgcggcaaaaaacgccaccgcgtttgccacgtcctccggctggccggcgcggcctgccgggatgtcctttgccatttcggtgcggacagcctccggcagggcggcggtcatatcagtttcaataaagccgggcgcaacagcgtttactgtcacattgcggctggccagctcccgggccaggcttttggtcaggccgatgagcccggccttgctggcggcgtaattcgtctggcctgcattgccccgcagggcaacgacgctgctcagattgatgatccggccccagcgctggcgcaccatccggcgggccgcttccttgcagcagaggaacgcacccttgaggtttgcgtccagcacagcatcaaagtctgcttcggacatgcgcaggatcaggttgtcccgggtgatgcctgcattgttcacaaggatatccacccggccaaaggcgttcaccgcctcctcaaagagctttttgcagccctcggcggtggaaacatcggcctgcacggccacagcctgcgcgccttcggccctgcagagagacacggtctcagcggcggccgcttcgccgtggcagtagttgaccaccacatggcagccctgccgggcaagctgtacgcacacggcccggccgattccccggcttccgccggtcacaacggcggtacggatgatggtttcttcgttcattgttcttccttccatgcgttcaaaacggtgtccagctgcgccggggtctccaccgacacacaagtcacaccgggcagagtctttttcacaaagccagagagcgcattgccggggccgacctccagaatgtgatccacacccagctcacccagacggtgcagggtgtcctccatgtagacactgctctgtacctgccgcaccagcagggccgggatgctgtcgctctcggctttttcgcggcccaggcagttgaacagcaccggaacctgcattgcgccaaagggttcggcggcaaagcgctttgccagtgcatccccggcgggagccatcagacgggtgtggaacggtccgctcaccttgagcgggatgcaccggcgggcaccggcctgctttgcaagctctgcagccttgtccacggcggccttttcgccgccaatgaccagctggcccgggcaattgtagttacagatctgcacacagcccagcgcggatgcctgctcacagcattctgcaaggggaacccggtcgaggttcagcactgcggtcatgccgcagtcgatgccgctggccgcgtcggccatggctttgccgcggtaggctgccagctcaatggcctgcttggcggtgaatacaccggcggcttccagcgcggaatattcgcccagggagagaccggccacataagcgggcttgaccccctgctcggccagaacggcggatacgccgcaggcaaaggccaccatgcagggttgggtgtattcggtctgattcagaacgccgtccgggtcgtcgaagcagacgcggtgcagatcaaacggaaggtctgcagcgtcgaacgcggcacggaaagcggaagatgcttcgtaaaattctttgcccatgccggggtgctgggcaccctggccggcatacaaaacggcaagcttcattggttttgcctccattcggtcacaagttcatccatcagctcacggacagtgtacatccggtccagcctgcccacattggccccgcagaagaaaagtccttcctccaggttgcccttgaccgcttcgatcagtgcatgggtgatgcagtagggcaccttggcggggtcgcaggtcttcaggcagcgggcacagtgccggggcgggaagcgtctgccctccgccatggcctgcaccagcggcgtgttcagcgcccggcccggcatcccgaccgggctgtggatgatgcgcacatcctcagaactggcgttcagcagaacgtccttgtacccttgggatgcatcgcactcgtaggtggtgataaagcgggtggcaagctgaacgcctgcggcacccagtctggtaaagtgagccagatcggccccggtgtacacgccgcccgccacaaacacggggatgctgtggccgaactgcgcctcatagggctttacctcggccagcacctccggtaggatctcatccagcgtctggcagcttccggagaacaggtcctgctccgcaaagccgagatgaccgcctgccttgcagccctcaatgaccacaaaatcggcggtgcggccgaactccttggcccagcggcgcaggatgagctttgccgcccgcccgctggaaacgatgggcgcgatggcgacctccatcgtgttcacaaggccgggcagctccagcggcagaccagcgccggacaccacagcgtccacgcccgcttccacagcggtgcggatggcggcggcatagtcctgcgtggccaccattgcattgatggccaccataccggcaccgtttgcgatctgctttgctttccggatctcagcggtcagggcgcggtggttggcgctggccgggtcacgggcaaagtccggctcccggtagcctgcatcggcggtggagatgcaccccatgccgccgcaggccgccacggcaccggccagcccgcccagagaaacgcccacgcccatgccgccctgcaggatgggcacagacagggttttctttccgagcgtcagcattcctcgctcagcgcgtggatacgctgcctcccgccgttccacaggtcatccagaatgtccgccacagggcgtacctcgtggagcattccggccacctgaccggccatcagactgccggtggaggtgtcgccttcaaacacggcccggcgcagactgcccagggtgtacttttccagctccatcttatcggcaccggccttttcctgccggacatattcacggctcatccggtttttcagcacccggaccggggaaccgccgatgcgtccggtcacgatggtatcgctgtccttggcattgagcagggcagccttgtagttttcgtggatggggcactcctcgctcaccagcaggcaggtgcccacctgcacgccgcaggcacccagcgccagggctgctgccagctgacggccatcggcaatgccgcccgccgcaatgacgggcagatccactgcgtccaccacctgcggcaccagcgccatggtggccatctcgcccacatggccgccgctctcggtcccttcggcgatcacggcatcaatgcccagcttctccagatgctttgccagcacagcggcagccaccacggggatcaccttgatgcctgccgctttccacatgggaacatatttgcccgggttgcctgcgccggtggtaaccacctgcacgccttcttccacaacgatctgggcaaactcatctgcctgcgggtgcatcagcatgatgttcacgccaaagggcttgtcagtgagctgtttgcaccggcggatattttcgcgcagggtgtcggcattcatgccgcccgcaccgatgatgcccagtgcacctgcattggagcaggatgcggcaaattcaccggtggcaatgtttgccatgccgccctggatgatggggtattttgtgcctaaaatttcatttaaaagtttcatagttttatcctatcggtaagcgtcctcgccctctcagtctcgctctgctcgacagctctcccaaggggagagcccttggcagtacggtaaacttttcggttttgccaaaggctcccactttgggggagctgtcaccgaaggtgactgagagggcgagcccgtttgccgaacatgatttttactctttgtattgaaaaatcgcgccgccccaggtcaggccgccgccaaagccgatgcaggccagcggtctgcccggggtcagctgcccgctctcggccagctcgttgagggcgaccggaatgctggcggcgctggtgttgccgtggcgatccatgttcttataaaattttgccgggtcggcctgcagggccttgatgcagtggtcgatgatgcggctgttggcctgatggcagaccacccacgacagatcttcgagggtcagccgggtctcgtccagcaccgtgtgcaggcacttgggcagggcatccaccgcaaagcggaacaccgccttgccgtccatggtgatgggggcagagccttcccggctcggcccgcccgcatggaggacatcactgccgcgtgcccccagcgtcaacgcaaagggggtatctgccagccggaaaatggcggctccggccccgtcgccgaacagcacgcaggtggagcggtcggtggggtccatcaggcgggaaagtgcttcgcacccgatgacgagggcatactgcccgcccagagtcgtcagcattccccgcgccacggccatgccatagagaaaaccggaacaggccgcgttgatgtccagcgcgggccggttttcgggcaggcccagcgccgcctgtacctgacaggccacgctgggggtggcatccggggcagaaagggtcgcgcagacacagcaggcaatgtccgccggggcaaggccgctgcggtcaagggcctgccgcgcagccgcaatggccagcgtggcggcagattcgtcctcggtacaccagtgccgggtgcggatgccggtgcggctggtgatccatgcgtcactggtgtccaccatgcggctcagcgcgtcattggtgatcgtccgtccgggaagtgccccgccggtggcgatcagctgtaaaccattcatgcgttcctcgtttctccgatctggcggtactttttatagcgctgatcggccagctgccggtcgctcatgcggcacaattctttcaggtgggcgcgcagagcggcatccatgcgctcaaacagggccgcgtggcagcgctgggcaccgcccaccggctccgggatcacttcttccacgatgccgccgcggtacagatcctgcgccgtcagcttcatcatctcacaggcctcaccgctgcgggaggagtccttccacaggatgctggcaaagccctcggggctcagcaccgagtagaccgcgttttccagcatgaggatgtggttggccacacccagtgccagcgcgccgccggaggaaccctcgccggtgaccacggcgatgaccggcaccgtcaggccgctcatctccatcagattccgggcaatggcctcgccctgcccccgctcctcggcatccttgccggggtaagcgcccggcgtgtcgataaaggtgatgatgggacggccgaatttttcagcctgcttcatcaggcgcagagccttgcggtaaccctccggccccggcattccaaagttgcaggccagattttcctccagcgtggagcccttgcggtggccgatgaccgtcaccggcatcccgtggaaacgggccacgccgcccagaatggccgcgtcctccttgcactgccggtcgccgcgctgctcaaagaaatccgtgaacagggcagagatcgtctcgtcgatgtgcggacgctccgggtgacgggccagaaagacccgatcctcggcagtcagcgggccgcaggagcgcagaatctcgtcctcttccaccgccagctctgccagttcggatgcatgggcggtaatggcctccatgtcactgccgctgcccttcagcgcggcgatctgtgcgtccagcggggccagctgctccaaaatatcttttatcattcgtgtttccctccggcatgaagctgcaggacctggatcagcgtatcccgcagctgactgcggggcaccacctgatccacaaagccgtgttccatctggaattcgctgcgctggaacccggcaggcagtttttcaccgatggtctgttcaatgacacgggggccggcaaagccgatgagtgcccccggttcggccagcatgatatcgcccaggcttgcaaagctggcggtcacgccgccggtggtggggtgggtcagcacgctgacgtacagcccgccctttgccgaaaagcgctggatggcggcgctggtcttggccatctgcatcaggctgaaaatgccctcctgcatccgcgcgccgccgctggccgaaaagatgaccagaggcaggcgcttggcagtggcgtactccacggcgcgggtgatcttctcgcccacagccgtgctcatgctgcccataaagaaccggctgtccagcacggctgtcacacaggccacgccgccaatgcggccgacggcggtgacagcagcctcgtgcaggccggtcttgttctgggcggcggcaagtttttccccgtatccggggaagttcagaacatcctgcggatcaaggtcagcgtccagttcccggaagctgccgtgatccagcaccagactgagccggtaatacccgccaatgggcatgtgatagccgcagttggggcagacatacaggcttttgccccacagggtgcgggcagcgcggcggccgcactgcttgcactccacaaactgcggctcgtgccagacagctccggcatcccgcttggccttcagctggaaagtgcgctcccgcatccggttggggagcagatctcggatatcattcatcgcacgtttcctcagatatgtgcggtgatgtagttgtagatgtcacccacggtcttgagctttgccagctcctcgtccgggatggacacaccgcaggcgtcctccagcgccatgttcagctccacggcatccaggctgtcggcctccagatcctcggtcaggctggcctccatggtcaccttgtcctcctcgcagttcagggtgtcaacaacgatcttcttcatttcttcaaacgtcatggtaatattctcctttgattggtttgtatttttattatctaaaaagtttgaggtttcttgcgaacacgaccattatatctgaatcgtcggataagtcaagaataatagctaaaatattttatcttttacaattctgacacactttcctccacaggggcagttcctcttttccattgccctttttccccaaacgtgctaatatgggttcagcactcagacaagaaggaacgaaaggatggatcccatgaaattcagcgaaatgagttatacccgcccggacattgatgccctgctgggccagtgcaaggcgctggccaccaaggccgccggggccgccagcggcgaggagctggtgaatgtttactacgagcagagccgcgcctttgccgattacagcaccgccgcacagctggcaagcatccactacacctgcgacacccgtgacgcttattggaaggccgagcaggatttctttgatgccaacggtcccgccgtggagaacgcacgggtggagatcagccgggcatttctggccaacgcccatgtggacgcgctgaccgaagcctttggcaccacctgcgtagccggtatgaagaacgccgtgctgggcatggatgaccgcaccgtggagctgcagaaggagtacaacgcccttgtcagccagtaccagcaggtatacggcggcgcactggtcgagtttgacggcaagcagctgaccattccccagctgggcccctataaggagaacctggaccctgccgtccgccgcgccgcctacgaggccgaggcagcgtattttgatgcccaccgtgacgagctggacggcctgtacaccaagatcgtcaagaacctgaacgcacaggcgcagatcctgggctaccacgattacagcgagctttcctatgtacggatgaaccgcatcggttacggccctgccgagatccggaagttccgcgaccaggtggccagcgatgtggtgcccgagctgaaaaaggtgatcgagctgcgctgcaagcgcaccggcatctcccacctgaccttctccgacctgcctgtggcgtttcaggacggcaacccctctcccatccccggctacgatgcccggatggccgctgcccgcaccatgtaccacgagctgagccccgagaccgcagaattcattgacttcatgcaggacaatgagctgttcgacgtggagagccgccccggcaagatgtccggcggctatatgaccagcctgcccacctacaaggccccctttatctttgccaactggaacaacacctctgctgatgtggacgtgctgacccacgagtgcggccacgcctttgagggctatgtggccgagcgtgaccccaaggtccccgcagacctcgagtgccccggcatggagagcgccgagatccattccatggccatggagttcctgacggctccctggcaccatctgctctttggcaaggacactgagaaatacgccctgctccacgccgaggacagcttcctcttcctggcctatggctgcattgtggacgagttccagcacaggatgtaccagaaccccgacctcaccccggacgagcgcaatgccgtctggctggaactggagcacaagtaccgcccctggatcgatttcgacaacctgcccttctatggccgcggtgccggctggcagcgccagctccacatctatgagtgccccttctactatattgattactgcctgtccaccatggccgcgctgcagttcttcctgctgagcctcaaggaccacaaggatgcctgggagcgctacctcaagctggtgcgccgcgccggtctggccagctacacggagctgatgcagaccgccggactgaaggttccctttgaggatggctcgatcaaggccatcgcccagcagatgggccagtggatcgcagagcatcaggtgtaaggcttaaccccccaggctcgcattcgctcgccagcccccctagtagtggggcctttggcatataggaaaactcgcagagctttccgtaacgccagggccgcccctattaggggcggtggcaatgcgaagcattgacggtggggtttacctcttgcaaaatccgctcttttctattatgatagaaccaacaagatcccattgcggggtgtgaaaaggagcggtattgcaatatggcagaacaaaagatcaagggtgtcaaaaagttttttgaggagttcaaggcctttgccatgcgcggcaacgtgctggatatggcagttggtgtggtcgtcggctcggcattcacggcaatcgtgaattctctggtgggtgatgtcatcaatccgctgatcggactgttcttcaacaacgatttctctgaagttgctgtcaagatcggcgatgttgatctgaagatcggctctttcatcagcgcgatcatcaatttcctgatcgttgcctttgtgctgttcctggtgctgaaggccttcaacgccgtgttcaacaagaagaaggaagaggccgaggaagctcctgcggagccgaccaccaaggtctgcccctactgccagagcgagatctccatcaaggccgtgcgctgcccccagtgcacctccaagctggaaggcttccccgagatcaacgactgagttccctgaaaagcacagcgcccccgttcactgcaagatcgcagtgagcgggggcgctttcttgtgaataggaggtggattttatcgcaaatacagactatggggatatacggagcggcacaaactccataaccggaaagaaaaatttccataaaacgccaaaaagccctcggataagtcatacctatacaagaaagtttgaactttccgtgaattttctgtgtttcgaccatggacaggtgggaacagttctgctacaatgggagctgttctttccgccggttcccacgcggcggtttttatttttactataacacaggaggaactttcatgttagaaaagatctttcacctgaaagaaaaccacaccgatgtcaagaccgaactcatggcgggtgtcaccacctttatgacgatggcctacatccttgcggtcaaccccagcatcctgtccgcttcgggcatggatgccaatgcggtcctgatcgccacctcgctggcatcgttcgttggcactgccctgatggctctgctggccaactatccgttcgctctggctcccggcatgggcctgaacgcctacttctcctacacggtcgtcctgaccatgggttacagctggcagctggccctgatggccgtttttgtggagggcgtcatcttcattgtgctgagcctgaccaatgtgcgtgaggccatcttcaacgccatccccatgaccctgaagagcgctgtcagcgttggcattggtctgttcgttgctttcgtcggcctgcagaacgcaaagctgatcgtgaacagcgattctacccttgttacctatcagcacttcaagggcgagaccttccacagcatcggcgtgggtgcgatcctcgctctggtgggcgtgctcatcaccgccatcctgctggtcaagaaggtcaagggcggcatcctgtacggcatcctcatcacctgggtgctgggcatcctctgcgagctgaccggcatctacatccccaaccccgatgccggcatgtacagtgtcatccccaccagcttcatcagcttcgatttctctgctctgggcaagacctttggtcaggtgttcaagaccgatttctccggcgtgggcatcctgaacttcttcgccgtgatgttctccttcctcttcgttgacctgtttgataccctgggcaccctgatcggtgttgcttccaaggccgacatgctggatgaggagggcaagctgcccaacatcaagggcgcgctgatggccgactccatcgccacctgcgccggtgccgtgctgggcacctccaccaccaccaccttcgtcgagagcgcttccggtgtgaccgagggcggccgcaccggcctgacctccatgaccaccggtgttctgttcctgctggccgtggtgttcagccccctgttcctgaccatccccagctttgcgaccgctccggccctgatcatcgttggcttctacatgatgggttctgccctgaagatcgagttcgacgatcctgctgagggcatccccgcattcctgaccatcctggcaatgcccaccgcatacagcatctctgagggcatcgccattggtgtcatctcctggaccctgctgaatgtcatcaccggcaaggccaaggagaagaagatcagccccctgatgtatgtgctgaccgttctgttcatcctgaaatacgtcctgctgtaacaggcatttgcagcaaacagaaagccccggctccggccggggctttcgtgcgtttattggttcctgtgcgggtggggcgggcagggttcagccaccgaacaacccgaaaaagctggtgtgcgtcatgcccagcaccagaaacagaagaatgagggcaaacagcaccccaatgatgatgtccatctggtggaccgtgagggggaatttatcgtagagcttttccttggggttgacgaaattcgggtcgttgttgtccagcagggtcttttttctctcagcgctctgggctttggcggcggcaagttctgcctgctccttttccagctgggcctcccgctgggcaagcagtgcctcacggcgggccagctcttcctcccgctgggtctggttcgtttctgccatggtggtatcctccggcgttttttctaccagtataccatagaattgtgacagaaaaaactcctcccgcaaaaagcggccttattccgccagcagatcctccaccacatccatcagctgagacggatcgagctggcacgcggtacagcgcgcagccaggcgaaggacctgcactggggcaacggagacatctgagatgaaccgcagttttcggtgtcgtccgtgagatgtagaatacgcggcgatgccaaaggatgtatacgcaccacacgcgggatgataaagtcgttccataacacaatgataccaaaacacaccaatcacctctctatcaaaattgtcacgccgctttgaaacggctgcgtgaatgcaggttcactgcccacaaaatgttctgacaaaatttatataccatctcttggcttcaaaataaacagccaaaatttcaaaatttggcggcgtgttttgcatgtccggtgaaaccggtggtgcagtaaaaatacgaactggaaaatggaaatgaatatttttacggaatatcgtagaaatttagaaaaaatcaacttcacgcagcaacagatgaaagaatgttccacagaaagccgaaagcataaaagaaaaatctttgccgcagcttaaccactttttgatagaaaaagttgcgaaatcggtcgtaagatcgagctttctggtatattacttgttcgctgtgcggataaggctgctcattctgctttgccacaagatcgtctgccgcagaccccggcactgcccttgtctgaaatgctttcactccggatgcaaaccagatgaaaaatccgacgggccgtatcacttgactttccccttgcaggggagtatactccggggcagtgaaatattcggctatgacgagaaagagtacccggaaagaatgctgcagagagctgccggatggtgcaaggcagtgcagggtgtccgtgggaagatcctctccgagctttccggctgaatgggcggcatctgcgccccagtaagcgggaacggcaggcccccgttatcacgggccgcgcattgttggatgcgcactgaggggccgggctttgcaccggcaataagagtggtaccgcagaggatctacgcctttgtctcttacaaaccgtaagggacaaaggcgttttttatttgcgggaaagccattttccggatgtttcattgcctttgcatccgcaaaaatcaggacctggaaaaggagagtttaacatgaaaacactggaaaaagtaagcgattttgtaggcaagtatatggctggcatcgtcattgtggtggcagcgctggccctgttcttccccggcacattcagcgtggtaaagaccgcatgggtcaacaccctgctgggcatcgttatgttcggcatgggcctcaccctgaagccggaggatttcaaggtggtgttcagccgcccgaaggacgtgatcatcggctgcattgcacagttcacgctgatgcccttccttgcatgggcgctgacgcaggtgttccatctgcccactgagctggccatcggtgtcatccttgtgggcacctgccccggcggcacctcctccaacgtgatgacctatctgtccaagggcgacgttgcactgtctgttggcatgactgctgtttccaccgtgctggctccgttcctcaccccgctgctcaccctgctgtatgccggtcagcgcgtggaggtgaaccccgtgaatatgttcctgtccatcgtcaaggtggtgctggttcccatcgcactgggctttgtggtcaaccacttcttccacgccttcacccagaatgccgtccgtgtgctgccgctgatctccaccactgccatcgtgctcatcatctgcgccgttgtgtccgcaaactccgctaagatcatgaccagcggcctgctgatcctggccgtggtcatcctgcacaacctgctgggctacctcaccggctttggcgtgggcaagctgctgaagctggattccaccaagtgccgtgcaatttccatcgaggtcggtatgcagaactccggtctggccacctctctggccgctgcccactttgcacagtatccgctggcaaccatccccggtgctgtgttctctgtgtggcataacatttccggtgctgtccttgccaacttctttgcccgcaccgcagagaagaaggactgatggttcataagaacctcgaacgcccggagaccccagtataactttcaatctgctgaatgaaaccgaggatacgataatatcaaaaggcagggtaccaccatcatggtgataccctgcctttgctcatttaccgttcggttgctgcggtaaacttcaataaacaaaaaagtacccgaacccttttcctaaaagcgtgaaagcaagaaccgtcccgtggtcacaaattttcaattcttgaaaatttcttgtccatccgggacttcacttcttcaacttttgtgagtttctgaagtacttttgttggggcgtgcctgccccaaaccctgccgaagcgatagggagattgacaagaagttagtgaaatgttatctttgaacaaagcagaaacctactttttgaaaggagatattgtcatggcaaaagtgtgtattaactgcgggaagaagattgggctgatggtcaaagaaccgccacttgaactttgtgggggtcatgttctctgcgatgattgtgcggaacctattagaagacggattggaaagctgtacaatttgaaaactaccgcagaattcaacgaggccaaagctgaaattttgcaggaatgtaagaagcactacagtaccactgttactgatgccgttgaggaacgaatcaacgatatttacacaaattctcttagaacacagttagaacccgaagttgtagctgaagaaaatgcgcaaattgaaaaagcaaagcgtgaagctgatttggcctttaagaagctggccgaaagtcaaatgcttaccacaggatatgactttagtggatataaaatcacgaaatacacaggaataataagtggcgaagtcgttcttggtacaagcttcttgtctgaattttcggcttctctttctgaccttttgggaggccagtcttgggcatttgcagacaagctggacacggcgaagaaagccgccattgacaagctaacctataagtccgcagaaaaaggaggcaacgctgttattggcattgactttgactacat

SEQ ID NO: 774 - DNA, 10284 bp, unidentified
  source 1..10284: mol_type = unassigned DNA
atggaaaaattcagtgtcaaaaaaccgtttacggtgctggttggtgttgtcatggtcctgctgctggggttcgtggccctcagccacatgcagaccaacctgctgccggacatcagcacgccgtacctgatggtggtcacggtttaccccggtgccagcccggagcgtgtggagagcgaagtctccgacgtgatggaaaacgccctgggtaccgtggcgggtgtggacaccatcaccgccacctcggcggaaaactacagcctgctgctgatgaagttctccgagggcaccgatatgaacagcaccatggtcaaggtgtccaacaaggtggaccagacggtgtccagcctgccaagcagctgcctgaccccttccatcattgaatacagcatgaacatgaatgcctttatgacggttgccatcagccgcgaaggcagtgatgtctacgacctctccgatttcgtcagcggcacgctggtgccctatgtggagcgcaggggcggcgtgtccagcatctcggccaacggcctcatcgagaagatggtgcaggtgcagctgagccagtccaagatcgacgtcatcaacgagaagctgctagagaccatcgacgtccagctggcggcggcccatgagcagctggaagccgcccaggcccagatcgaagccggccgcaaggagtacgaaaaacagctgaaaaactacggcgacatggtctccgataccgtgatggcccagatgggcaccgaggtgggtgccgccgtgaccaccgtccgggataaggcgcaggccctgctggacagtgtgaaccagctgatcgccgtggtcaacgagccggagatccagcaggcgctgatcgaggtgcgcgatggcctgcagcatgtggtggaccagttcaacgagacgggaatgcgggacattgactccctcatttccatcatcggcgagctgcgcgatatcaccgataagttcaccgttgccctgcagcagctgcagaaccgcctgaacctggaaacgggtgccgacggcagcaccgccgaagatctggcgggcgacctggaagtgcagcagagcatgagcaccatctataaaacgctggaagataccatcaaggccatggacaatgtgcccgagctgatgaacacgttctcccaggcgctgggcagctattccagccagcagctctccgcgtacatgaagtttaccgaagcccgcgagatgctgaacaactaccagacccagtacgacgaggccaacgcccagtatgaggcggccaaggagaaagccctcgccagtgccgatgtggccaagcagctggatatcgacacgctggccaccctcatctacgcccagaacttctccatgcccgccggctacgtcaaggactccagcggaaaatcctggctgctgaaagttggcgaggagtacgacagtgtggccgatatcgagggcgcgctgctgctccatgtggatggctttggcgacgtccgcctctccgatgtggcggatgtggaagtcattgataacgccgaggccagctatacccgtctgaatggcgagcgggccgccgtgctcaaaattttcaagagctccacggccagcgccagcacggtttcggatagctgtctggaagcgttcaaggagctggaggcccagtacgacggcctgaaagtggtcgttctgtccaaccagggcaactacattaccgttattgtcaagagcatcctcaccagcatgattgtgggtgccgctctggccatcatcgtgctggccttcttcctgaaagatatcaagcccaccctcgtggtcggcatcagcatcccgctgtccgttctgttcgccatcgtgctgatgtacttcaccgggctggacctcaacgtcatgacgctggcgggcctctccctcggcattggtatgctggtggataactcggtcgtcgtcattgagaacatctaccgtctgcggggccggggtgtccctgcaccccgcgcggccgtgcagggcgcaaagcaggtgggcatgtccattgtggcctctaccctcacctcggtctgcgtcttcgtacccgtcatcttcacctccgagacggtgcgcaacctgatgcagcccatgtctctctgcatcggctactgcctcatggcctccctcatcgtggccattaccgttgtcccggcggcgtcctccaccgtgctgaaaaaggctgagcccaagaagctggcctggtttgagaaagtgcaggacaagtacggcaagagcctggagtggtgcttccagcaccgcgccatcccgctgggggctgccatcgttctgctggctttctgcggctggcaggtcttctccatgggcatcaccctgctgccggagatcactagcaacgaggccattgtggagatctcgaccacggcggatatgagcaaagaggattcttacgatgtggccgggcaggtggtggaagccctgatggcggtggaccatgtggaagaggtgggcatcaccaccgataccagcgtggccggcatcgacgttggccagctgggccttcccaaggctattaccgacctgctgaacgcggccaacagctacggcagctataagatcaatgtcaaactggatgagagcctctcctccacccagatcgaaaccgcccgtcaggcgctggaagacgccctgggcagcgtggaaaactgcaccggcaccgtggaaatcagcggaatgcaggagctcaccagcatgatggccaacggcctcagcgtcaaggtctacggccccgacacggccaccatcacccagctggccgataaggtcgtggagatggtcaacaacaccgagggctttaccaacgccaccaccggcctgggcaacggcgacgccactattgagctgcagatcgaccgtgataaggtccgtgcctatggcctgaccgtcgcgcaggtgtatcagcagatcgcggcggacctgaccaccaccaccaccgccaagacccccgttgtggtggacggcacttccatgacggtccagatcaccgataacctggaccccgtcaccaaggaaaacatgatgggcattacttttgagaccaccaccatgtctgcggatggcaccaccaccacgggcacctgtcagctcagcgatattgccacctggaccgtgggcacggcccccgactccctgaccagcgagaaccagacccagttcgtcaccgtcacggcggacactctgcccggctacaataccaccgtgcaggcccgtcaggtcaagaagacgctggacgcctacaccctgaccgatgagatgccggagggctgctcctttgacgtgggcggcgagtccggcaacgtcaacaagatgaccaatgagatggtgcagtggctggcactggccctgccgttcgtctatctggtcatggtggcacagttccagagcctgctgtccccgttcatcgtgctgtttaccatcccgctggcctttaccggcggcctgctgggaatgctgctcacgggccagcagttgaccatgatctctctgatgggcttcatcgtcctgatgggtaccgtcgtcaacaacggcatcgtctttgtggactacaccaaccagctccgcctgggcggcatggagcgccgcgcggccctcatcgccaccggcaagacccgtatgcgccccatcctcatgaccaccctgaccacggtgctggccatgctccagacggccctgagcaacgatatggctggacagctgatgcgcggcatgtgcgtcgtcatcatctgcggcctgagctacgccaccctgatgaccctgtacatcgtcccgctgatgtacgacatcctcttcaagaagccgccgctcaacgtggatatcggcagcgaggaagacctggacgacatcccggacgacgcggccgagttcctggcgcaggccaacgcgcaagcataaattcccctgcaaacaaaaaaatcctcatggagcgctccatgaggattttcttttgcaaaactaccaaaaaatctccaaaaatattggctgttaattctaaaaagttctgcccacaagcgtgtgaaactatgatataatcataattatgaaagatacactcaggagtgcgcctgctgggtgtgaaccaaatgatgaggaggcgagcgcaatggcacagtttcgttccaagccttttggcgtgacaaaaagcggcgaaaaggtcaacgagtacatcatctccaaccccggcggactggaagtgcatgtgctgaactatggctgtgtgatcaaaaatatccttgtccccacaaaaaagggcccggtggacgtggtcatagggcatgacaccctggccgactacgaaaacgacttcaactcccaaggcagtacctgctgcggcgcgtttgtggggcggtacgccaaccggatcgagaacgcggtgttcagtgtaggcggcagggcctaccatctggaagccaacaatggcaaaaaccatctgcatggcatgttcccgcgcaagatctacgaggtgaaatcctttggcgataccctgttactggaggcggagagcccggatggagaagacgggttccccggcaatctgaaaatttcggtgcggtatatcctcacggaggacaatgccctgcggatggactaccgggtgtcctccgacgcggacaccgtgctgaacctcaccaaccatacctattttaatctggatggtgagggcgatgtgctgaaccagaagctcaagctctacgcgtcccggtatctggagggcaacaacgagacctgccccaccgggcgcatcctgcccgtggcgggcacgccgatggattttacttccggcaaaccgctgggccgggacatcgacacgggcttttcccagaccaccatggtaggcggcggctttgaccactgctttgtcattgaccgggaccgcggttccagccagagcctgtgcgcctgggccaccagcgagaaaagcggcatcagcatgaagatgtacaccactcagccgggcatccagctttacacgggcaattttttgcaggattgccccaccccgggcaagggcggcgtgccgctgcagaaatacagcggctttgcgctggagacccagcacttcccctgcagtccctcgcacccggagtttcccaccaccatcctccgcgcgggcaaggtcttccgcgccaacaccacgctgcgctttttcaccggacgcctttgaaaagagagaacggaatggccgcccggtcgggcggtcatttttgtgttccgggtgctctttctctcatttgcacaaaaagcgtcttccctccatgggcagggtgcaaaaaaatttgtggctccatcatcgtgcggaaaaagatgcaacaagaatccatccgcataaaatgggcggtacttgattccgcgtgcaaaaagcggtattctttaggcagcaggggcaaggcccttacaaagaatgcaacaatggtgacgagagagaggtttttgcaatggcaattctggtttccggcggcgctggctacattggcagccacacctgcattgaactgttgaacgctggctacgatgtggtggtggccgataactactataacgcttctccggtggtgctggagcgggtcaagcagatcacgggcaaggacttccgcttctatcaggccgatatgaccaagcatgaggatgtggagaagatcttcaccgagtgcccggacatcaccgcggtcatccagtttgcagcctacaaggctgtgggcgagagtgtctccaagcccattgaatactactataacaacctcaactgcaccctggtcatcctggatgtgatgcgccgccacggctgcaagaactttgtcttcagctcctcggccaccgtttacggcgaccccgccagtgtgcccatcaccgaggacttccccgtgggtgccaccaccaacccctatggcaccacgaaggccatgaccgagcgcatcctgaccgatgtctgcaaggcggaccccaccctgaacgtggccctgctccgctacttcaaccccatcggtgcccacaagtccggcctcattggtgaggatcccaacgggatccccaacaatctgatgccctacattgcaaaagtcgctgtgggcaaactggaaaaagtgcacgtcttcggcaacgattaccccaccccggacggcaccggcgtccgcgattacatccacgtggtggatctggcccgcggccatgtctgcgccatccgcaagctggagaccaattgcggcctcttcatctgcaacctgggcactggcaagggctacagcgtgctggatgtcatccatgcctttgagaaagcctgcggcaagaagctcccctacgtcattgaggcccgccgccccggcgatatcgccgagtgctacgccgatccctccaaggccaagcgtgagctgggctgggtggctgagtacggcatcgaggagatgtgcgccgacagctggaactggcagaagaagaaccccgacggctaccacactgcaaaataaaaggattttccactgcgattgtccataacgttgaaaacacccctgtctgccgcggcagacaggggtgtttttgcatcgcggatggtatttcacgataggacattttatgaaatgcggtccgcgacgaaatttgtcgttggcatcccttgacaaaggataaaagttagcctatagtaccattgttaatacagactaacaaatggtcgaagaaaggcggacaaccatgacactgaaagaactgaacatcggcgaaagcgctgtcattgagacggttggcggacagggtgccctccgccagcattttctggatatgggcctgatccctggggaaaaggtcacccttgtcaagtttgcacccatgggtgacccgatggagctgcagatccacggctacgccctgaccctccggttggatgacgcggcccggatcaacgtttccccggcaaaaaccgtccgggtggtgcccgctgcctgcccggaacagaaagtggtagagcaccccggcctgggcgagggcggccgctaccacaccaaaaagggagagaatccgctgccggacggcacgaccctcacctttgcactggcgggcaaccagaactgcggaaagaccaccctgttcaaccagcttaccggctccaaccagcatgtaggcaatttcccgggcgtgactgtggaccgcaagagcggtgcgattaagggccacccggagaccgaagtgaccgatctgcccggcatttactccatgtcgccctattccagcgaggaaatcgtcacccggcagttcctcatcaatgagaaacccaccggcatcatcaacatcgtggatgcgatgtttatacgaggcgggaacgacccggaagataaaaagtgatgaaaaagtccagaagccatgcgggtttctggacttttttcttattcggcggttttgtacgaaaatcgtagttcaatgccgtttttgagcaaaattgaggtggtaaggccatcttttatacaaaagtttgagaccgtttcgttgaggaaatccttgacgattttggggtcgattttgcggatgaaacgctcatagttcacatagcgcttgtccaagagctgctgggtcaggatgaactggctggccttctgcatgaatgcctcatcggaaagcgacaggtcaaaggcattggcgatgtccagctcgttgatgcgggagtctacctcgctgagggcttttgtgatgcgctcacgctcgatgttgaagtctttgcttgccatctcgtcatctccgtagagatagatggtcttcaggcggttgagggcgcgctcaagccggcgcttctcggagagcagcagatcacgttcgctcaagtccgcactggactccgtggccgcgatggtaggagattcaaagcgcttctcatcaaagccgctgcgcaggtggttgtatagttcttcgaggcccggacgctcgatgtggtcaacgcgggaaagtgcttcgccacgcagcagcttcttctccaatgtttcgatggatgtcgttctgccgaaggagttggatacttttatcaggttggcgaagaagttcagtacgaatgggccgagggtcacatcggagacgtacttgttggtgcagtcctcggatttgcgtcgccgggagcagatgtacatagacggtctccagccgtctgcccggaccttatcggtggttgcagccatcgtggagccgcagcagccgcaggtgagcagcccggcgaagacgtggacgttttttcgctgataggtggcattcttgttgtagtgcttgctttccagaatgacaccgacagcagcctgccgttcaggggacacaatggccgggtggtggttctcgaccaatacccattcgtccttgcccttttcgcggaaacgctttgcgttggactcgtcgcggtaattgtaccgatacgttccagagtagaatggactagaaagaatcgtgtggacggtggtcggactccagtcgcttccagcgcgggatttcaggccacgctcattcataatccgagcaacccggacaatggacttttcggactcgtacagggagtagatcagacggacgattttggcctcgtcctcggcgatggagaaggtcttgctctctttgtcgtaggagtacccgtagggaaccttgccgccgttccagatgccatcattggcgcgggacacgaagacggcgctgactcgctcagaggtcgttttgcgctccagttccgcgaagatcaggatgattttgagcatggcttcgcccattgcagagctggtgtcgaactgctcgttctttgacacgaagaccacgccaagctctttcagctcggcgtacatgacggaaaagtccagaaggttgcggctgatacggtcgattttccagaccagaaggtgtgagaactcgccagtcctcatccgggccatcatctgctgatagtctggacggtcggtatttttggcagagtagcctgcatcctcgaaaatcacatagtccgagatgccgagggcatattttgcatagttgatgagttcttctctctggacgggcaggctagcccggtcaacctgatactgcgttgagactcgaacgtatatggcggctttcttttcctcaaagcgttgtgccgccttcttcaccacatagcccattgcggaacctccagaagataatgatagctgaagaaaaagcagctccgtgcgtagtgcggggctgcttttctgttatgcacaaaaaggaatgatagaaattatgcaaaatgtcgggggggggtacacattcagggaatcgacaacggcatcacggaggctgtcatactggacgaggtacgggtcaagttttttcagcatagtgagcgagatggtcttctgagggccacactgctcgtccagaatatgagttggtacgatgtagaaatcccatccatccagtaccagcgggtcggctcgctcgcgcacagtctcagtgtagaggcagaacacatacacgtcggattgccgtttgacctcctcagaataaccgctgatggagtcccaagctctcgttggccggatgctgaactggatgttggacagcctgccatcgccctgccgccatgcctgaagatatgcgcaactcttgacctcgatgcgcacttcatcgcgggcctcgccattacatacccagttgtaggggaaagagatgtcgtagggagtccagtcatcgttggttccgctcagatcaatgcccagcgcggcggatacaatgaactcgcagtaggagcctcgcagggtgttgttgagcaggtctgaggcgttccagcgccagtagtcgctcaaggatttaccgatgggcatatcatcaaagacgataagttcgtccccggtacgttgcttcgtcatgattttcacctcctcgaaaagtcaacccgtatcagcctacgtcggctttttcctcatgttgcatggacgttatgatgacccgctgctccggggtcatatagcggtcgagcagcgaccacaaaacctgccggtctgcgatagacgccttctcgtagcaggcgactaagatgctgacgtcgggcggcgtacggccgacggcgggcagatcggcaccgaccaaaacgtccagcgtcacgccaagtacagaggccagctccacagcggtctcgatgttcggcgttctatcgccggaaacataacgtgagatggtagtctccgtcgtgttgatgcgctctgcgacagcacgctgcgtgaggccgcgcttgtcgatgagttctttgaactgtttggcgaacatggctttgctgtacat

SEQ ID NO: 775 - DNA, 32095 bp, unidentified
  source 1..32095: mol_type = unassigned DNA
ccgccgtaaaataaacactgcgagcggaatcgatgcaaacgcaattccatatgccgggaacagcggcagaagtccatagcacagcccagccgcccaggcgattccccggtaccgcggatacgctttctgatagacatcctttgccagcagcacaaaagagcctgtcccgatcaggattttcaaaaaataccccgtcaggtacgcccaaaataccggcataaatgtatacaaaatattgtataggttccattcgctgctcaggctgtcccggctgatgccgcccagcatcggaaccgtcgcgccgtgtgcaaaccagctgtttgagtgactcagtacctgaaagtgcgcgacaaacagatcgaggttatcctgcactgtaaaatagctgttctcccgaaaaatcaaaaataccagcagctctgcgccgatacagccgcctgccaaaaacaggtaccaacggcgatccaaccatcctaaaaatcgtttcattccagtctcctaattacaaatgccgccttcggcgtcgcttgtttttctttcgtgctcattatatcacatcttacctttcaggtaaaataatagaatacgtgctctgcaaacatgcaattgtcatggacgatagaatgtgcgcggagcatttttatcgtatggaaacgaagtttcctatacgataaaaaaactgccacccggcagtttcccgtcagatggcagttttctatcggcactgttttcacaacagaccgaaaatgttccattatttcatttcgttcatcgcttttacaaattcaaggctgtccttagcggaaattattctccgtcgtaaggaacaacgctgcccttatagttctcgttgatgaagtctttgatctcatcagatttcagaatctttaccagtgcctgtacgccttcgttgttctcgttgccttccttaactgcaaccacgtttacatactgctggattgcttcggaatcagcagactccagagcaactgcatctgcactggtcagtccagcctccatagcgtagttgccgttgataacaccgaagtcaacatcttccagagtacgggctacctgctccgctgcaagaggaacgatcttgatgttgtgaggattctcaacgatgtcattctctgttgcggtgataccagcttcgggatccagcttgatcagaccctctgcctccagtaacagcagcgctcttgcacagtttgttgtatcgttgggaactgcgatttcagcgccgtctgtgattgcagcgaggtcgctctgcttgccgggatacagaccaagaggctcgtaatggatcttgcctgcgatcgcaaggtgcgttcctttttcttcattatagctatttaagtaattcacgtgctggaagtagtttgcatctacatcgccgctctccactacttcgttaggctgtacgtaatcggtaaattctacgatttccagatcccagccttctgcagccatcagatcttttgctgcttccaggatttctgcatgaggaacaggagttgctgctaccgtaatggtacctttggattccacttctgctgcagtctcggtgctttctgcctcggtagattctgcttctgcagcttcggtgctttcaacagctgctacagtgctctctgcttctgcagtagtatctgtgctgctgccgcagcctgccagcagacctgcgctcagtgccagtgtgcatgccagtgccagtacttttcttttcataatattctcctctctcggccggattttctggtatccggaaccactctatgactaaacagaatatcctgcccctcaatgggtcagtcttctgtccagtttcttggataaacggctgccgacaatctgaatgatctgcatcagaataacaagcagtacaaccgtcgccagaaggattttggtatcccatctggaatagccgtaacggatcgccacatcccctaagccgccgccgccgatggcaccggacattgcagtatagccaagcacagtccccagtgcaatcgtggaaccgacgatcagagaaactctcgcctctccgatcagcactttaaaaacaatctgccagatgctcgcacccatactctgagccgcctcaatcacacccttgtccacctcaagaagagaagactccaccagacgggcaataaacggtgctgctgccagtgtcagggaaatgatcgttgcatttgcaccataggatttgcctgtcaccagacgtgccagcggcgttgcaagcagcatcagaatcaggaacggaatggatctcgtaatatttacgataaaatccaggatcttatacagcacagccttaggcttcaagccgcccggtgcgcatacaaccagtaaaattccgatcgggagaccgatcacatatgccatcagggtagaggccagcgtcatatagacggatgtgccggtagcctcgatcagcatgctaatttccttgctactcaacataatccttcaactcctctactgtaagatttttttctctcagatacgcaatcatcttgtctgcagtctgattttcctccggaagctgcagaatcatctgaccagttgcaattccgccgatatcctgggtatccgccatcagaatattgacgctcgccctgcattccagaaccatgttcgcaatcacaggttcgaaagaagagttcttcgtaaatacgatgcggatgcagcggcggctcttcataatcgccaccttctgatccccttgaaataccagcttctttgcagctctggacttgggacttgcaaaaacatctgccactgtaccattttctgccagctctcctgcatcaatgattgccacatgggtacagatttcctgaacaacttccatggagtgtgttatgatcacgatcgtaatgccgtatttttcgttaatatcctttaacaaagccagaattgactttgtcgtagtaggatccaaggcactggtcgcttcatcacacagcagaatcgtcgggttcattgccagcgcccttgcgatcgctactcgcttctgtccgccggacagctgtgccggatatgctttctctttgtcggaaagctctactacctttagaaattcccttgccttttcccgggctgtctttttatccacgcccgcaatttccatcgggaagcatacattatccagaaccgtccgctgcatcagcagattaaaattctgaaagatcattgcaacatgcttgcgcagctgtcgcagctgttttgcatccagggtagaaagatcctgtccctccacataaacagtaccctctgtgggccgttccaggaagtttaagcatcgtaccagcgtgcttttgcctgcgccggacataccgatgatgccgtaaatatcaccctttgcaatgtcaagactgacatttttcagtgcttccaccttattgtctttgacagaaaacgtcttactgacgcctgcaatccgtatcattggttccacttttatcactctgccttcccagcatcctctcagatgcctggtttttcaggattaggttcggatttccgaaccatcacacatcagcctttatcatatcacaaatcgtttggttctgtaaatatccgatgctgccgaaactgtgcatatatgcgctgtttctttaaacctatttgtttgctatgtttatgtgtataataatcagtctctcctgttttgtcaactataaattgcgatttttgttacagttcactcgtacccttctgcgttccgattccgtgcttgcacgaaaatcggaacgcagaagggtacgaagggagcgccattttatgaacaaaaagagctgcaaagcagcggaaagcatcgaagatgcgcttttgtgaatggcgcgtgtgaacagtaacaatttttacggctttctcacgtacccagcaccaccgccatcgtgccgatcaggatgcaaagatccgccagattgaataccacgcgatcgatcgctgcaattcctgttttcaggctgacataatccacgacatattcacgcaccacgcggtcgtaggtattagaaaaagcgccgcccagtaaaaacgataacccggccttcaaaagctttttcccgcgcattccaagcgtcagcacaaacaccaccagcactgccaccgtcagaagaacggacagcaatgtcaccagctttcgtttttgttctccgaaatttaaaaatgcgcccttgttgtgatagcgccgcagaaccgcctttccatctaaaatttccttcggcgtatccagcacgtcgtattcttctacgtaatttttcattccctcgtcaatcaggaaggatgctgcagcgattcctgcaaatttgtagttattccggataatttcctgcaatttcatcaaatgtcctcctcatgtccagttgtccgtatccccatcttctgctcgggtattcttcctgtgtctgttcccgcgcaccgcgacttagaaacgtctggattccccttccggaaatcctcgagtaattgttctccgcaacgcaccactgcatcagctgcgcacaggctcctgccgtaagtgcagccgccatagagctgccgctgtaggggccgtttaccgtgctgatctccacgcccggcgccgccagatccggcttgatctccccggttctgtcaaagcccctgccgctacggtaataaaagcttccgttttcactattataaaaagtgaccgtcaccgcatctgtcgtataggagggaactgtgagcgtcacatccgggtctggaaccagaaaaaacagctcgccgcttcgaaactgctgcggtgcaagccaaatatcaaaaatactttccggaaatacccgtgctccacggattaaaaatgtccagacgccaggagacggtgctgtaaagcggatcagcatcaactgatctccggtattgcgttcgtttgcagtatctgtaatctgtatccgcgtcttttcatagacaaacgtgtattccactgtgctgcccagaccaaattccacctccggcagctgctccccgccgggtgatcgaaccgcaagccggaacactgacggcttacttccccatagctccgccgtaaatcctgtgacgccttctccgacccgaagctccacctgctgctgattttcggtcagcctcccccgaaaatggcccgccgtgtttccttcatttccacccccgatcaccaccgcctgtgaaacgctgcgcgcgatcctctgcaaatactccgaaaacaacgaaacgccgctgtggcttccaaaggacgtccccagccccaggcagatcacaatcggacggtacagcgggatcacaaactgttgcacatatttcacagcgagcagaatatcgtctgtgctgtatgccggttctttatccgcgatccgataataatcccggagatattgttttgcagggcgaagcttgactgctacaatctcgcaatccggcgctgcaccggtaaacaggctgccctcttccagacggcttcccgccgcgacgctcgccactgcggttccatgtccaatttcatctttttccggcaccaggctgtgcggatcttccagctccaacgcccggtcgatctgttccctgacgtattccgttccatataaaaaaccctccggcgactgtccactctgatctgtctgatcccaaatcgccagaatcctgctgctgccatcagaatagcgaaataccgggttttcataagaaatcccggtatcgataaacgccatcactaccctgcgccccgtcaactccagcgggggccgctgctgtgccagaatcccggagccctccaacggttctgtccgaaacgtccgacttcccgccgctggaaacgcaccgaggcaaaacagctgtggaaggtagcgatacaggtaattgaccggagaaagcggcagcaccgcagaccgatccagataataaattcccagagttccatccacctgctgatagcagaaggcttcgtcctcctgatttgcttcctccggcacatagtccagcaaaatactcatataatcttcagaaagaattttttcccgacagttcatctgtctcctttggacacagaattttccctctgtgccctgcggattttatatcagcatatgcgcagtattgctgatatgttcctgtagtattccgttgaactctcagctttcgaacattttcttcatgcagttcaaagttcaagcttctttcgtttccgccgctgcgatctgtttcatatgatcccgctcttccagcgaataaccgttactgcggatatcaatcagcggtccaccggttccccggatataatctccggtaatcgtcacgcgtccgatattgtcatccttcggaatttcatacatgatatccaacataaattcttcaataatcgaacgaagcgcacgagcaccggtatctttttccatcgccttgtctgcaatcgcttccagtgcatcgtcggtgaactccagcttcacctcgtccagctccagaagcttctgatactgtttcaaaatcgcatttttcggctctttcaaaatccgtaccagcatatcccggttcaagccctccagcgtgcagatcacagggagacggcccaagaactccggaatcatgccgaatgtccgcagatcttccacttttaccatggaaaggatatccttttccttatcccagcgatcctttaactccgcatcaaagccgatcgaggtctttttgcgcagccgctgtttgataatctcttccagatccgggaacgcgccgccgcagataaagagaatatttctcgtattgactgttgtgagcggaaccatcgcgtttttgctgttcgcaccgaccggaacctccacgtctgctccctccaacagcttcagcatgccctgctgcaccgattccccggagacatcccgggaagtcgtgttgtgcttgcgtgcgattttatcgatctcatcgataaagatgatgccctgctccgccttatccacatcgttgtccgctgcagcgagaagcttgctcacaacgctttcgatgtcgtcaccaatataccccgcctctgtcagggaggttgcatccgcaatcgccagcggaacgtccagaagcttcgccagcgtctttaccagataggtcttaccactgccggtaggtccgatcatcaggatattggacttttcgatttcaatctcatccattgtgccggtggcaaccctcttataatggttgtaaactgctacggaaatgacttttttggcatattcctgaccgatcacatactgatcaagctgctctttaatcttatgtggtgcgggaatggactttaaatcaatcaacggctttgtgccggttccttttttcttgatcttctgtttctgcggcatcccgtcgttcatgaaatccgcaagattgatgaagctgatgttcgggaatcctcttctattgcccgaggattcgtcggagtcattcttggaatcgtcatccgcatcggatgcctccagaatgtcagcggcagtgttgtcggatgcgttgtttccatcctgtgcgtcagttgtttctgcgtcagttgtttctgcgtcgcttttttcgtttccgccgcctgcagatttctgttctgacgttccattcgactttgccggatctccatacggattgaacggattattcaacatgttcatgaacatcggattattcatcatctgctgataatcgaactgacttaccgcatccattgtcttatgcatacagtcgtcgcagatacagatgttattcggcaggtggaacattcttcccgccttgctttccggtctgcggcaaatataacaaatatcttcaaattctttttcatccatagtcggttacctcatcttccgctttctgctatcaaaagtataatgcaggatcgttcctgagacaagtaaactttctctaaacaactgtctcctgtacagaaatggctactgtttacacgcgctattcgcaaaaccgggatgactgcagctctcgcccagccatcccggttccgttctttatctctgtttgctttcctgtgcagccttgctcgccgcattgatctggtcataggaagaaagcgtgactgtcacgtttttctgctgataaccgtttgctgaatttaccataatcgtaatttcaacgctctccccagctttataatactgcatctgcttcgtcagctcttcctgattctgaacggttacgccgtcaaacgccaccacaatgttgccgcgcaccaatccggcagcttccgcaccggttccggaataaacctgcgccacaaaaattccctgcggcatactgaagttctcggacaaatcgctcgtcacattgatgcaggaaattccaagatatcctcgctcttcctcggaatatttcgtccgcgtctggcgttccatcagatcttcaataatcggtcttgccgtcgaaatcggaatcgcgtaacccattccctcgattgacgagccgccgatcttattggagttaattccaatcacctcgccccgcatattcagcagtgctccgccggagttaccggggttgatcgctgcatccgtctgaatcagggaagttccttcttcggaattgctgctatctatcttacggttcagtgcactgataacgcctgtcgtcacagactgtccatagcccagtgcattaccgatcgcaatggccggttcaccgattttcaggctgtccgaatctcccatccttgcaatgcagatttcctgttttgtgctgttcgcaatggtatccagttttactgcaacgactgcaaggtctgcggaagcatcggtaccttttacctgcgcttctacggtttccccgtcgataaactgaacatacagctgctctgtgctgtccactacgtgattgttggtaacgatcaaaagctcctgctcgttttctccaatgataatcccggaaccgcttgccgtctcatcctgggaataagtctgtccccagaaatcctgtaccgtctgtgtaaaattattcgtaatcgaaacgcacgccggcattaccgcttctacaacctgcgttacatccgttacaactgcagatgcgctctgctgctgtgcaatttccgatgctgcagcaacctgtccgtctcccgttgttgtatcctctgtcagggacgaatctccggacagtcctgcctcagagcgttcgggactgtctgttgctgcatggtttccgtcatcttcctgattttttgcatcatctcctgcatccggagctacctccaaaacgccgaccgacgcggaatccagctgatttgctgatcggatcgaataaactccgatcaagccgattccaatgcagacgcaaacaaagatgacgacaagtgcgctaacagcaatccatttgcccgcagaatctctttttttgggcgcaggcgcctgctgtacgcctggctgatagccatatttctgttttgaatcatcgccccggtatctgtcgttgtaataattttgatattcgtagcggctgcgcgagggctgcgcgccctggtcagcgtccgatgcgctgttgaatgtgtcctgcgtattgtcggatgcgttctgtgcgttatccgacgcacccgtgcttccgctgctatatgccgatgtgtcatcggacacgccactgtacgccgacatatccgacgcatccgttttctgtgcactgtccgtgtattcctgcccgccgctctccggcgctgtgccgtccatatgctcctgtccggttgtttcttccgggtcgtatccgtaacccatgttgtgacctcttttctcattcgcttccatatccggtgcgtctgcttgctctgcagacagtataccgaatagttgtgtccattctgtgaaaaagaatgtgccttggcacattctcgcgccgaggcgcggttgcttcagcaaccatctacccttgcgccgagtgcgcatcctcgcggagcttttttatcgtatagaaacgaagttttctatacgatgaaaaaagccgcttccggagtttttcggaaacgactttttatatcttattctttctcctgcttccagtagcctttctgcaaactgcagaagcgaaccagcccaggcggaagcttctggtattttttaccgaaacggtagcccagccatttcataccgctctgccagatcagtttcggcagaagccacggtgcggtttttgcaagataaacggcggtctttttgaccagcttcatgccctcgccctccggcggcacaccgtcaaacacagccgggtactgcacatgggatacaccgaggtcaaagtttcttgtaaactgctgccagccggaataattgtgggaatgaatcaccttcgcatccgctgcataggcgatcgcatagcccgcctgaatcactccggcagcataaatcatatcctcgttaaaaatcgtatgattcacgaatccgccgagctgttcaaaaatatcgcgcttataggcggcgcagacgttcgagcaaaaatatgtcttgattccgagcctcaaaagatccgcctttgttttgaccgacggctgctccgggtaattgaactgcctcgtatagcgttccattcggctgcaattttcttccggaagttgtcttgcataggcggctgcgattttttcatcggaaaacaaggccttgcacagctcctgcgtcagatacgcatccgccggaagtgcatcctgcgtcatgcagacaaacacctccgcatccgaattggaaacagcgagattccgtgtttttccatgatcgaactcatcctgagagatatggaacagcatcgcttttggatgctcttttaaaaatgtgtcgcaatccatcagcgcttcaaacgcttttttttcggtatttacaattacaatccggttcaccgcaagcacctgcttctccagctgctccatcagcgccagaaaacgttccttcggatgaaatgtcggaataataacatctacttttacagaatccatattttactttttcatatactggctggtgtctgcctgtaccttctggctgtactgttttacctgatcggaaggttcgtactcggttacgtcgaacagcagctcatgcagcttgacaacgtttgtttccagatccagcgggataacacaggaacccttcttgccaattgtgccggttgtgcgactatcttcaaatggcacaccgtcctgtgctacgatctgatagtttgcaacgtcggacaggatggaagccatttccgtcacatccaggttggtgtatacattttccatcaccttgttcaggatcgataccagagtagtcggactcatggtctttgccttatccatacatgccatcagcactttccgctgacgttctgcacggccgaagtcatcgccgacatagcggatacggcaatatgcggttgcctgcagaccgttcagcgtctgcataccggaatgcgtaacctttacgatgttctcgttcagcgcatcattttcattttctacgaacatgcttcgctgatagttgttcagatggtcgatttcgttatcgtgcacgtcaatgtctatgccgcccagctcgtctatggtctcgatcagcgcatcaaagcccactgtcacatattctgtgatatccaggtcaaagttcatattcagcatgttgatcgcctgctccggaccgccctgcgcatatgccgcattcgctttattgtagctgtccgttccgagatttaagtaggtatcgcggtaaacggaaaccagcttgacgtctccggtgtcctgattgatagatgcgatcatgactgtgtcggaacgggagcccttgccgagcttgccctttctggaatccacaccaaacagtgcgatattacggtagcctttcatttccttattattttctacctgcgggtttaccacaatatcttcttcattgatcttgatcttgtcaatcttcgttaccatattgacgccgacaatcgcaatcagtaaaacgatcaacgctacgatttccactgcaaagaagatgattcttcttctctgttttgccttacgcttctttgcagacatcttttttctgctgctggaactgccacttctctgcggtgctctcttagaactatttgtacctgttgacatgttttcctctccttgtgtttttttcacgcatctaaatcaatacgcgttctcgttgataaatcctctaaaaatagttaaaaacatgattttgaaatcaaagctcatgctccagttttcaatataataaatatcatactcaattcgtttgcgaatcgacgtatctccccggtagccgttgatctgcgcccagccggtcagccccggacgaacctggtgcttgatcatataacgcggaatctcttccttaaacttctcaacatactgtgggcgctccggtctgggacctaccagactcatatccccgatcaggatattaaacagctgcggcagctcatcaatgctggtcttgcgcagaatccgccccacctttgtgacgcggggatcgtttttcgtcgtccagcccttcttttcttccgtggtgtcctgaacatacattgtacggaatttgtacattttaaacgcatgattgtgctgtccgattctttcctgactgaaaataatcggtcccttactcgtcgcacggatcaaaattgctacgatcaaaagaagcggcgacgtcactatcaatccgcaaagcgaaccgacaatatccacagcgcgctttgcaaccgcatttaatgtgttgctcagcgggacataacggatgttgatgaccggcagtccgccaagatcctccgtataaggcttgcccggaatcaggctgttatagtccggaataaacttcgtatgcacgccggatttttcacagagattgacaatctcttccagacggtcgtagtcctgcagcgcaagggtcacagcgatctcatccagtttgttttccggcaggataaagggcaggttatcgatggaaccaagcaccttgactcccttgtaaaccgcgcctctcggcacattatcgtccagaatgccccgcaccatatagccccactggggattggcgataatccggtcgatataggcttccgccgcacgagaataccccaccagcaaaatgtgtttcaaattataaccgcgtttgcgcatcagatgcaggattctacggatcagcgcacgcaccagaattcccgaaatcgtattgataatagcaaataatgccagcatgccgcgggaaaaatgctgcagctcgcggtcgatggagttggcaaggtataaccctgcaagaaacaggacaattccgatcagattcgccctgataatattcagtatttcattttccgggcgttgtacacgcttcggcgtatacaatttgttccagtaataaaggatcagataaccgggcacaacaaaataaagggcggaaaaatatatgcccatgtccagtacacctatttctttatctgcaaagcggctcccgaacatcaaccaccaggccaacagataggaagctgctgtaaccacggcatctacaacaacatgaagccggttcaaataacgttgattatcctttatcattacggctcgtccccatattcaaaatgtagtatacaataccttccagcaaagcacaaggatttttacgaatcgcgcaggcaaaccgtaacacttgtgtacgcccacagtcaccgcttacacacgccgaaacaggttgacccacagctgtaactgcaaactgcaataatgcagcaaatttcgtcctgcaaaggggaccttatgcgcgcgtcccgctttcgaagcagacagacagattcccgcccggattccttttgcgtaagtcgccccaaatccttttttcataaaaaacagctgtttcaacaaaaatcccgccagcaaaaaaggcagattcaggatcagctgcagcagcggcatatttttatagatcagataaatattgtttctcgaagaatgcgtcaccttaaacgcattgtaccgcgaaccggtagaaccgctccccgcgtgatagacgactgcagccggctctgtgacatttttcagcccgaaaatctgcgcccggtatccgatatccacatcttccaggtatgcaaaatgaagctcgtcaaaccctccgatctgctccagatgtgccttgcggtagagcgccgcccctgcacaattggaaaaaacgcgctttggcgctgtgtaattggaagaaggccttcctttgccaatcgcatacgcccagccaaatgccgagtacagatcccccgctgtatcgacaagctccggctccttcatcgaaagcatcttcgccccgactgaaaaaatcttctcatccgcttccattgccctttccagacgttccagacagaagcggtcggtttttgtatcattatttaaaagaaaaacatacggtgtagcagcagcttcaattccggtattgactgccgtacaaaaacccttattttccgaaaaacagatcagcttcacctgcggaaaatgctcctgtatccacgaaacacttccgtccgtcgacccgttatccacaacgatcacggcgatttccactgtgctctgaagcaggctgtccagacagtcctgcagaaaatgttttccgttatagttcggtattaccacggtcgtcttcatccaccgattttgctcctcatgtttcctgtgtttgccgtccgcgcgagggagagcctcagagcgcggatcgcctgcctacgcagcaacaaagccgcctgccgcggtgcgctctatctgcggcttacgcctgcggatcccataaaatcccataccctgccgctgtcgcttctttacaaaattccatactcttttgaaggatctttgtttcctgcgctgccgtcggaagcccctggcaggcttcttttaattccgctatcgtctgcgcgtaacgctcctttaatgcgctgcaaaccaccatgctgcgcaggtctgctgccggtgcgctctgctgcagcgctgcacggtgcatcggtccggaatatcctttccgaagccctgcataccgcatcgaaccgtcgttttcatacagtccgctcaccaggaagcctttcggatgccggatgccaaaaatatctctgccgcccggcagaggctttgcccaaatcccgatttccgggcgctggcaaaatacactgtcttcatagtcttcccgataaaagccaagatgtttcagcccgctcactgtcgccttccagccttttcgaagacaataatcttccagcgcacgctgccccgcctcgtaagcgtagcgcttgctttgcgggttcgacgccgtagacgcttcatggcagcgccagtggtacagcaccttcggcacatgcacaaactgtccgcctgccgcatacacccgcagcatcagatcgtaatcctgcgccccgtcaaatccgctgcgcagctttaattctttcaaaaatgccgtttcgatcaccgtaaaatgacagatataattgttggtcaaaagcaattccccgtcaaaatccggcttgaaattcggctcatagaagcgactcgccgctccgtcgcatttatcttcatcggaaaacagcacaagcttttgttttccgcgctttttttctttttccagacaatccgccatctcccagagcgcattcgcagtcagcagatcgtcgtgatccagcagaccgaccgcgtctcccgccgcaagttcaattcctgcgttcgtattggcggaaattcctttgttttcggaaagggtgcagagcacgatgctctgatccttccattctgcaagatttgatgcatctgccgcttcccgcaggcagattccgttcttttttgcccaggcctgtacagactctgccgtgcctcccgcatccgctacaatcagctcccagtgcggatacgactgcctcgacacgctattaagcatcgcctccagatgctcttttttcgtccggtatgccggaacgacgatactgatgcgtaaagaagcagaatgctcccgctgaaacgaaagcgtcttttcgtccggctcctgccaggtatagacctcctgttcctgcccaatccgctccaacaccgcccacacggcatttctgattccgtttttctgcagataataccaggtttttttcagattggatagggaaaaaacagacatccgtcgaactccttttcctgctacagacgcctgcgcgtgcccaagcgccggaaaactccgacaccgggcacgcgccgtgtccttttgattcgtgatataaaccttatgccagagcgcatgctgcattttcgctgcaaaatacgctgctggtgctgcggctttttcttttacagaattgccttcaggtcagcggtcagcttgtcaacctttgcctgtgcatcttccagactggttccctttacgcccatatagaatttaatcttaggctcggttccggacggacgtgcacagcaccaggaattgttggtcagttcaaagtacagaacgttggacttgggaagtccagtcggacgaacctcgccggttgccatatctttaacctgatccttatcgtagtcgcgcatctctacaacctgcagatcgccgaaattcttcggcgggttgctgcgaagcttttccatcattgcggagatctgggctgcgccgtcgattcccttcagagtaatagcatactgagtttctttgtagtagccatatttctcatacagcgcaagcatctgatcccagcaggtcatgccgtgcttcttgcaccatgcagcggtctcgcacagacacattactgcaacaatcgcatccttatctcttgcatgggtgcctgccagacagccgtaggactcttccagaccgaatacatagtggcctttcccagcctgctccatccatttgatctgctcgccgatatacttaaagccggtcaggacttctcttaattctacgttataatctgctgcaatcgctgctgccatgttggtcgtaacgatggtggataccataacaggatcaaccggcatccggttggtagcggtgcgctcgcgcagaatgtactctgcaatcagcatgccggacatgttgccggtgaagggcatgtactcgccggtcttggaatcctttgcataaatgccgagacggtctgcatccgggtcagtagccagaacgatgtctgcgtccaccttctttgcaagctttaatgccagggtaaatgccttgggatcttcagggttcgggtaatccagcgtcgtaaatgcaggatcgggacgttcctgttcgggaacaacataaacgtgcttgaagcccagctcagccagaattcttctgacgggcttgttgccggtaccatggaacggtgtgtacacgattttcagttcatccgctacttctttgatgatttcgggatgaatgatctgtttctttaactcttccatgtaggcaacgtcgatttcttcgccgatgtactgatacagaccggcttcgatggcatcgtccttggacatggtttttaccgtatggaaatcggttacatgctctacctcgtcgatgatctcatgatccttgggggcagttacctgtgcaccgtcctcccagtaaaccttgtagccgttgtattccggaggattgtggctcgccgttacaacgataccggaaatacagcctaaggtacgcagtgcaaaggacagctcaggtgtcggacggagttcatcgaatacatacgccttaatgccgtttgcagccatgcacagtgcagcctcatctgcaaattcaggagaataataacggctgtcgtatgcaattgcaacgcccttgtcagcgccgccctgctttaaaatgtagtttgccagaccctgtgttgcttttctgacagtataaatattcatccggttggttccggctccgatcacaccacgcagaccgccggtaccaaacgccagatccttgtaaaaacgatcttcaatctccgcctgattatctgcaattttacggagctcttccttggttccttcatcaaagtaggaatcctccagccagaatttgtactgatccatgtaattcatcgcttttgctacctccatcttttctgatgcctgccgtctcttacgtccctgcctgtcagtcttcccttggctgcagtgcatcttctttaagtcagtatacactattttttcagacccgtaaagaaaagtcagatttatctaacgaaaaattcgggttgaaataaggatctccggcttccagctcagctttccatttgttgcggaagcgttcggactcttcgttataccgttttgctttttctccctgatcgtctaatcctctcgaaatcgattcgaaatgatacagctcggcaaagggcgtaaagacgttcagataaccagccttgcgcagcttcaaacagaagtccacatcgtttaatgaaatttcaaagctctcgtccagaccgccgacctgctcatagagtgattttttcaccaaaagacatgctccggttactgccgtcatgtcctgcgcatagcacagacgtcccatgtatcctaaattttcccgtttctggcggtaatgcacatgtcctgccgtccgatgcgcgccaagcccgatcacgacgcccgcatgctggatcgttttatccccatagtaaagctttccgccgactgcgccgacatccgggcgctgcgcatacatcagaagctcttccatccagttgatcgtaattacctgcgtatcattgtttaacaacagcacatagtctccggtcgcaagagagacgccgaaattgttgattttcgaataattaaacttgccctcgtaagtcaccactcggatctgcggattattctgcagctcgtcatagtaggaaaaaatctccttcgtctcgctgttgttctccacgacaatgatctcgtagttttcccaggtcgatttttccacaatggagctgatacagcggcgcaggtcttccacatgatccttgttcggaataatgatagaaatcttcggttccccgataatttcatagctgattttaaaaatcgtctcaaacgcgcgagtactcgtaattgtaaagtttttgaagccgtgtctgcgcaaatgatccgcaaccgcgcctctcgccgcttcgaccacgtaaggctttgcctcgatattgcccgcaacactgcctgcatgggagcgccaataatacagaagcttcggcacatggacgatatgcttcgcattgtccgtcaggcgcagaatcatgtcatgatcctggctgccgtcaaattttgtccgaaacagctccgtgccatccaacagctctctggaaaatacgctgaaatgacaaatatagttgttcgcgcgcaggttgtcgatcgcataatccggcttgaagtgcatcgtgatcatcttgttgatgtccgggctcttaaacgtcgcctcatcacagtaaataaagtccgcatccttttcgttgatcgcctttacatactcgtaaagtgcgcagggatgcagaatatcgtcgtggtcaaacagcccgataaactcgccggatgcaagcttatagcattcgttcgtgttgcccgaaatgccctcgtttttggcaagcttctgataaacgattctcgaatcctctgccgccagccttttgcagtattcgccgacataggcgtgcgcatcgtccgaaccgtccgccagacacagctcccagtttttgtaggtctgccactggacggagccgatcatctcggttaaaaagctttccggcgtgttccacaacggaacaagaatactgatcttgggcatccgttcaaagacagccgcctcctgcttctgtctttcctctgcggacgggaagctctgggtgccgtaatgggtcatcgccttcttttcccaggatttatagcgtacctttgcaatcacgcccgacaggctgccgcaatttttcaaacggtccttctggcggatcacaaaatgcatgcactttctggcagggccggacgctttccagatcggattgtttttgatgcggttcaatttgaactgcagatcgtccacctgatcctccagctcagcgacccggtttgccagataaacggctttataatgttctttctcgtaagcgtcctgatagtcctttttttcttccatgattttattatttcctcactgtaagcatttccggactgaagcggtaaagcttctgccgcgagcaggtatcttcccacaaaaagccgatcaggtaatctccctccggcaggctgtcccgatcgaaggtcacgcacacgcccggcagctcggtatgaacaattccgtgcagattttcgtcgatatccgggcggaactgcctcgtacagggaatcctccagacctcgccccgatcctcgggaagtgcttccgtactggagccgggcgcaatatagccggtctccaccttctttaacaacagggaaaaatcgtaccgacagttgtcaacctgcagtgcccatgtccagccctggatcatccagtcgccagttcctgctcctgcagcgcccttttgccagcgccccaggtccccggcgaactccacaccgatgcgtagcacctcattatgccactgcggttccagaacaccctcgatcttctcaggggaaactttttccactcttttgtcaaaatcataacggcagcccgtataaaattccgcatccagcacatcctttaccagatatctgtgatagaacgggtcggttccgtatagggacgggtgcagttcatagagcagattcagttcctgatgcaggcggcgcagcttttccgtgctgtcgtccgcaccgcggcttaaggattcatgatgcgtcagcgtcacgtcgttgcgtaccacgttgtaatagcccatttcatatacatgatagcagaattccacgtcgttgaacgcgacacgcaggttctcggacagtccttgcgcctgatcgtaaatgctttttttcaccagcaggcaggctccggttacacccaggacatccatcgccatgcggttgcgcccgaaataaaattccagcgcatcggagcggaactgcagcttgtgtgcaggtcccagatgaatgttagtgatgcccgcgtgctgaatgatctccgtgcccggatagatcagctttgcgcccaccgcgccgacgtgcggcagaaccgccttttccatcagcttttccagccagttgtcctgcgtaatttcgatatcgtcattcaataacaggatgtaatcgccggtcgccagggacacgccaaggttgcacattttggaaaaattaaactccatcggttcatagtgataaacgaaccggaaatcctcgttcaacatatcgcgcatccgttcaattcttgcacggttttgttcattgcttccgttatccacaacgatgatctcaaaatcccggtagtttccactttccaggacagaatgaatgcaattcgataaaatatggggatgatccttggtcgggatgatgattgaaactttcccggagggcgtaagaggccagcctcttcttacatatgccgcctttttcaaatcatcatacgtctcttccataccccagacttcgattttttcatgatgaaacagcacgctgtcgatatgcgccgttccattctcgatttccgtcaggcgcagcaccaggtcataaaggttgcgcagtgggttctcatctgccagccacggacagttctccatcgcctgtctgcgcaccgcaaagaatccgccgaaataaaagcaggacatcagcgtatccggcgaccagtccggcttcagccagggatttttgcgcttaccggcttcgtcgatttcatcctcgtccgcgtaggcgatcaccgtttcgggatgggcttcaaaccagctgagcacatgtgaaatgcctctcgtgtccgggcttgcgtccggcgcgtggaaaatcaggacgtccgcgggcgttgcgccatttccataccgccgcacatcaaaatccgcgcggcactcatcgtaggagatcacctctgcgtgctctgccctgtgctctgcgcgcagtgcctcgtcctcctgtgcttccttttcccgaatccactcgtcataggtgagggtctgtttctgaatctgctcctgataccagcggtatcttttctttaccagattattctgaattgtttcttttatctttgaaaccaaaaacctttcctccttgccgctgccgccaggcgcgcctgaatatcctgcagcatttccgccgacagccatgcgatctgtgcccggatgaccagcgtttcgtcatccgtcgcctcgctgtccaggcagtccagccgaacgctgatgttcggatctcctgtttcaaacaataccgtcggaacatggtccggggtatctgcaagcacctgtccgttcgtcgacaggcactgatccagctgtgcccgcgtcagcgcttttccgcgccattcgattccatgaatctgtaccagacacggcagctccgcaggatctaagcgaatcgcttttgtacctgctttgcagatgatcctggcgttgatcagatcgtccgcctcatatgcatcatattgataataagaatgctccggtgtatatcctgcgccgaagtcttcaaatacctgcacctttttgcggtccgcccgggcgaaaaatccctgatacggcacagcacggttgccgatcagatgccgaagctgcccaagagccgtccggctccgcccgtccttttcctgcaggacaaagtgctggaacgccagctctttttccgaaagctcccgcatctgctctttgccgatgccgagggcttccagatgctttttcacaatcggatgctccatccgaaccggatcctcctgaccatagcagttcaatgcccggctgatgatctgctgcggcgtcagcttgtctgtcgtccactcgtaatcgatcatcgtccagatatcaccctgtacgcagatattcgggaaggtcaggtcataatcctgcttcgtcccctccgctttccacgctgcgattttgcagtaacggtcaaacagcttatcaaaaccggcttcgtcattgttctgtaagcactcatccagcagttcttccaatgtccggctattttcgagatattcgatttccgcaaagggcaatccatccggattccgtttcagctccagacggttgactgagagggtgctgcctttaaaccgttctgtgaagacgcattcattttctgccagggcttcaatatgtgccgcagcagctgaggttgccggatatttccggacagtgtgttttccgtccttttccagaatatccgtgcggatgctcaggtgctccgccctgtcgttggaaaaacggctgtatacaatgtccgtcatgggtcctgtcatcacgaggaacgaattgctgtactgtccaaacagtccctcgcggatgagcatgtcgaacacctttttttcatcgaacagcagcatccggtcgcggtcgaaatttcgtaggttattagatagttctccgactttcggcagataccgatcggagtacagcgtcgtcataaatttataatccggataagggtagtagaaatgatattccgtctcaccgcattctttcaggattttttccagaccgctccgggaaaaggtgcgagccgcaccgccctgggggtaatcctccaggcctgaaaaaaacgtgccgacgtggtcttcccggcaccccgcccaatattttaaaccaagcttattctctatcgcaatcacgatatgtccatcggatttcacatgttttttgataatccggtagaaatcgtgaaagggggtttttccgccgatatagctctgcccgtattcgaacacgccgatcagacagacaaaatcataatccgtcggcagatccggctcgatgtccgaaaagttgcccacatggatcgtcacgttgtcacagtcctgatggcggtaagcgttgatcaagctacgttttttcgaaaggtcgacgcaggttacgctgcctgccttctgtgcaaggcttcccgtaatcgcgccgcagccggaaccgatttccagcaccttcatgcttttgtcaacaggcagccatccgacgatattttcccgcaggtcggaaaggtggtaaagcacctcccagctcgccgctttatagatttcctggggatattcccggggcgggattgtttttaccagctccaaaagtgcatcctccgacgctccgtcgcagtaaaaatcctgttccggataatgggaataatccagcacaacattcccgatcttctctgtcctgcctgtctgcatacgttaaatctccttcacctcaacctgagattccatatcaaaatagcccactgtatccttgtcggacacgaccgtaatattcagcacgtcataaagacgatgatacactttaaacgtatctttttcatatcctgtcacacccagggatatgagatagtcaccgccctgcaggcgcatcttctggcggaatgtaatttccagcacctgacctgcctttacgctctccagaaacgtcttttcaaacatcgtgttcgttcccgtgatctccacgcccttgatgtttttgatggaaaaagcaaagatcggtgccggaagatcctgaccgattttcaccttcatatgcatcgtgaattcgtcgccctttaaaattgcggtcgtctgcacgtcgtttttgtccgtaatgtaatacgaaacaatttccgcctgcttcgtgccgtattccagtgtctccgggttgacgcccatgcgcgccgcttcctgcttctttttctgtttgtcaagcgccgcccgaacatccccgtccgccgtcaggtcaggtacatccacgccagccttaggcgtttcgtactgtcccaccagcacctgcttgtaggcgtcgatcatgtctttgggcgagccttctccgagctttacgccctgatttaacagaatcgcacggtcgcagtatttgctgatcgcgctcagatcgtggctgacgaacaggatcgtcttgccttttttcttgaattcctcgaattttcgatagcattttgcctggaaaaatacgtcgccaaccgaaagcgcctcatcgacgatcaggatttccgggtcaatattgatggcaactgcaaatgccagtcggacaaacataccgctggaataggtctttaccggctggtacacatagtccccgatatccgcaaaatccaggatatcctgcagcttttcatcaatttctttttcagaaaaaccgatcatcgttccattcagataaatattttcgatgccgttgtattccatgttaaagcctgcgcccagctccagcaaggcggaaattctgccgtttacctgcacagtgccgctcgtctcatgtaatacgccggtgataatctttaaaatcgtcgatttgccggagccgttcgtgccaataatgccgacagtctctcctttataaatgtccagactgacatcctttaatgcgtaatgcggcgtggaaagtttcttttttgtcagtcccagggattcgatcagacgatcccggtttctgcggtacagcttgtatactttgctcaccctgtccacatgaattgccagttctttttgttccataaccagttttcctttacatgatatccgcaaaatgaatcttgagtttcttgaaaatcagcgcgccaatgccaaacagcaccaccgtgataatccagaaataaaccgtggagtaaaagtcttcccagaaccactgttttccgtatacagcgcttctgtagccctccacaatgtatacaagcggattgattttcacgatcatctgaagcttcatcggaaaatcattgatattccacagcaccggagttgcccacataccgacctgcagaaagatattgacaatggactgcagatccctgaaaaagatgacaaccgagcaggtcgtataactgagtgccagtacaaaaacgaacatgcagaagctgtaataaaatacctgcagtgtatacaggctcggataatagccgttcaatgctgccacgatcagtaaaaccagcacgaaaaacgcatgaataaatgtcgctgcaataatcttgataatcggcaggatactgattttgaatacgactttttttaccaggtaattatattccagcagcgataccattgcgctggtcagagcttcggaaaaataaaaccagggcaccagtcccgctgtcagaaacaggatatacggaacaccttctacgcctccggaggcataaccagtccggttcgggaaaataatcacgaaaacaacccagtacatcgcaactgtgatgaccggctgcaccatcgcccagaacgctcccatataagagcctgcgtagcgctttttgaaatcgctctttgccagtttccagatcagcctgcggttctggtataattccaccggcagcaccgtgatcttatcgtataaccggacaaaggcaatgaccgccgccacgatcagcacgcaggcaatcacttttttcagcagctcatcctgcggattggcaaggggattatgataaacaaggataataacggcaagaatcgccatcaccgcagtgaatatggcgattcctgtttttttattcagtctcttcatttatttctgctttctgtaaattcggcaaaagagccccactttttatctttgtcagacaaggtcagttccattccttccggaatcggccattctacgccgatctggggatcgttccatgccagaccgccttcgtcgttgggatgatagaagtcggtgcacttataggcaaattccgcataatccgacagcactacaaagccgtgtgcgaaattcttggggataaagaactgctttttgttctcttcggaaagcagcacaccgtaccactgaccataggttttggagccgggacgtaagtcaaccgcaacgtcaaacacttcgccgcgaatcgctctcaccagcttgtcctgggggtaattgatctggaaatgaagcccccgcagaacgccttttttggatgcggactggttgtcctgtacgaaaacctgatcgatgccggcttccttgtaatcgttgtagttataagtctccatgaagtaaccgcgggcgtcgccgaacacctgaggggtgatcaccttaagaccttcgatatgacatgtttctactgaaatttttcccatttttctattctcctgttccgtttttaaagtccgtttgcgacctctacgagatatttgccatagttggtcttcatcagcggctccgcaagctttaagagctgctgtttatcgataaaacctctgcggaacgcgatttcctcaatgcaggaaatgtacatgccctgacgcttctgtaccgctgcgacgaaatctgccgcatccagcagtgcatcgtggttgccggtatcgagccatgcaaagcctctgcccagcgtctccaccatcagcgtccctctgcgcagatattcgttgttgatcgaagtgatttcgatctcgcctcttgcagacggctttacgttgcgggcgatttccacaacgtcgttatcataaaaatacagtccgggaactgcatagttgctcttgggatgctccggcttttcctcgatggaaagcgctttgccgttttcatcgaattccaccacgccgtattctctgggatcgcggacaaaatagccgaaaatcgtcgcacccttttcccgctccgctgcctgacgcagcactctggaaaagctctgtccatagaaaatattgtcgcccagaacaagggcaacgctgtcgtttccgatgaaatccgcgccgatcaaaaatgcgtctgccagtccgcggggcgtctcctgaaccgcataggacatcgaaagtcccagctgctcgcctgtaccgaacagttctttaaaagcaggcagatccctgggcgtggaaataatcagaatctcccggatgcccgccagcatcagtgtggagagcggataataaatcatcggtttgtcgtaaaccggcataatctgtttggataccgccttggtcagcggataaaggcgggttccggagccgcctgcaagaatgatacctttcatagattcctccattcctatgcgttcattcgcctgtatgaaaaacattttgctttacaggatcgctccggcggcactgttctactgccctgcagcactgttctactgccgtgcgctcctgcccagatgcgccaaaaggggaacggtgtcgcgcgccgtccccattttggtatacaaagccctgttttcttcggtctgtccggcattttcctcccggcagtccggaaatttctcaggctttgtacatttcgttataatatttctggtagtcgccgctggttacgcgctccatccagtcttcatgctcgaagtaccatgcaatggtctttttgatgccttctttgaacatcgtctccggataccagccgatctctttcttaatcttgtcgggagcgatcgcgtatcttctgtcgtgtcccttgcggtctgctacataggtaatcagatccttgctgacaagcgccttgcgcgggtcgtcgtctgcaagcatctcctgcagggtctcgataatgatttcgatgatctgaatgttctgtttttcgttatgaccgcctacattgtaggtttcgaacagtctgccctgctcctgcaccatgtcgatggcctttgcgtggtcttcgacatacagccagtcgcggacgttcttgccgtcgccgtataccggaagcttcttgccgtgcagcgcattgttgatgatcagcggaatcagcttttccggaaactggtaagggccgtagttattagagcagtttgtgatatttgcagggaaatgataggtatccatatacgcttttacaagcatatcagatcctgccttgctggcagaatacgggctgtggggtgcatagggggttgtctcatagaaatagccgccgtcttcgctcaaagagccgtatacttcatccgtcgaaacatgcaggaatttcttgcccggcttaaaggtgccgtccggaagctcccacgcgttctttgcgcagtttaacatcacggcagtacccagcacgttggtctgtacgaatacctcgggatttttgatgcttctgtctacatggctttccgctgcaaaatgaactacgcggtcaatatcgttttctgcaaagatctttgcaatcgcttctttatcgcagatatttgcttttacaaaggtatagttatcgcggttttcaatgtcctttaagttctcgagattgcccgcataggtcagcgcatccacattgataatgcggatttcgttgtcatacttgcggaacatatagtgaatgtaattggaaccgataaaccccgctcctccggtaacaagataggttctcatgcctcttctccttttcgattctgcgcaaaaggacgcaaaatcccataatcctgatttttttccagtgtaccatattttccgtgtttttccaacaggaaaatacggcattgccgccattcccggcaatgcgcgctgcagtttacggatatcctgcagactgcagcgccctgtccgtatcaaattttgtcacaatatcagtaacccatatagcttacgtttaagtcaacatttcctttgattcctgcaatcgaccctctcgacgaatactgccacatctcgtaacgtcctccataggtcggtgcagcgacatactgtgccagccagatcttgcagccgccaagggcgcctgtattgatcttttccgtcagccagtttttgttcgcatacagtcccggcgtgtagccgctgttacggatcgtctggcagaatgcgttgatgacagacgttcgcgccgctttggaaattccgtctgcgcgcccattcgcgctctccacgtcaatatagacaggataagtgattctgtaatttttaatcagagaaagcgtcatggaggcctcttcgaccgcttccacttcattcaccgcctggctgaagaaataaataccgaccttcagacctgccgccgtcgcgccctgaatattgctcttaaacttctgatcctcgaccagcacgcccgaagccgagccgcgatagccgcagcgcaggatgacgtactgtacgccggagtttttgactgcgttccagtcgatattgccgttgtgtttggaaatgtcgatgcccatcacggttccggtgtttaagctgccgtctccgttgaacgtgtatttcacgccctggatcacctgttcgccggtaacagcagttccgtttttgtcatagaaaaagcgttttccgtcgatcgtctgccacccggtataccgatattccacattcgcttttttgcggtaaaatttgtctttggtataataatccgccgtcgttgcctcacggtaggtatccccgtccttgcagtacagctggttgccgtttttatctttcaataaggtctttgtatcgccgcggtttatctttttctccgtcaccttcacggtactgattccgctctctacgttgctgccgtcctgcgcgaccgctttgatcttcgcttctccggcttttacgccttttaccgttcccttatcatccaccgagacaaactcttttccggaaacgatttcccagcgaacggacttgttcgctgcattgtccggcgataccgctgcagaaagggaaacagtctgtccaacctcaaccgttgcagatcctgagatcgtgatcttcttgacctttacctcctccggcttggtttccggcgttttcgtcggctctgtcgctgcagtgctgctttcggttgcagattcgctttccgaaggctttgtactttcactctcggacggcttcgtgctctcgctttccgtcggcttactgcttccggattccgattcgctctcggtcggctttgtactttcactctcggacggctttgtgctttcgctctcggaggaagattcactctccgaaggcggtgtgttctcgctctccgcaggggattcctccctgggctgattgaaaacggcgatctgcgtttcctttgcaaaatatgcgtattttatctccggctccagaagtcttgcctgggcaggctccgggatatcggacttgccgacctcttcatattcctgtccgtttcctgccggtgttttggtggactcaacccattccacagtatcctgcagaaccgattccactgccggtgcaatcgcggtatcctctttcgccacgttgatctccgactcctttttgatctcgtccgtcacgtcgacctttttatactcaatcttgtcctttaccgtcactcgcccggaaattccggctgcttttctgccgctgatttcatccggtccggtcacggtaacgacgtaatcgcctgcttttaagtcttttaaataaattatgccgtccttgtcgtcatcctttgcgttctggctcgacgcgccctccagctttacggtaaagggttgatttcctatcagcttaccggagtttttgtccgcgaatttaattttcatatccttctgcatcgaagacagctttaaaataacgtcgacattggcttccagatccttttcctcatatccggtttccgtctccgtcgtctcttcttcagaagcctcctccgagacgttctgtgctgcgacagcgaccgccgacagaacctcttctccggacatcccgatcgcttccaaatttttcccgactgcagccaccgcctccatctgcttattctgctcgtttcgtcccagatacatcgatgtcgtaaacactgccgccgccaaaaccagcacgcccgtcagagcaatcgcgatatccagcgccgccatcggctcttttctggcagaccggtgttttcggtttctgccggatgctgcggtcgatgcggacgcagagcgctttacagtgcggttctgactgcttttttcatgaaaagtctgactgctttttccggcaggctttttcacgcggcgcttattgctgtgcgctggtgttttgccggatacctcgtcccagtcgtcgagaaattctccatcgtcccagttcgactttttccgctcgggaatacgttctgcgcgctgcgccttttttttctgttctgatacgctctttctatcttttatcccatggggagccgcttttttggcacttcccgtttttttcttcttatgctgttcctccactgattccctcctggcagctttcctgtcgaaaattgtaaacgt

SEQ ID NO: 776 - DNA, 5411 bp, unidentified
  source 1..5411: mol_type = unassigned DNA
tcaaatccgaaagcacttatgcagggctttatactcacccaacgccaaaatcgtaatgtcatcggacaatatggtgtccggcgtaacggaaacatccgtttctcctgcgcgtttgatgccgagaatgttgatgccaaactttctgcggacgttcagctcaccaacgcttttcccgatccacgcctccggcacctgcacttcaaagatggcgtgctgctcgtcgatctctatgtagtcgaaaatatggtcggcagtgaatcggatcgccgcccattttgccacctgcttttcagggtagaccacgttatctgcgccgttgcggagcagaaacttcgcctgcacatcgcgttcggcgcgggataccacgcatttggcacccagctctttcagcagcgaggtggtctccagcgagttctggaagctgccgctgatggtcacaaaacaaacatcaaaatttccgataccgagcgaacgcaggaactccgcattggtgctgtcgccgatctgtgcgttggtgacaaacggaagcacatcgttgatccgttcctcattggtatcgactgccatgacctgatgccccagttgagagagctgcatggcgatatgccgcccgaagcggcctgctccgatcaataaaacatttttcatgggatagatactcctttgcttatccaatcgtgatgctttcctgcggcagctttgcgctgccggttttcttgctggacaccgccgcgtaaatgagcgtaagcccgccgactctccccagatacatcagcgcgatcaataccatttgcgagggaatatgcagctgcggcgtaatacccaatgtcagtcctaccgtgcctaccgccgacgctgcttcatacaggcaggaggacagcggaagattctcgtatacgctgataaaaacgcctccgccaaagaacagggcaagatacatcgtcaggatggtcgcggcggttttgacggcgccgcaatcgactctgcgcccaaagagctgggcgctgtcccgctggcggaaggtcgcggcagcattggcaagcaggactgccagcgtggtggttttcatgccgcctgccgtggagccgggagaaccgccaatgagcatcagaaggatcatcacgctcagagatgcgctggacatggcgggcagatcgacggtgttgaagcccgccgttctcggcgtgaccgattggaacagggctgcctgaatccgctctccgaggggaagggcatcaaaatccgcaaagaagaaaaacagcgccggaaggacgatcagcgtgagtgtcgtgacaagaatcaccttgctctgcattcgataacggtggaagtgcagcttgttttcgcaaatgtcatcccatgtcaggaatccgatgccgccggttatgatcagcagcatgatcgtgatattgatcaccggattttggacataaccggtaagggacggatacaagttattgttcgttcccagaatgtcaaacccggcgttgcaaaaggcggagacggaatgaaacaccgccatccagatcccgtgccatccgtagtcccggcaaaacaccggcagcatgacgagtgcaccgaccagttcgatcagaaatgttccccgcaggatgaaccgggtcagccggacgattcctccgaccttcggcgctgaaatggcgtcctgcatggtgctgcgctgcatcagagagatccttcgcccggacagcagcgcaaccgatgccgccacggtgacaacaccaagcccgcctatctgaatcagcgtcaggatcaccgtctgaccaaagcccgaccaatagctgccggtgtcctgcaccacaagccccgttacacaaacagcggaggtcgcggtgaaaagcgcttcatgaaatggcgttatgcacccggctgttgtggagagcggcagcatcagcagcagcgcacccagcagaataaccccggcaaagcccaatatgataatttgaaaagacgaaaggcggcgctttctgcaaggcatttctcccgtcattatcctcactccttttgaatcgcgtaatcgctttactgtgcgcaggccaaacagacgcggcattgcctgactgtgatgaaggataccctgtacgcgctcagctcggagaccgtaaagtaaatgtcgtatgcgtctgcttcatgttctgaaatagaacatcggctttcacagcttccggtacaaagtaagccggctccagcgctgaacacataacattctcccgccttctgttcacgcaaaaaagacacacctatacccgataccgcagtaaagggcgcaggtatgccgcatatgaacaggccatataagagcggttaaccgttatcgtcgctgctgtcgttttccacggagctcctctttcttactgtgtgcttacatcatagcatttctccagtgtagattcggtaaagaaacaagcgcagagcaataccttcccatgatgccggagaagattgaacggactttccggcgtgcaggcactgcggatgcccggcacagcccgcgggacagagccgtgcttgacgtgcagatcgctggtgcagatggagcccagcgtcacccacacaatggcgtcacgggaatccagtatcctcggcaccggcttgtccagaagggcaaacttgccgcgttctgtgtaggttagtgctttcgtatttatcacccaaaagacagatttaaccgcccaactgcttcagctgtttttccagcttttcgattttgccgctgatactcgtgtattccgtgtaggcagcgaccacatctgcatcattttcaaaggttgggcgctgcgggaattttgcatccagaataaatgtttttgttgcacctgggaaccggacccgaatcgtattcagattatgctccgtcaccattccaccaccgtagagcctggaagtgacggcaacattcaccagcgaaatatccgaaacatccgggagcgacgcccttaaatcctcaatttgggcggtaatatctgcaatccgagcctggcgtgctgccgcatcggcttcctgctgctcggctgcttttttgcgcttctgggattttgcctttgggacgtaggggatttccttatagtagccgtaggtccggcagcagtaaatcaaatcaaacgccagcaaatgcaggctgcgctcctccgcacaatagccgtccctgcggagcttgtcgaaatgctttcggaggaattcaggatgcgctttcagacgctccacgatttcatcgcacatttggtagtatttgctcaggtcaaagcttccgccggacccgatgtcaaatccgtattctccataggcagccatctgggcggcctcgctgtacttgtaaatgtaattgtcctccggtgcatacatggccagatacgcagaggctgcgtgccgatcgtgcttaaaggaccaactgcccggataataggcaatgcgcagccgttccattccgtccaggaactgatccatatgctcctgccgaagcttcagatcgccgtgatcctcggcaaagagaacatcgcagaacaggcgctccacttcggcagaatccttttcgtagagcttcacgacggcattccgtggatgcatacggctgttatcaatcaggaccgaaaagtcctttgtggcagcattgaagcgggaagcaaaatcgggatgatcgtttcggaaccactcccgctggaaggtctttaaggccctccacttaaaaatctcatcatgctcactgccataaagggtgtctatattctcctcatagagatggatgagttcgtctaaaatcgctgcattcattacctgatctcccacatataagtattttcccatgtcaaatcgaccccgctgccggagaagatcggaatcggcccggtgtccgccgtatggcggtagacatcgtcaatgcaaagctggtgcatggctatgggccagccatctgaggcctgccggggcccaccgaagggataccgtgagaccggccggctgcgggcttgactgctggctcattttaccgtccgggctgtttgacaggcctgcatatcaccgggccagctgggccacggcggccacggcggcgtcgatctcctcctccgtgttgaagggggaaaagctaaagcgcaccgcaccctgctcccgggtgcccagagcctggtggagccggggcgcgcagtgggcaccggggcgggtggcaatgccccagccctgcaaaagcgcatcagacacctcgccggaatccaggtcccggatgttcagggacacgatggccgcccggcaaggggcggaaaagtcgccatacacccggacgccgggaagctcccggacgccccggtaaaaccgcagcatcagcccgtgctcccgggcgtacaggctttccaccccctctgccagcaggtattccagagcggcgtgaagccccgccaggccatgactgttcagggttccggcctccaggcgggtgggataggcggcaggctgatccctgtcgaaggagtgaacgccgctgccgccccgcagcaggggccggacctccacccccgggcggatacacaggccgccggtgccctgggggcccagcaggctcttgtggcccgtaaagcacaccacgtccgcccccagggccgtcatgtccaggggaatggctcccgccgtctgggacgcgtccaggatcagcagcgcaccgcggcggtgggccatggcggcaatgcgggggatatccagcacgtcgccggtgacattggaggcgtgggtacataccacggcccgggtattgggccggaacagcctttcaaaagcatcataagaaacctgcccgtttttgtccgccgggacaaagctcagggccattccctgccgctgcagggcatacaggggccggagcaccgagttgtgctccaggtccgtggaaatggcgtggtcccccggggacagcaggccgcatatggcgatgttcagagccatggtggagttggcggcaaaaaccacatggtccggccgggggcagcccagcagccgggccgccaggcagcgggtatcatacaccgtccgcagggcggacagggacgccccatgagcgccccgggcggcgtttcccaccttacagatggcctctgccaccgcctgggccacctggggcggcttgtgcagggacgtggcagcactgtccagataaatctccgtcatcagaacatctccaatacgcagcaggggccgtggccgatgccgttttcatccagcgccgccgtcaggacggtttcgtcgccggggtccgccttccaggccaggccgcacccggcggaaatgcgggacggcagcgggatgatgcgccccggcagagacagccgcccgaacagggcctccgccgccagggcctgggccgtctcctggaaggagatcaccagggccggggtccgttggcgggtcaa

SEQ ID NO: 777 - DNA, 10560 bp, unidentified
  source 1..10560: mol_type = unassigned DNA
atgaaatggaacaaagtcgttttcaaatttgtcagtatcagcttttccatcctggttgcactgcttgttgtggtgggactgattgaacttggctcctactgctatgacttcggataccgggtgtttaccgagagcccggtggacgaaactccgggcagggatgtgaccgtatccgtgacggcggatatgtcggagcatgatatcggaaagatgttaaaagaagaggggctggtggaggatgcgaatctgttctatgcccagctgaaactatctgcttactccggaaaactcaaaccgggtgtttacacgttaaatacctcgatgactgcgcgggagatgttcgtgatcatggcagcggatgccggtgatacggaaagtaccgaggacaccgagggtaccgcagacaccgggaataccggggcggcggatctgacagatgagacggacgatacacagaccgcagaagatgcaggggatgcagaggagacaccgtgatagtagatgagagacttgtgacctatatcaattctctggatgcgggaaatactgcgatgctcgatcagattgagcgggaagcgacagccgattacgtgccgattattcggaaggagatgcagagctttttgaagtttctgcttgccatgaagaagccggcacgtattttagaagttgggactgcggtgggattttccgccatccttatggcggagtacgatcctgtgccgtgtcagattacaacgatcgagaattatgaaaagcggattccgattgccagggagaactttaagagagccgggaaggaagcgcagattgcgctgctggagggcgatgccgcggaagtgttaaagacgctggaaggttcgtatgattttatttttatggacgcggcaaaagggcagtacattcatttcctgccggagattctgcgtcttctggcgaaggacggcgtgctggtgtcggacaatgtgctgcaggacggcgatgtgatcgaatcaaggttcgcggttacaaggcggaaccgcacgattcataagcgcatgcgggaatatctgtacacgctgacgcacagtgaagaactggtgaccgcggtgctcccggtgggagatggcatcaccttgagcacaaggcgttaaggacggcatggattacgcaggatgggaagatggcggaatccgtgcgggattacatgaagcatgaagatgcgatgcatgcgtgtgagaatagagaggaacgagaatatgagaagaccggagttactgataccggcgagcagtctggaagtattaaaaattgctgtgatctacggagcggatgcagtatatatcgggggcgaagcgttcggactccgcgcgaaagcgaagaacttttccatggaagagatcagggaggggattgcttttgcgcatgcccatgatgtgaaagtatacattaccgccaatatcctggcgcacaacggagatctcgacggtgtgagagagtattttgccgagcttcgggagataaagccggatgcgctgatcatttccgatccgggggtctatatgattgctaaggaagtctgtcccgagatcgagcgccatatcagtacgcaggcaaacaacaccaattacggtacctaccggttctggtatgagcagggggcaaagcgcgtggtgtcggcgagagagctttcgctggctgagatcaaggaaatccgtgccaatattccggacgatcttgagatcgagacctttattcacggggcaatgtgcatctcctactcgggaaggtgcttactgtccaactattttaccggaagggatgccaaccagggagcgtgcacacatccgtgccgctggaaatacgcggttgtggaggaaaaacgcccgggagaatacctgccggtctatgagaatgagcgcggtacttatattttcaattccaaggatctttgcatgatcgaacatattccggaattgatggagtcgggtattgacagttttaaaattgagggtagaatgaagacagcactgtatgttgccacggtggcgagaacatatcgaagggccattgatgactacaagcagtcgtcggagctttacagggagcatatggcgtggtatcaggagcagatttcaaactgcacctaccggcagtttacgactggatttttctttggcaaaccttcggacgaagcgcagatttacgacaataacacctatgtgaaggagtacacgtatctgggcattgtcggagagcggaacgaagagggactctaccggattgaacagcgcaataagttttctgtcggggagagcattgaggtcatgaagccggatggtgccaatatcacggtgactgtgcagcgaatcgtggatgaagaggggaatgatatggagtccgcaccgcatccgaagcaggtgctttatatcgaccttggacagccgcttgccatgtatgacattttgcgaagaaaagaataggatggtggaagacgatgaagcaggagaagtatgttgcatatgtaggaacttatacacacgagaacagcgtaggaatccatatctatgatgtagacgttgaggcgggaaaactgacggaacgtaaggtggttccgatcaacaatccgtcggatctggttgtctccaaggaccgcagatttctgtattccattgcggatgagggtgtggaatccttccgtattgagaaggacggcgatcttactccgatcaacaagcagtggatcggcggaatgagaggctgctatgtggaagtggatgacggcaaccgctatctttttgtgggcggacatcatgacggccgtgtgagcatgatgcatctggaagcggacggaagcatcggcgggatcgcggacggtattttccacaaaggaatcggaagaagcattgcacagcgcaacttcgtaccgcatgtggactgcgtgaagctgacgccggaccagaagtttctgtgtgcggttgacaacggactggatcaggtaaaagtctaccgcgtggattatgagaacggtaagctggagctcatcgacattatccgtggaccgctcgagtctgcaccgcgtatgatccgtttctccagaaacggcgaatatgcatacattctctatgaactgctcaacatcgtggaggtatatcattattctgtgcaggataatgagccggtatttgagaagatccagaccatcagcacttccccgaagaaggaggaggatacttgtgcggcatcgggtatggagatctcgaagagcggtaagtatctgttctgcagcaatgcaggcgtgaactctgtcgtgtgctatgagatcgaggagaagacgggaatgctcaccccggtatttacgacgaaggtgaacagcgattacccgaagatgcttgccatctatccggatgagaagcattatctgacactgaacaacaattccaacgatattttcagctacacgatcgattacaaggacggttattcgcttgagaccggttccccggtgaaggtagacaagccgaactgcatctatatgctgaagcttgaggtggaataagcaaataaagtgcgaatcaggaactgccgcaataagcatatcgttctttggacgataagtaatattacaagaaacacacttgagaatttcatgtggaaatgcagatggaatattcgttggagaaaaatgtgagcatttcttccagctgaatgtttgcatcggattccgtgtctcttccacgtttggacaatccgacgggtgcatgtccggcacaccggagacaatgggcggactttctggtgtccctaatggcacctcttcacagacaatataaaaccgcgcgaaccgaaactcgttgccatctgctattaaaaacatggcagatgacaattcagacatcggcttcgcgcggttatgtttgaagtgctatactgaattttcggctttaatggtaattagtttcatagtgtatatttaatgctccttgtaagatactaactgcattctacatctaagaataaggataggcaagattatcgtttacaaaagcattctggtgatttgacatgaaaataggaacaaaaacaagaatttttccacacataaaatgaatcatatttctataataaatgtcaagaaagagagggcagatcaatgaaaacagacgcacgagttcgctacacagtacatatgattcagaatgtttttctggaacttctaaaagagaaaccagttgccaagattacggtaaaggaaatctgtgaacatgcagaaatcaatcgcagcacgttttataaacactatcaggatgtgtatgatcttatggaaaaactggagaatgaagccgtagaggcatttgaaaaattattggattcctatgtacagaacgaaactgtaccggcattagtcactctgctgacctcactccgagaaaatcgagaacttcttttgccgttgcttgcaaattcttcgaatgatgattttatgaaacggcttacggatgcctgttccggatatgcgttatctcacctcacaccggaggcggactatacgagtaatccaaaacaggcggccgtctatgcttatcttgcaggaggaacatcaggaatcatcagcaattggctggaaaccggtacacaggagcctccgcagcaggttgccgaattgattcagtcgttgaatgaaaccgtgttgacggtattggttccctgaagttttccaatttccttcaaccatgcaatctcatctcgaatcgtctcatggaaaggtctggtcttgtagccaagatctttttttgcttttgaggagtcgaaagcattatttcttgacagattataaatcatgtattttgtaagtgcaggtgtggagcccttcttctgcgcctgcttttccaatatatttgcaacgaaagaagccagtggaagaggaaggaagaagagcggacgtttgcagcgaccttcttttgcaacaatgtttgcaaattccggataagtaatgacttcatttgccagaatatagctctctccggattttccattttctactgccaggatgactgcgtttgcaaggtctcttacatcacacaagttaaaggttccgttgattccgatggcagcttctccgttcatctgtttgagcagtccatcggttacctgtccgattgcattgtctccaggtccaaggatgccgcttggaagtacaaggcaggcgttcagatgctggttctttactgcatctaacacaagctgggaggccattgctttggattttccgtaagcactgatcaccggttccggatcgtaatagctgatttctttcattacggagcctttcggcgcttccggaatggaaccagtgcttcctacatatactaactttttgcattctttatgctccagacacagatcaataatattctgagttccgcctacattgatgtccatcacaatcttcggcatctccatgccgagtgcaacgatgcttgcacagtgcagaaccactgtttctgtatccgcatctacatggaagaaagtttctaaagatgctttatctctgagatcaccttctacaatctctacgtcctttggaatgtattgaattgcaggatcgttcggcagtacaaatgcacgtacgctttcgttctgctccaacagctgtctgcatacttcacttccgagatatcctgccgcaccggttactaaataagttcttttatttgccatgataattcctcctgatatttgtgaataattctaccggatcttgctgctgctcatgagatggatgcgaacagcaacaagaggtgtttctgtttttttgggggggggtacaattgccagtatagcgagaatgaacagaaactcaatcatcaatgtggaaggaaatgtaaaataatcgacaagggagaagaatctgttggagaagtgggcacggatgatgaaattgatgttataatattaagaatgaatttactaaattactgaatagagggaagtatttgaaataatgaagaatatgaagttaaccgaaggacctattgtgaaaaatatgctactctttgcattaccgatgatgctgggtaatttcttgcagcaaatatataatatcgcagatatgtttattgtgggacggtttatcggttccgacgcattggcggcagttggatcggcatacacattgatgacatttttaacatcgctgattatagggctgtgtatggggagtggagcattattttgtgggaatagtctttatatttttgtataatttctatgcgtatcttttgcgctcagtaggaaattcgattgtaccattatattttttggcagtatcctcggttttaaacgttgttttggatttatattttgtgatttccctaaaaatgggaacgcccggagcagcgattgctaccgtaatttcacaaggaactgcgggaattggctgtctgtttcttctgtatggattttacagagggattgggcgtgcagaaatgtcttttatactgactgtcatttctcttggaacaagagttgtattagcttatgtctttgcaccgattatcggcgtaacagcaatttggtgggcaattcctatcggatggcttctggcggatacggtgggactgatatattacaaaaatgcctccctatcatatattgacagggaaacactttattcaaatagaaaatcataaagttatgaaccgtgtagccttttttgggtgctcctgtagttttgcttgaaacgagcaaagctacgggagcatttttattcgctatctttatatgtccggaattagaggacctccttattccgaacccaattatagtcaggtattccctaaaaagtaatacatgttcttaaaatcgagaaaagataatgaaaatgctaacaaaaacgtgaattcctattcatggaaaaaagtactttgagatattctatacttgaaaataggaaagctgtaaagggcagcataattgaaatgaaaaaggagagaacgaaatgatgaatacattaccacaagattttctggtaggtgcagcaactgcagcacatcaggtagaaggtaacaacatacacagcgattactgggcaatggagcacatgaaatacggaaattttaatgagccctctttagatgcggtggatcattacaaccgttatgaagaggatatcaagatggtcgcagaagccggtctgaatgcatatcgcttctctattgaatgggcaagaatcgagccaaagcagggtgtctatgatgagaacgagattgaacattaccgtaaagttcttacatgctgccgagaaaatggggtagagccgatcgtgacgatgatgcatttcacatctccaaaatggttgattgagaatggcggttgggagaatgaagcaaccgtagaggcgttcaagaactattgtcagtatgtaacagagcagttgggcgatctgatgcattatgtctgcaccatcaatgaggcgaatatgggaatccaggtagctgcaatctccgcacgttacagagcacagatgatggcaaagatgcagcgaatgcagcagggtggagcagaagagaaaaaggatctggaaggaactgctcaggttggaatgaatttcaacgacatgatggcaaatatgcagaaacagaaagaagagaacgtggaaatattcggaacagatactctccagacatttgtcagtgcaagaacaccggagggtgacatgcttgtgattcgtgcacatcaggcagcaagagcagctatgaaagcagtaaaaccggaacttcagattggtcttaccttatcactgcatgatattcaggcacaggaaggcggagaagagacagctgctaaagaatgggtggatgaatttacacactacgttccttatatcaaagaggatgatttctttggtttacagaactactcccgttcactcattggaccaaacggaattcttccggttccggagggagcagagatcacacagatggattatgaatattatccggaaggcttagagcatgtgatccgcagagtatatgaggaaatgccgatgccgatcatggtgacagagaacggtattgcaacagcagatgatacacgaagagttgcttacattcagacagcgatgaaaggtgtggagaactgtattcaggatggcattccggtcaaaggatatatgtactggtctatgatggataatttcgagtggcagaaaggattcggaatgacatttggtctgatctccgtagaccgcacaacacagacacgtacagcaaaaccaagtcttactgtacttggaaattatacaaaataatgaaaggtaaagattattagaatatgagaaatgtaatgaaattaaaagacaactggatgtttgtgaaagaagcagagaatgcagcagatgcagcatcaaagaaaggaactgcagtaagtcttccgcatacatggaatgccgtagacggacaggacggcggcaatgactaccacagaggtacctgctggtatgtgacaaaatttcagaaaccggaattagaagcaggaagtcaggtatatgtggaattccttggtgcatctgtgatcgcagatgtctatctgaacggagaagcagtggcacatcacgagggtggatattctacattccgtgtgaatctgacagataagctgcaggaagaaaacgtgctggcagttgccttgaataatgcagacaataattatgtgtatccacagaaagcagactttacattctatggcggtctgtatcgtatggtgaacttgattgttgtaccggaaagccatttcgaactggattatgcgggaggaaatggaattgcagtgactccgaccgtagagtgtgacgaaaatcgcgtgccgacaggaaaagcatctgtgaaggtggagacatgggtgacaggaaatgcggattcagtcgtgattacaatcacaggagaagagagtgaatcaaagacagtttcggttgttgacggacacgcagaagcaacattcgaactggagcacgttcacctgtgggacggtgtggatgatccgtacttataccatgcaaaggcagaactttcaagcggagatgtgacagagactacatttggatgcagaagcttctacacagatccggaaaaaggattcgtattaaatggacgcgtatatccactgcgtggtgtcagccgtcatcaggatcgtaccggagcaggaaatgcattgagctatgagatgcacaaagaagatatggagatcatcaaggaaatcggtgcgaacacaatccgacttgcgcattatcagcatgcacaggaattctatgatttgtgtgatgagtatggaatggttgtatgggcagagattccgtatattactatgcatatgccaaacggacgtgctaacacattaagtcagatggaagagcttgttgtacagaattacaatcatccgtccattgtatgctggggactttccaacgaaatcacagccgcaacaccggttgacgaggatttactagaaaaccacagattgctgaatgatctgtgccacaagttagacaagactcgtttcacaacgatggcaaatgtattcatgcaggagacagacagcccgttgttggagattccggatgtgaacagctataacctgtatttcggatggtatctgggtgaactggaacagaatgatgaattttttgatgagtatcatgcgaaatatccggatcgttgtatcggattttctgagtatggtgcagacgctaatccacagtaccagagcacaaatccgactcacggagattattctgagacttaccagacagtatatcatgagcatatgttgaaaatgattgaggaacgtccatatctgtgggcaacacacgtatggaatatgtttgacttcgcggcagacggccgtgatgaaggcggcaagcatggagtgaaccagaaagggcttgtcacaatggacagaaagctgaaaaaggatgcattctatctgtataaagcatactggaacaaagaggacgctttcgttcacatctgtggaagcagatatgtagaccgcaaggaagacacaactgaagtaaaagtatattccaatcagacaacagtatctttgtatgtagacggaacattgttagaaactcaggacggaagtcgtattttccgatttgcagttccgatgacaggggagcatgagattgttgcgaaagcaggcgcagaagaggacagcatccacatccgtaaggtagaggaagcaaatccggattacgtgatgggagaaatcaaagatgttattaactggtttgatgatgaaccatataaaccggaatgctattctatcaaagataaaatgagtgagattaaggcaagtccgaaagcaggtgcaattctagcagaactgatggcacaggcacctggagcagaatcaagaggagatgtggcagaaagtgtcaaagacaatccgaatctggtccgcatgatgggaagaatgacgctggaaagtatgttaggacatatgaaagacagtatcacagaggaacaggtgaagggcttaaaccgcatgcttcagcagattaaaaaaggcgaatag

SEQ ID NO: 778 - DNA, 9122 bp, unidentified
  source 1..9122: mol_type = unassigned DNA
tcactgaatctctggcttatccagcgttactgtattctgtttttcctctggaattaccagatcatccagattttccggaatctcgattccacgctctgccgcatggaaaatcttcataaattccttacctgtaatggtttccctgcggatcaggtaagcagcaatcttatcaagtgcttctctgtggctgccgatcagtctcttggcttcctcataagaattatggagaagtaccattacctcatggtcaacctctgtggcagtgtcatcgccacagtttaacactgttcttccgctgagatactgattctcctgtgtagccagacccataagtccgaacttgtcggacataccgtactgtgtgatcatggctcttgccaccttggtagcctgctcaatatcattggctgccccgattgtgacagtatcaaataccagttcctctgctgcgcgtccgccaagatatcccacaagcattgcttccagttccttctttgtattgagatatttctcctcctcgggtacctgcattacataaccaagtgcccccattgttctcggcacaatagtaatcttctgtacaggctctgcatctttctgcagggcgcttaccagtgcatgtcctacctcatgataggatacaatcctgcgctcctgtgcactgaggatcctgtccttcttctctttacctaccagaactacttcaacagcttcgagaagatctttctgggatactgcactgcgtccactcttaacagcaaggatagcagcctcgttgatcatattagccagatccgaacccactgccccagaagttgcaagtgcaatgttctcaaaatcaacagtctcatccagatgtacatttcttgcatgaaccttcaggatctcgattcttcccttcagatccggtctgtccacaatgacacgtctgtcaaaacgtcccggacgaagaagtgccggatcaagaacctccggacggttagtagcagccaggatcagaagtccctttgaagtgtcaaatccgtccatttccgcaagaagctggttcagagtctgctcacgctcatcattgccgccaccataatgagaatctcggctctttccgattgcatcaatctcatcaataaaaatgatacatggtgcattcttctttgcttcctcaaagagatcgcggacacgtgatgcacccacacctacaaacatctccacaaactcagaacctgacagagaaaaaaacggcacatgtgcctctcctgctactgcctttgccagaagtgttttaccggttcccggaggtcctacaagcaaagctcctttcggcagcttcgctccgatggtggtatatttgccgggattatgcaggaaatccaccacctcctgcagtgattccttggcctcatcctgccctgccacatccctgaaagtaattcctgtatctttctgaatgtaggctttggcgcggctctttccaacgcccatcattccgccacccttattcatgcggcgcataaataccgtcagaagtacaaagagcagaatcgttggcagaagcacactgaccagcatagaaataatttcccctgctgcatccggcttcttatactcaaacttgattcctgttccctcaagtctctccgtcagcttatctactgactccatctgattggcataataaacttcttctgaaaatcctgatgactgatgtttcggcgtgatcgtcagtgtatttgactgaagcgtaacctctttcacatctccatcatctaccatctcaataaatttatcataagtgatctcactcgaattatccttgagcatattggtaaacatggcgaaacataccagagttaccaggaggcataccagaaaggccagtatcgactgatgattcttgttcgggtcctgtctgcccggacctttattattatcaggacgattgccattcggattgttatccatatgattatccatttcattcctcctaaacgttatcgttcttattataaagagaattcgggtataaatcaactgcgagattgtgaaaattgtgtccggttgtgcatatctttctataaaccctataaaatttatatgaagttttacaaattcacctgttacaaatggctttatttgtagtatactattgacaaactgattactgctcacttcgttcccggtaatgcgctccgcaatacacagaatttatgctgaccgcataaatttgcgctgtatgtcccgggatattctaaatgagcagtactaaaaatgtgatgaggaaaggaaatgaacaaatgaagataggatttgacaacgacaagtatctgaaaatgcagtccgaacatattcgggaacgtattaaccagtttggaaacaaactttatctggaatttggcggcaagctttttgatgactaccatgcttccagagttcttccgggatttgagccggacagcaaactgcgtatgctgatgcagctttctgatcaggcagagatcgttattgtaatcagcgccgctgatattgataaaaataaagtcagaggtgaccttggtatcacttatgatgaagatgtactccgccttatggaagtatttaccgagcgcggactctatgtcggaagtgtctgcatcacccagtattccggacaggaaagcgcagatgcgtttaagaaacgtctggagaagcttggaatcaaagtatacgtgctttatctgatcccgggttatccgaataatacttcctttattgtaagtgatgagggatatggcaagaacgattatatcgaaacaacaagaccactggttgtcatcactgctccaggacccggaagcggaaaaatggccacctgcctttctcagctttaccatgaatacaagcgcggtgtcaaggcaggatatgccaaatttgaaactttcccaatctggaatatcccgctgaagcatccggtaaatctggcatatgaagcagctactgctgacttaaatgatgtgaacatgatcgacccgttccatctggaagcatatggtgagactactattaactacaaccgtgacgttgaagttttccctgttcttcaggctatgtttgaaaagatcatgggcgagtgcccttacaaatctcccacagatatgggcgttaatatggccggtaactgcatcgttgatgatgaagtctgcaaggaagctgcacgtcaggagatcatccgcagatattataagagcatggaagctctggttcgcggaacaggccgcgaagaagaagtttataagattgagcttctgctgaaacaggctcatgtgaccatcgaagaacgcaaggtggttcctgcagcgctgaaacgtgaagaagaaacaggtgcacctgctgctgccatggaacttcctgacggacgtattgttacaggtaagacctctgaacttcttggtgcatcttcagcactgcttctgaatgcactgaaagaactggcaggaattgagcatgacaaacatgttatctctccggaagcattaagaccgattcaggcgctcaagacagaataccttggaagcaaaaatccaagacttcactctgatgaaactctgatcgcgctttccatcagtgccgcagataatgaagatgcgaagctagccctgcagcagattccgaaattaaaaggctgccaggttcatacttccgtacttctgtctcaggtggatatcctggagttccgtaagctgggtgttgaacttacctgtgagccgaaatctgagcatgctaagaaactgcagaaataatttctgaaatggttttcaaatagcagcagaaaactctgaaaatccacaatatctatataatgatacaagaaagaatcctgcctgaacatatgacagtttcatatgaacaggcaggaattttttatttctctataatctcaatcgctctgtccggataattggtaatgactgcttctgcacctgcgtcttttaccagctggatgtgttctggtttgttggcagtccatacgtgcattttcagtccggcacgtttgacttcttctatgaactgtgggtatttcaggtgataaactgcaggatgtacggcgttgattccgagatttttggcgtacatggctggatttacccatccgtcactgaaaaggattccggtctgtacatggtcattcagctgttttaactgtaacaggctgtaatggttaaaggaggaatagatcagctggtcttccatgttcatttcttttaccagtttcaggattttcccttccattcccggatagaagcagatgctgttctttagttcgatgtttaccatcatatctgtggtgcgcatgagctccagtacttctgccagagttggaatgtgataaattcctgatggttctgcgggtgtactgacttttaattctttcaattgagccagtgtcatatctttgatcagtccggttccgtctgtgacgcggtctacgttttcgtcgtgcataacgatgagttcgccgtctgcggaagtatgtacatccagttcgattccgtctgcgccctgtctgatggcaagttcaaatgcttccagagtgttctccggtctgtatccgctggcacccctgtgtgcccatacttttgttgttctctttgttgtttctgtcatttccatatgcctctctgttctttctattttgaattttctctgtttcttttgtttttgttaatggtattactatatctaataaatatgtttgatctatggtcagtctgcgaaaaaaatgtgttctcctataaatggtacatttcagatttgcggtgttttaataatggaagctgctctctgatctggtcttcccggtccaaatctatttcttctattaaaatgccctctttctcatccaactgtttcataacctttccccatggatctgttacaatagaatgtccccaggaaatatatcctgcctgtgtatctctggcaggagcacatccaagcatatatatctgattgtcaagggctcttgcacgaaaagtcagttcccagtgtgccggacctgtggtcatattaaatgctgcagggacgaaaatcatccttgcaccgtccagtgccattgtgcggacaaactccgggaagcggatgtcgtagcagatcatgacacccattttcccaaattcagtatcaaatactgtggcatgatctcccgaagtcagagtatcggattccttgaagtactggccattttttacattgatatcaaagagatgagcttttctgtgcttaccaatctgttttccatctctgtcaaaaatataagaagtgttgtaaacctttcccacatcatctgcttccggcatggaacctgcgatcagataaatatgatactttctggcataatcagacatttcctgccaggatggaccaccttctttttctgcataaactggaaaattttcggtctgatacggacagcagaacatctccggaagaattacaaagtccggattttccgcctttattttttctatataagtgccggcagtacggatattttgtattttatcttttactgtgggcatctgaattgctgctactttcatatgcgtcctctcctttcttttatctattatagccgaaaaaaaccacatcgccaatcctacattaaaacatcccccacgcatgaacattccttccatgtgtgggggatattgattttccacaggtaagttgctaaatgcacctgcattcagttgatttaattaattattcttcataaccattcgggttattggactgccatctccaggagtctgcgcacatttctttaataccgttttcggctttccatcccagttctctctctgctttggaagcatcggaatagcaggttgcgatatcgcctggacgacgtggcttgatcacatatggaattttaacacctgtagcagcttcaaaattcttcacaatatcaagaacactgtagccttttcctgtaccaaggttgtagatacttaatccggaattatcttcgattttcttaagagcttttacatgtccttttgcaaggtcaactacgtgaatgtaatctctcacaccagttccgtccggagtatcataatcatttccgaataccccaagttctttcagtttacctactgcaacctgtgtgatatatggcatcaggttgttcgggattccgtttggattctctccgatagttccgctcttgtgagcaccgatcgggttaaagtaacggagaagaactacgttccattccgaatctgctttctgaatgtctgtcaggatctgctcaagcatggattttgtccatccatatggatttgtgcactgtcctttcgggcactcttctgtgatcgggatgattgccgggtctccgtatacagttgcagatgaggagaagataatgttctttacattatgttttctcatgacatctaccagtgttaaggttcctgcaatgttattttcgtaatattcccagggtttggcaacggattctccaactgctttcagacctgcgaaatgaatacaggaatcaatatcttctttatcaaaaatttcatttaaagcatcgcggtccaggatgtctgctttgtagaatttcactggtttgcctgtgatcttggaaactctttccagagatttctcacttgcattgcttaagttatccagaactacaacatcatatcctgcattctgcaattctacaactgtatggcttccaatatagcctgctccacctgtaactaaaattgccataataattcctcctaacctgtcttcctgctacaatacctgtttttgcaatttctgtttttttctctttcaacaatacctatattagttcacagcatcagaaatatccttgataattctgagtgtaatctataaaattctgcggatatcctgtttcacatctgcaaaatttacctctgtattttacagcaccctatattcagaactgtaaaatactgttgcctggcacatcatgtattgtagaaaatcctgcgaaaatatgatttctctcatatccccgcaggataattctatccgaatcagttcataaacacaagtctttatggacatgtacgtttttttatacctgtttatacttatttacaatctctttcatccgggaaagtttttcttccatgtctttcaccagtttaaactgtgttctgcagcgatccagattatgtccctctctgtgaatcttgaaataatgatctccctccagatagtctgtgaggaaacgcattccacattcaaaggtcataaggattgctcccatgggaagcatatccagttctgtctcagtcagcgcaccgccacagccttcaatgaagcctttgacataaacttcatacagatgaagatcacaggacaccttcgtcagatctttctcatcctctgctccggtacttgcgccaaaacggatagaatcgccgaaatcatttacggaaagtcccggcattacggtatcaaggtcaatcacacagatggcttttcccgttgcattatcaatcataatgttattcagcttggtatcattatgtgtaacacgcaacggcagctttccctgatcctgcatatcgcacagaacatgtgccagttctgtgcggtccagaacaaactgaatctctttttccacatctgctgctctgtgacatatatctttttccacagcagttttaaacttatccagcctgtccaccgtattatgaaaatttacgatggtctcatgaagcgtttctgccggatagtctgcaagcagcctctggaaatgcccgaaagcaactgcactctggtaaaaatcttcctcatcttttaccatatcatagcatgtggcattttcaatgaataaatatactctccagtattctccgtcctcatctacataataaggaagtccatcctttgtcatcacaagattcagagtctctctctccacatctccaccgttttcctggatctttttcttcagccaggcagtaacaccgctgacattctccatcagttccacaggtttggtaaaaatactcctgttcattttctgaagaatataatgtttgcctgtatcataagtcaggcggtaagtgtcattgatatgtccgcttccataaggaatacattctgtcagattatcttccagaacaaatgcactggtgatattctttatttcccggttaatttccactcaattattcctcccataatttctgtggatacagccctccatcttttaaattctgaatggcagctactaccacaggtttatcttctttgtaggttacaccataccatttatccatagatttcagaacttttacagttgctctcttctcaccgagaagttcatctactacaaatggcaggaaatattcgcatttcagcgggtttactttcagattctcatccaggaatttagggaatctgtctttcagctctttcagaatgcttgctgaaaatccccacatattcatggatactgtactgccttccggaagcatggtccatgtttttccatcgtcttctgtataagctgtgccgccgtcatgcttttcgatatgggtacgctcgttgatcttaagaagatgtccttcttcgtctgtcacgcacacacctcttgccacatggccattctctgtcaaagtattttccagtttatagccgaccatcatatatctgtaaatatccgcggtatcttcgttctctgtcaggaaatcatatgccatcttaaatgcatggcttccataatagtcatctgcattgattacaacgaatggtccgtcgatttcattgatacagcttaatacggcatgtccggttccccatggtttcacacgtccttccggtacttcatagccttccggaatattgtgaagatcctggaaaacatatgatacttccagctgattgctgagtcggtcaccgatggcgcttctgaagtctgcttcattttcttttttgataataaatactactttttggaatccggcctgtactgcatcataaatggagaaatccatgatgatgtgtccctctttatccaccggatcgatctgtttcagaccgccgtaacggcttcccatacctgctgccataactactaatactggtttcttcat

SEQ ID NO: 779 - DNA, 19037 bp, unidentified
  source 1..19037: mol_type = unassigned DNA
aggcatcgtcaaaaccgaggacctgcactgttttgaaggatatttagtttaagcatctgctctccggacgcgaattcgggttgcggctcccagcatccgctgcgcgttgcttgcgtcttgctggccgcggccccaacagcaactccctgtatccgccactggcggcggtcgttgccgttgcagggcattccatcccccgcccaactgcctgacggcagtcgggtcccaccctccggacacttgctttgggaaactccccgccgtcctatcgtctcgaacaaataaaaaaatccccaacaaacacaaaaacccgcctggcagtgggtttttgtgtatagaggggtgggaaagtatataaagttgggaatcgcaattcaaatgcaggcacttgagaaacaacgtgtttttgcgcagtctttggcgcttaccgtgccctgcgatatgtattatacgcttttttcttttcttgtcaaacagaatttttggcatttgctttaatttagcactttacatttcgaccgaaactttatataattaacatagaaaatacaaaagcgagttttttcgcagtttatgcgattatgacaacagtaaaactttactttcaaaaatttttgtgtaattcaacaaaaacgtaaaaggagacctttctcatggatgatttagaccgcaagatcctctcccttctcgcaaaaaatgcccggatgcctgtcaaggagatcgccgagcaggtagcactgaccagcccggctgtttccagccgcatccacaagctggagaccgacggcatcatcagcggctacaccgtggtgctgaaccgcccggcagaccgtgtctatgtggacgcgctcatcagcctgtccgtcacacccagccaccgggacgagctggtggagctgatgcagaacagcaaggaggtgctgcagtgctaccatgtcaccggtgcctacaccttcctcatcaaggtcagctgcggcagcatgccccagctggagcacctgatcctgcagttccagaagctgggcaccaccagcacccagatcatcctttctactccggtcaatcatggtgatctggaagcgctgcagctgtaagccgttcacagaactgttacaactgccgtgcaatcttccggccgaccgggccgtattcctgatacaaggccgccgttcagcggctgcataaacgcccccaaaggcgggcagactgatcacgatcaccctgcctttgtcagacgaaaggaactacgaccatgaaaaaacgcattcttgccgctctgctggctcttggctgtgccctgctggtgttcaccggctgcggcagcaaaaaagataccacccccaaagactacacccagatcatccacgatgcccgggaagccgaggacaatgattattatatgatcttctccccggcagaggacggcaagttcaccgcccagtacggctacagcgccagctatccggcggaggacctgaacgatgagatccagaacatgctgctccccctgctggacctgcccgagggcagctacaccgatcttgccgcttccctctctgccatgatggtgcagagctatggcgttgccatcgtcaagcctgctgagggcaagacgcaggaggtcgtggacgcaatggatgcctatatccagaaccagcagcagacgatggagcactacctcgaggatcagtatcagatcgctgccgccgccaaggtggccactgtccccaccggcgaagtggtcatggtgtgctgtgagaacagcgatgccgtgatgaacgccatcaagaccgctctggctgcttaaattatctttcaaaacaacaatgccctgtaccgttttgcatggtacagggcattcttatttctaccaaatggattatatcgttcaaatatcacatatccgaacgggaatatgcgttcttcatattgctgctcagctcaaacagcaccttatccagcgtgtcggcggcgcgggccttgacctcagcggccagggcctcgttggcctcctggcgcagggcggcgcggcgggcggggtcggtctcggccagctgcttagcgtcatactgattcagcagggcacggcaggcggagagtacgcccagctcatagcgctcgacatggaacaccgacttgccataggaagcatccgccatcgcagcgatcatccggctgacccagtagaagctgtcggtggacacctcaccagtggtgccggccagataggctggggtcgtctccacattggcgtagaagggcaccatggcgttcagggcattggaggcgtaggccacccactccactgcctgcaggtcggcgggcagagcaggccgcagctgaatcagcgccacaaagtcgttgcggttgatgccgatggagcggtaaacgccccggttctctctggcaccgtagcttgcatacggatcatacggcgtgccctgataatggctggacagcacatatttcacgtcctcgggggtgatcttcttctcaggcaccatgcaccagggcaggtcgtcggaagccggggtatagtcggcatcgggaccatcccagacccaagtggtggggttcagggtacgcagcatgtaccaggcgcggggcgtgttgtaaacgtggtcggaatcggtgtggctgccaaaggcggcacgagggtcgaacacgccgtcctgtgccaggtcgaggtgatactttgcaatgaactccctcaggtcagccgagcagagatgattttcctgcgcgccaaaggcatcgtccagatcaaaggcatcgatgcccagctggttcggcatcaccacataactgtcatcgggcacgcggcgtgccatccagtgatggccgccgatggtctccagccaccagatctcgttcacgtcctggaatgcaatgccgttcatctcgtaagtaccgtaggtctccagcagcttgcccagccgctccacgccctcgcgggcggtgtggatgtagggcagcaccagatagacgatatcctcctcgccgatgccgccgggcacctcgggctgctcccccctggcaggctggtacaccaccagcgggtcagcgcccagcacgcgggggttggaggtgatggtctcggtggcggtcatgccgacattggcggcattgacaccggctgcggcccagatccccttgccctccacggcgttgggcatggcggtcatccgcatggggtcaccgggcagcgggatctccacatgggacagcaccgagcggtagaccgccggatgctcctcgggctggaccaccacgaatttctttgccgtgaaatggccggaaccggaatcgtcgttgcgggcgatcatggtggagccgtcataggatgcgtttttaccaaccagaagcgttgtacatgccataatatcttctcctccgaatcgaagtatttgtctctcggtttgccttgactgattgtaatcctttttgtttcaaaaggcaagagggcttaccggagccgttccccgttttcctcctgggccggagcagctgccggggcgcagtcccggccaaggtagagcgccacctcgccgatcttctttttgcgcagcaggaagagagtcgggataagatagatcaagatcgagagcatcatgctggcatcatagcccgaaatgctctcggccacgtcctccgtgccgtacaggccgcccaccagcatagaggcaatgtccatggccccgtgcaggaacaccgtgacccacaggttgccggtgcggaaatagatggctgcgaacagcgtgcccagcgatgccgcaaagacacactgcatcagcacaccgaagggagcgctggacagcagattggtcaggtgggccgcgccaaacagcaggcccgacagcagacaggctttccagacccccgccctgccggtgccgaagcgctccagcaggctctgggcaatgaccccgcggaagatgaactcctccgccacgcccaccagtgccatgctcaaaaagaagctgaagatgctgaacgcaggctgcagctggccatcctcgggcatcccgaacatcagcttggtatacaggctgtaaccaatgagcaccagcggatacattcccaccagcagcccgttgaaaaagccgctgccccggcggcggagcaggtacatcttaccggtgcggcccagaatgaccaacgccaccaccatgcccactgcctcctgcacggcgctgaggaagtaggagtccacccgttccagatccaccccaaagagcaccagtgcaaacacaatgagataggatgccagcagcaggctgcccagaaacagcacctcggataaaacacagaagccgacgggatgctttgcgcgcagacgtttcagcataaaaatatcctcctgaatcttagtggttctattctaacatactttgccggaaagagaaagtttttggcattttctgctcaggcgaaaaatctcaaaaaaagtgttgacaagacccgggccgtatagtataatatcccttgtcagcggcgaggttcaaagctgacgacaacagaatgatggggatttgcatagtggtagtgcggtagactctgactctacttgtgggagttcgattctctcatccccaaccagaaaaccgcagtcgccttccggctgcggtattttcggggcatagcgcagttggtagcgcgcctcgttcgggacgaggaggccgtgggttcaaatcccgctgctccgatcgaaaaagagacatacttcggtgtgtctcttttttctttttacaaaattttttcttgacacatttcccctttgggaatactcttatagtaccagatatcccctgctctgcggcgggaaagatcaagaggaaacgagggatttgtgagatgaaaaaacgtgttggcatcctgacctccggcggcgactgcccgggcctgaacgcaaccattcgcggcgtggcaaaggcactgtatgcccggatgggtgataatgtggagatcgtgggcatcctgaacggctaccatggcctgatcaacggcgaatacagggagatgtgcgaggatgacttccgcggcatcctgacactgggcggcaccattttgggcaccaagcgcacccccttcaaactgatgcgcgtggtcgaggacgacaagatcgataaagttgcggccatgaaaaagacctacaaggacgcaaagctggactgcctgctctgcctgggcggcaacggcacccataaaaccgccaacctgctctcgcaggaaggcctgaacatcatcggcctgcccaagaccatcgacaacgatatctacggcaccgatgtgacttttggcttccacaccgctgtggacattgccaccgaggtcatcgaccgcatccacaccaccgccggcagccacagccgcgtgatgtgcatcgagatcatgggcaacaaggccggctggctgaccctctactccggcattgcaggcggcgcggatatcatcctgctgcccgagcagccctacgacatcgaccgcgtctgcgaggccgtggagcgccgggcaaagcgcggctccaacttctccatcatcgctgtggccgagggtgccatgaacgtggacgaggccaagctgaagcgcaaggagtgggccgccaagcgcgccgaggccggttataccaccgccaccaaccgcattgccgccgccgttcagaaaaagaccggcatggagacccgcgtctgcatcccgggtcacatgcagcgcggcggcagccccagcgcctacgaccgcgtgctggctacccagttcggcagctacgccgccaagctggtggagatcgagcagtacggcgttacggtggctctcgtgaacaatcacgtcatctccaaccgtctggaggatatcgccggtaagacccgcaatatccccgagggctgcgagctcctcaccgttgcaaaacgcatgggcatcagcttgggctgagaaatctttccggcatgaccgcaatcttcttcccggtttatccgtattccaagtgtaacaaaacctcgtgtaaggaagtgtctctccatgaaaaaaatccataaattcttttctaaagatttgctccatattcttggtgctgttgggatttttgttgcttttctgatttctatcgcctataagcaagttggaatcggggcactcatagctgcgtggcttattgctatcgcaatgatcggggtagcatggattacagacatccgcaaagcagacctgctgaaaaacggaaagattgtttccggaaaagttactgcagtaaaaagggttcacataaaattccacatgagtacctatcaccttgctgatgaagatgtaatttatccttgggtgatccggtaccaatataagattggaaaagacacttattatggacagtcccattggttttggttcaatcctctcgtgagcaagggaacacctataaaggtgactattgatcctcaaaacccagaaagaagcattgttgctgcatgggaaagttaatagattgtttcttacctctataatgacggaaattccaaaggagcacaatctcctttggcacacgactttgtaccaaagtctagtatgttacacctcgatagaggtgtaccgttcccagacgcaaaaagtcccatgcccagcactttggcggtgcgggcatgggactttttgctttttagacctagcggagtgaacagtaaccaatcctgacatccagttgccgtgtcatttgttgaatactgttttacgaacagtctgcggatggacgttccctctttttcaatataccgaacaagaacttacttattcttgtacatttcctcgtagtatttctggtagttgccgctggtgatgtgctccatccactcctcatgctcgagataccagtcgatggtcaggacaatgcccttctcgaacggggtctcggggtaccagcccagatcgttcttgatcttggtggggtcgatgccgtagcggcggtcgtggcccaaacggtcggcaacgtgcttgatcagatcctcgctgatgccgtcatccttcaggcggtcgtgcagctgctcaatgatggtctttacgatgaagatgttggggcgctcgttgtggccgcccacattgtagacctcgccgatcttgccgccgttgcagaccatatcgatggccttgcagtgatcctcaacgtacagccaatcacggatctgcataccgtcaccgtagacaggcagctgcttgtggtgcttgacgttgttgatcatcagggggatcagcttctcggggaactgataggggccgtagttgttggagcagcgggtaatgttgatgggcataccgtaggtatcgtggaatgccataacgaacatatcagcgctggccttggaggaggagtaggggctgtgggggcacagcggggtggtctccatgaagtagccctcggcacccagagcgccgtagacctcatcggtggagacctgcaggtactttttgccttccttccaggtcttggcatcggcatcgtaccaggcttccttggcacgctgcagcaggttcacggtgcccatgacgttgctctggacaaagatctcggggttcttgatggagcggtccacatggctctcagcggcaaagttgatgacataatcgaaatcatactttgcaaacaggctctccaccagctccttgtcgcagatgtcgccctgcacgaacacatggcgggggtcgccctccacatccttcaggttctccagattgcccgcgtaggtcagcttatccaggttgaccagcaggatctcggggtacttcttgagcatatagtggacaaagttggagccgataaaaccggcgcagccggtgatcagatattttttcataggtttattctacctcaattttcaggttttgtcttcttggggaagctttccccttatttcatcccgttctcgccgtcccagtgggcgaagaagcaggccagggactctttccagtcccgcacatcgttgcccacagtgcagcggagcatccggttgtccagtgcgctccacttggggcggtcggcgctttcgggatgcttggccttgtactcctcgctggtgcagggggccacagaggcatccacaccagacaggcggatgatctcggaagcaaaatcgtaccaggaacagatgccctcaccggtgcagtgatacaggccgtactcatgggtcacgcagagctgcagcagctcatgggccaggtcaaccgcgttggtggggttgccgcactggtcgttgaccacctccagcttgccgaatttccggccagcgttgacgatggtcttgacgaagttcttgccgtagtagctgtacagccatgccgtgcggacgatgaagtggcggtggcagaactgctccacatacttttcgcccatgagcttggtggagccgtaggcgctgatggggccggggatggtggcctcgtcctgtgcaatgccgccgttctcacggccggagaacacatagtccgtggagacatgcaccaggcgggcaccggtcttttcggcggcctgtgccagattgcgggggcccagagcgtttgccttgaaggctgcgtcgtggttcacctcgcagccgtccacgttggtgtaggcggcgcagttgatgatgacatccgggcgctggcggcggatgaagtcatccaccatcttatagttggagatgtccagctccggcaggtccaccgggatcacggtggcattcatcagcttttcgggaatggggccgatctcgctgcggccctcccgcagctgcttgatgatctcggtgccaagctggcccttgcagccggtgacgatgattttcatgggtgattcccctcctgcatcaatatctcagttttccatcggccacgttcttgaggtgctggccgtaggggctcttaccataacgggaagcgctctccagcagggtctcgcggtcgatccagccatacttgaaggcgatctcttcgggggcgctgatcttgatgccctgacgcttctcgaccatgcggacaaagtcggcggcatccaccaggctctccatcgtgccggtatccagccatgcaaagccgcggcccagcagctggacatccagctcgtccttcttcaggtacatatcgttcagggtcgtgatctccagctcaccgcgggcagaaggcttgacctgctttgccatctggaccacttccttgttgtagaagtacaggccggtgatggcgtaattgctcttcgggtgctcgggcttttcttccacgctcagcaccttgccgttctggtcaaattccacgatgccgaaacgctcggggtcctgcacatagtagccgaacacagtgcagcggcccttggtctctgcattggcggcggcagtcttgaggatcttggagaagccgttgccgtagaagatgttgtcgcccaggatcatggcgcagcagtcgtcgccgatgaactcttcgcccagaataaaggcctgtgccagaccatcgggagatggctggaccttatattgcagatggatgccgtactggctgccatcgcccagcagcgcctcaaagcgcggcgtatcagtgggggtggagatgatcaggatatcctgaatgcccgccagcatgagggtggacagaggatagtagatcatgggcttatcgtagacaggcagcagctgcttgctggtgaccatcgtcagcggataaagccgggtgccggcaccgccggccagaataatgcctttcataatttgtgcactcctttatttgtattgaaaaagttgtgcagctatacggggtgaaacgctcacctcgtaatattcaaagcggagctgcgtccgctgtcaacaaagttacagggtaaaagttccggccgcgcggggcggcatcagatagttttacaccttattctactctcaaatcgaaaaaaaagcaagaaaaaacggcctgttccagaattttttccggaacaggccgtcaaacagaaccgttcagccgcccacggcggcagcacatcgcgatggtggagcgtttcttaccacttgaagccccacttatggaaatacttcagcaggtttcccgtctgccagagggcgggcttgagatcccggtgggcagcgcggtgccaggcgtggatggcggtatactggggcaccagatacaccttgccccgggtgcgcatcttctgggtgaggtccgcatcctccacatacatgaagtagctctcgtcaaagccgcccaccgccttgaaggtgctggtgcgcacaccggaaaagctgccggtgcagaactcgatttcgatgggcctggtcaggtcctcatccagcatcagatagtggtcgttctggcctttccagaagctgagccggggcagctgtcggtagagcatgggccgcagggcgcaccgacgcaggggcagctgctggggcttgccgtccgggaacaccagcgagggccgggccatcacggcatccgggtgggcggccatccagtcggccagatcactcagggtatcagcggtcagctggatatccgggttgaggataaagtggaaatcgctgtccagctcgggcaggatcatattgtggccggtgccaaagccgccgttctcggtgcggcagtgcaccaccacctgctggcccgggcctgctgccagcaggccatccgccacggcctgctccagctttttgccgctgccgtccgggctggcattgtccaccagatacagggtcaccgggtagcggcgtgtgcagtgcagcaccgtctgcgccgccttcagcgcctcgtcatagccgttgtaaacaacaatacaagcagagagtttcatcaattcactccaaaggcaggatcttcagcgtgaagtcctcacgctggatatcaaagttggggttggtgcagggatcgcccgcggccagcaggtctccccagcgggcctggaagcggagcacctcgccctggaagcgcttctgcttttcggggttgtcctcggtgccgcggctcttgctctcgtagtggtagagctgggcaaagggggtaaacacgttggtgtagcccgcctcccgcacacggacacagaaatccacatcgttgaaggccacggcatagctctcgtccaggccgttcatctcatcatagatctccctgcggatgagcaggcaggcggcggtatcgccgtaaacatcctgcacatagttcagccgccccatgtagccatcggatgccgccgggaaatacttgtgcaggtggcccgccacgccgccgatgccaaagccgatgccggcgtgctgaatggtgtcatcggggtagagcagctttgcacccacacagcccacccgcttctgctgggcgtacatgaccatctcttccagccagttgggggtgatgacctcggtatcgttgttgagcagcagcagatattcgccggtggcatactgctcgccaaagttgttcagggcgctgtaattgaagcccttgccctcccaggtcacgaccttgaggttgtccgggtgttccttctgcatccgctcgtaggcacggaaggtctcgggctgcttgctgttgttctcaatgaggatgagttcaaaatccgggtaggtggtgcgggcatagatggaatccacgcagagctccagatcccggatgtggtcgcaggtagggatgaggatgctcacccggcccgggtgctcaatggtgtaatcagtcttgtaatagcccggggtgccggggatgagggcaacatcgtccacagcgatcccgcagcgggcataatgggccttgagggccgcaatgcctgcgtcgatgcagtaggtcttggcagagatatctgccgccgtgctgccggggctggagcgccagtaatacagggcatggggaatgtgaacgatcttctcagcctgctccgtcaggcggaggaacagctcgtaatcctggctgccgttgtactccatccgctcaccgccgccggcccgctccatcagggcgcggctgaacacggtcaggtggcagatgtagttgttggagcggaggttgtccagcatgaaatcgggcttgaagtggtagagcaccacatgctccggcttcccctcaaaggtcgcctcgtcggtgtagataaagtcggccttctgctcggcaatggccctggccgcataccacagggcgcagggatgcagcaggtcatcgtggtccagcagggcgatatactcaccggtggccatctcaaagcccttgttggtgttgccggggatcagctcattcttttccagcttctgataccggatgcgtgcatcggccttcgcacgggcctgcacatgctggcctacggcctcgtccttaccggcatccacgcagcagagctcccagttcttgtaggtctggttcaccacggaatccagcatctcatccaggaaatccagcggggtgttgtacaggggcaccacgatgctgatcttgggaccggcaggctgatcgttcgcctgcctgaccagcagctccaccggggcaaagcggtcggcccgcaggaggttccccgggaagagggcggcatattcccgcctggcgcgggcgtgctcccgcacacccgaaatgccgtcccggcgcagctcacccagcaggacgaaaagcgggaaggtgtgccagatctggcggctcttgctgacaacataccgcatgggccaggtcagcttccagaaggtagagctggtcacctcgttcagggtcttttccaggttcttggcatggctgcggctcagggaaagatcgctgcggagccgctcaatgagggcggcttcctcgttgcaggtgcgctcggcacgcaccatccggtcacgcaggagatccaactccttctcatagcccgcgatcatctcggcggtggcaggctggactgtgcagtacagagccgactgctgggcacggccccggctgcgccagcggaaatcccggtagtagccccggcgggccagttcctcggcccagccctcagccacgttgctgccggtaaacaccagcagcacctgtccgggcagctgcgcgggcatctccacccaggcggggtcctccaccaccagcaggtctgcctgccgggcagccactgtaaaggggttggcatccacgcccgcccggtgcagggccttttccagtgccggggtctcggcattcagcaccgcagctgttgccggggccagctcctccgcaatgcgctgtgccagcaggcggcagcgctccatgtcctgctttgtttcctttgctttctccaactgcattccgacttctccacttcactgggccattccgccgcccagacgcatttttacaaactacaatagtataccagatttcgtcccgtttgagaagcgcttttccgcatttcctgcgctttccggtgcaaaatttattacagccccagcaggctccacagccagccgaacaggccgccgttcgagctgccgctgcccaccgtgccaaaggacacgccggtatagtagtggcgcaggatgtcccggtagcccatgccctgctcctgcgcatagcccaccatgccgcactggctcatgcccacaccgtggccgaagccatagtagttcatgcagggggttccgttctcgtccgcgctgaaatcaaagcagtagcgggaggaaacgaactggccgatgtagcggtagctctttccgttcgagacaaaggtattgtactggacaaagccgcccagatccttatgggtggtgtcggcgctctcgtagggctggccggtcttgctgtcgttatactcgatgtagcggtaatccttgccgatgatccggcgcatcaggttgtgatactgctcctcgtaggggctttccacgctctgcagatagggcacatcggtgccccaggcatccagaccggagcaggtgccgtacacgccggtctgggtgttgtaccccgcgctggccgaccacactgcatcgatgacgctgccgttgcaggtcagcacctcgtccttgacctcagagactgccctgcggatggcgctgcgggcagaggaagggatctgatccacgggggtgtataccagtgcgttggccgaagagccgtatttcttgtggtattccagataggagtggatggccaccgcctgcgctttccacgcctgctgtgccgccgcgtcactgacatagctgccgatggagcccagctcggtgtaggtgatgcccaccagacagtcctcaagatccagggtcacgttccggcgcaggccctgccccttgacgttcaggtagggcatggtgatggtatcgccagagccgaagagccagctcaggcagttttcctcctcgtccgggattagagtagtgttggcaccgcccatggtggtggcaccggcgggcagggtgtccccttccgctgcaaaggcggcaggcactgccatgcagagcagcaccaccgccagcatcagcgccgcacaccggcgcgcaaacttcgacatccgtttcaagttccttgtcctcctgcgttctgtattttattcagtttagcacagtgcagggccgcgggcaaggacttgaatcaagaaaacgccgccgggcagagccaaaagctccacccggcggcgtttcactgtttctatcttatgcttcctgtcagcggctctccccgcgctgtgcaaggcgggagaagcgcttatccttttcgtcgtccttctcggcatcctcagccggggcggcgggagtcaggcgcacttccgtcacgcggcgcttggcggtgcgggtaacaacaccatcgtactcgcccagggtaaagcggtcgcctaccttgggcagatggcaggtcttttcctgcaccagaccgttgacggtattggaatcgatgtcctcttcctccggcaggtcgagctcctcatacagatcatcgacgctggcagagccggacaccagccagctgccgtccgactgcttgcggaagtcctcagtgacctcgtcgtgctcatcccagatctcacccaccagctcttccaggatatcctccagcgtgatgataccctcggtgccgccgtattcgtccacaacaacggccaggtggtggtgctgctcccggagggtgcgcagcagctgggagatctgcgtggagcccgtggtatacagggtgggcaccaccagatcatcgatcttggtcgcctttttcaggcgggcgatatagaaatccttttcatgtaccacaccaatgatgttatcaatggtgccgtggtagacaggcagacgggagtaaccggactccgcaaaggtctgggccagctcctccagcgggatatcatcctccacagccaccacatccacacggggggtcaggatctcctccacctccacgtcatcgaactcgatggcgctgcggatgagctcgctttcccggtcggtcagttcgccgtcattttcagcctcgctgaccatggtcatcagctcaccctctgtgatggtatcggcctcgccgctgtggacaaagtggcccagcagctttttccactgggtgaacagccaggtcagcggggtcatcagggccatcagaagcacaaggaagggcgagactgccgtggccaccttttccggcatctccttagccaggctcttgggggtcacctcgccaaagatcagcacgatgatcgtcagcacaatggtggacaccgttgcgccccgctcggcacccagcatccgggtaaacaggatggtgccgatggaagcggcggcgatgttcacgatattgttgccgatgaggatggtggaaagcagcttgtcatactgctccgccatggccagcacccgggcggcagaggaatcgccgtcctcggcgcggcttttcaggcggatctgattcagggaggaaaatgcggtctcggatgcggagaaaaaggcggagaaacccaccaggatcaccagcgctacccagagcgtcatactgccatcgtccataataaaggaaaatcacactcaactttctgttttttattaaagaacggactccctcagtctgcttcgcagccagctccctcaccgagggaggtggcatcgcgcagcgatgacggaaggagttctttcctagggatacaaaaatgtgctttccaccgtggctgttccgcgatgaaaagcacatcaatgttacttgttataatatcatattccgcacccccatgcaagcattacagccggcacagaggtacaaaactggtaaaactgtggaaaatcatttcagcacaagggcatttccgtcgtaatccacggtcagggtgctgccctcggcatagcggccctgaatgattgccttggcgatcagggtctccacccggctctggatgaaccgtttgatggggcgggcaccatagacgctgtcgtaggcagaatcgatgatgtagtccttggcggcggtggtcacgtccagattcagatgcttgccctcgtccatgcggctgcgcaggtctgccagctgcagatccacgatcttgcgcatctcgtccttggtcaggctcttgtagtagacgatctcgtccagacggttcaggaactcggggcggaacttgctcctcagcagcaggtcgatctgatgctttgcctcgtcgctgagttcgttggagccctgtgcccggcgctgctccagatcgttcaggatgatgtcactgcccagattcgaggtcaggatgatcaccgtgttcttgaagtccacggtacggccctggctgtcggtgatgcggccatcgtccagcacctgcagcaggatgttgaacacatcggggtgggccttttccacctcatcgaacagcaccacgctgtagggtttgcggcggacagcctcggtcagctggccgccctcctcataacccacgtatcccggaggcgcgccgatcaggcggctgacgctgaacttctccatatactccgtcatatcgatacgcaccatgttgcgctcatcgtcaaacagagcctgtgccagcgccttggccagctcggtcttgcccacaccggtggggccgaggaagaggaagctgccgatggggcggttggggttggcgattccggcgcggctgcgcaggatggcctcactcaccttggtcacggcctcgtcctgaccgatgactctcttgtggagcacatcgtccagatgcagcagcttctcgcgctcgccctctaccagcttctccaccgggatgccggtccagcgggccacgatgcgggcgatctcctcgtcggtcacacggtcacgcaggaggctatcctccttcttctcgttggccagcttttcctccgcttccagctgtttctgcagctcgggcagcttgccatatttcagctcagcagccttgttcaggtcatactcacgctgggctttctcaatggcggcattggtctgctcgatctgctcacgcagggtctgtactttgccaatggcgttcttctcgttttcccactttgccttcatgctgcggaacttatcctgcagctcggccagttccttttccagctcatgcaggcggctctggctcagggcatcggtctcctttttcaggctgacctgctcgatctgcagctgggtgatgcggtgggccagatcatccatctcgctgggcatactgtccatctcagtcttgatcatggcgcaggcttcatccaccaggtcgatggccttatccggcaggaagcggtcggtgatatagcggtcagagagggttgcggcggcgatcagcgcattatcgctgatcttcacgccgtggaacacctcatagcgctccttcaggccacgcaggatggagatggtgtcctccactgtgggctcatccacctgcaccggctggaaccggcgctccagagcggggtctttttcgatatactggcggtattcgtccagcgtggttgcgccgatgcagtgcagctcaccccgggccagcatgggcttgagcaggttgcccgcgtccatagcaccgtctgtcttgcccgcacccacgatggtgtgcagctcatcaatgaagaggatgatcttgccctcgctcttcttgacctcattcaggacgctcttcaggcgctcctcaaactcgccgcggtactttgcaccggccaccagcgcacccatgtccaggctgaacacagtgcggttcttcaggttctcgggcacatcgccgcgcacgatccgctgggccaggccctcggcgatggcggtcttgccaacgccgggctcaccgatcaggcaggggttgttcttggtcttacgggacaggatacggatgacgttgcggatctcctgatcacggccgatcacggggtccagcttctgcttccgggccagatcgaccagatcctggccgtacttctgcagagcgttgtaggtatcctcggggttgtcgttggtcacgcgctggttgccgcgcacggcagtcagctgctgcaggaacgcatccttcttgatgttgaaggcgcggaacagctccgtggtgttctgggtcggctcatccagcaggcccaggaacacatgctccacactgacgtattcgtccttcatggccttggcttcccgggcggcggcgctcaggactttatccgttgcctgcgagatatagaccttgtccggatcacggccggagccggacacccggggcagggccgacagcttttcggccacagcagcggcaaagctgcccgggtccacgttcagcttctgcagaagctgcgggatcaggccctgctcctgcgaagccagggcgtgcagcagatgttccggctccaaagcgttgtgctggtactccacagccagctgctgggcagcctgcagggcttccagcgttttctgcgtatattgattggtattcatagaatcgacctccattcgtaccggaagtgttatttcagcagtctttcagatcgattgccatttcatttttagcactctatctgttcgactgctaaaactatactccaaacaccccactttgtcaatagggttttcgatggtacggcaacaattcacaaattgtttgcaaacaagacaaaaatgccgccccggcagactgaactgcaccccatttgttagacagtatggtatactgtttaggaaatggggtg

SEQ ID NO: 780 - DNA, 7089 bp, unidentified
  source 1..7089: mol_type = unassigned DNA
atggataatcagatggaaagaagatggctttctttgttcgtagaaaaccgtgctggtgttcttgcaagaatttccggactattctctggaaaagcctacaatatacacagtcttacagttggagaaacagaagatccaacaatgtctcgtatgacgatctgtattgatgcagatgaaaagacatttgaacaggtcaagaaacagttaaatcgaagcgtggaagttattaaagttattgactatacagatacatcgatccgaacaaaggaaatcatgtttatcaaagtgaaaagtcttacagagaagcagatggcagagatcttccagatggcagaagtgttccgtttcctgatcaaggatatgggaaaagacagcgtattaatagaagcaattcgtacagagacaaagaatgattctattttaaaggtgtttaaagaacgttatacaaatattgaagtagtcagaggtggtccggtagcgatcgattgtatcagtatgcaggatcgttaatgatcagaagacaataatatagaagagaaaagagagtttggtgttttaacgcacacaccaagctctcttttttgcgtgtacagaaataagtttttaaaaaatatggggatttttcataggaataaaaagttttttctttcaatgaaaaaatacagggatgtgttaagttagacatgttgaaagtgaagtaaatttaacgaaaaatcaatttataaagagtgtaaatatatttatattgtaaaaattgttatttttttcacgaaaaaatcaggattatttcatagaaaatacaagaaaattatcaattcggtgagaaagtgttataagttatgtcggattgtgttaaaaaaaatacaatccgacaaggacattgtatacatcgaaaaaacacgtatttatgcggcttttggcactttgcacaatttattgaaaatctttttaaaaaatagcaattgaaaatgagaaaagattgtgatagtattaacatatcggcgagagagaagatcgctaaagtataataatcaagaatatggaggaaaattgatatggcaaagaaagtagttatcgcaggagcatgccgtacagcgattggtaaaatgggtggagtactcagcacagtaccagcagtagacatgggatcaatcgtaatcaaagaagcattaaagagagcaggagttccagctgatcaggtagaccatgtatacatgggatgcgttatccaggcaggattaggacagaacgttgctcgtcaggcttccttaaacgcaggacttccaatcgaaacaccagcagttacagttaacgtagtatgtggatcaggattaaactgtgtaaacatggcggcacagatgattcaggcaggagacgctgatatcgttgttgccggtggtatggaaagcatgtcaatggctccatttgcattaccaaaagcacgtttcggatatcgtatgaataacggaacactggtagatacaatggttaacgatgcattaacagatgcattcaatcactatcacatgatgatcacagctgaaaacgtagcagaacagtggggattaactcgtgaagaattagatgagtttgcagcagcttctcagcagaaagcagtagcagctcaggaatcaggaagattcaaagatgagatcgttcctgtagaagtaaaacagagaaagaaaacagttatcgtagatacagacgaaggaccaagacctggaacaacagctgaatctttagcaggattaagatgctgctctggaaaagaaggtggagttgttacagctggtaacgcatcaggaatcaacgatggtgcagcagcagtcgtagtaatgagcgaagaaaaagccaaagaattaggcgttacaccaatggctacatatgtaacaggagctcttggtggtgtagatccatctatcatgggtgttggaccagtagcttctacaaagaaagctttagcaaaagcagacttaacaattgacgatatggacttgatcgaagcaaacgaagctttcgcagcacagtctgtagcagtagcaagagatctgaaattcgatatgagcaaagtaaacgtaaacggtggagcaatcgctcttggacatccagtaggagcttcaggatgccgtatcttcgttacactgcttcatgaaatgcagaagagagacgctaagaaaggtcttgcaacactttgcatcggtggtggaatgggttgcacaactatcgttgaaagagactaattaattatagataattaggaaaggagaattcttagaatggaattcgttacatatgaacaggacggttttgtaggtgttgtaacaatcaatcgtccaaaagcattaaacgcattaaacagtgaagtattaaaagagatcgaagcaacttttgatgcgatcgacttagatgcaacaagagccgttgtattaacaggtgctggagataaatctttcgttgccggtgctgacatcggagagatgagtacattaacaaaagcagaaggagaagctttcggtaagacaggaaacgatgtattccgcaagattgaaacattccctattccagttatcgcagcagtcaatggattcgctttaggtggtggatgtgagatttccatgagttgtgatatcagaatctgttctgaaaacgcaatctttggacagcctgaagttggtcttggaattacaccaggattcggtggtacacagagacttgctcgtatcgtcggagttggaaaagccaaagaaatgatctatacagcatttaacatcaaagctgaagaagcttacagaatcggacttgtgaatgcagtatatccacaggaagaattattagcagcagctaagaaattagctaacaagatcgcatctaatgcaccaatcgcagtacgtgcatgtaagaaagcaatcaacgaaggtcttcaggtagatatggatcaggcaatcgttgttgaagaaaaagcttttggaagctgttttgaaacagaagaccagaaagcaggaatgggtaactttttagagaaagataaatctaagaaattaaaagttgttcctttccagaacaaataataatgaagtttaatatatttccagtctgcggtatcagccgcagaccggaaaattacatagtaaaataattttacaggaggaattataatgaaagttggagtaatcggcgctggaacaatgggtagcggaatcgcacaggcatttgcacagacagaaggatatgaagtatgcttatgtgatattaatgaagaatttgcagcaaacggaaaagctaaaatcgcaaaaggtttagaaaaacgtgttgcaagaggaaaaatggaacaggcagctgcagatgctatcttagcaaagatcacaacaggtgtaaaagatatctgtacagactgcgatttaatcgtagaagcagctattgaaaacatggaaatcaaaaaacagacattcaaagaattacaggatatctgtaaaaaagatgctatctttgctacaaatacatcttcattatcaatcacagaaattggtgcaggacttgatcgtccaatgatcggtatgcatttctttaacccagctcctgttatgaaactggttgaagttatcgctggtatcaacacaccaaaagaagttgttgataagatcaaagcaatcgctgaagaaatcggtaaaacacctgtacaggttgaagaaggtgctggattcgtagttaacagaatcttaatccctatgatcaacgaagcaattggaatttatgctgatggagtagcttctgtagaaggtattgatacagctatgaaattaggagcaaaccatccaatgggacctttagctttaggtgatttaattggattagacgtttgccttgcaatcatggaagtactttacaatgaatttggtgatacaaaatatcgtccacatccattattaagaaagatggttcgtggaggattattaggatgtaaaactggtaaaggattctacgattacagcaagtaagaaaaagagcttttcttttgcatccggagatggtgaactccggatgcaaaagttaactttatagaaatcatgatggaggaataaagaatggatttcacattaagtaagaaacatgaaatggcaagaactcttttcaaagagtttgctgaaaaagaagtaaagcctcttgcacaggacgtggatgaaaatgaacagtttccagttgaaactgtagcaaaaatggctaaagcaggattcttaggtattccagttcctaaagaatatggtggacagggatgcgatccattaacatacgttatgtgtgttgaagaattatcaaaagtttgtggtacaacaggtgttatcgtttctgcacatacatctctttgtatcgatccaatccagacttttggtacagaagaacagaagaaaaaatatatcccagatttagcatctggtaagaaattaggagcttttggtctgacagaaccaggtgctggtacagatgcacagggacagcagacaaaagccgtattagacggagacgaatgggtattaaacggatctaagtgcttcattacaaatggtagttacgcagacgtttatatcgtaatcgcagtaacaggtgttgttgaaaaacgcggaagaaagatgaaagaaatttctgcattcatcgtagaaaaaggaactccaggtttcacattcggaacaaaagaaaagaaaatgggtatccgcggatcagctacatatgaattaatttttgaagactgccgtattccaaaagaaaatctgttaggaaaacagggtaaaggtttcggtatcgcaatgcatactcttgatggaggacgtattggtatcgcttctcaggctcttggacttgcagaaggtgctttagaaagaacaatcgaatatgtaaaagaaagaaaacagttcggacgttctatcggacagttccagaatacacagttccagttagctgatatggcaacaaaagtagaagctgcaaaacagttagtatacaaagctgctatggctaaagctactcagaaagtatacagtgttgaagctgctatggctaaattatatgcagcagaagttgctatggaagtaacaacaaaagctgttcagttacatggtggttacggatacatcagagaatacgatgtagaacgtatgatgcgcgatgctaagattacagaaatctacgaaggaacatctgaagttcagcgtatggttatttctggaaacttattgaaatagggaggtacttaccgtgaagatagttgtttgtgtaaaacaggtaccagatacaaaaggtggagttaaattcaacccagatggtacattagacagaggtgctatgcttactatcatgaacccagatgacaaagctggattagaagcagcacttagaattaaagatgaatatggagctgaagttacagttcttacaatgggacttccaaaagctgacgaagttcttcgtgaagctatggcaatgggtgctgataaaggtatccttgtaactgacagagtattaggaggagctgacacatgggcaacttctactacattagctggagcattaagaaatcttgactatgatctgatcatcacaggacgtcaggctatcgatggtgatacagctcaggttggaccacagatttctgaacatcttgatattccagttatctcttatgcagaagacattaaaattgacggtgacagcgtagttgtacagcgtcagtatgaagatagataccacatcttaaaagctaaaatgccttgcttagttacagcattagctgaattaaacgagccaagatatatgactccaggtggaatttttgatgcatatgatgcagaagtaactgtttggggaagaaaagaccttaaagatgtagaggattctaaccttggtcttgctggatctccaactaagatcgcaaaagcatctgacaaagtaagaaaaggtgctggagaaaaagttacacttgatccagaagaagcagtagattatatcatggataaattagctgaaaaacatgtaatttagtgaaaaggaaaagtggtgaataaaatgggtttagaagaatatagaggcgtatacgtctttgcacagcaggtagataacgaattaagcggaatcgcattcgaattacttggaaaagcaaaagacttagcaaaagacttagatacagacgtaactgctgttcttgtaggttctgacgttaaaggattagtagatgatcttgcaaaatacggtgctgataaagttatcgtagttgacgatccagaattaaaagaatacagaacagaaccatatacacatgcattagcatctgtgatcaatgaatacaaaccagagatcatgttagttggtgcgacagcaatcggtcgtgaccttggacctcgtgtatctgcacgtgttcagacaggtttaacagctgactgtacagttcttgaaatcggtgatttcccattaagagcaatcccaggaaaagaacagaaacacaatcagttattaatgactcgtccagcattcggtggaaatacgattgcaacaatcgcttgcccagacaacagacctcagatggcaacagttcgtcctggtgttatgcagaagattgatcctattgaaggagcaaaagctgaagttatcgaatacaatcctggatttactccagacaacaaatacgttgaaatcatggatatcgttaaatctgttacagatacagtagatatcatggatgctaagatcttagtatctggtggacgtggagttggagaagaaggatttggaatgttaaaagaattagctgaagttctcggaggagaagtaagctgttctcgtgccgttgttgataacggatggcagccaagagatatccaggttggacagacaggaaaaactgtacgtcctaacgtatacttcgcaattggtatttctggagcaatccagcacgttgcaggtatggaagaatctgatatcatcgttgcaatcaacaaagatgaaacagctcctatctttgatgtagctgattacggaattgttggagacttaaacaagatcgttccagctttaacagaaaaattaagagcagttgttaaataa

SEQ ID NO: 781 - DNA, 7560 bp, unidentified
  source 1..7560: mol_type = unassigned DNA
aagaaatcttcccggtttcattttccttaattctccggtcagcagaagaaagagtccaccgatggcggcgatcatgcccgcatggaaactcttggtcagaaacgcaagagaaaaacacaagccgcatacataaagcatacgtccgttttcacggatctttaacatggccagcatggccagcgtgaagaacagaagatagagactgtctgcatctccggcgcggaccagatgcgccttaaagggaaaataattggcgcacaggaatgccataaccagcagagaggtgagctttccatatctgcgggcaaagagtccggtcacgaccgtggtaatcagataggcaagggcagagaagaaccggagccccactgatgtatagccaaacagggtgaaaccagccataatgctccagaaagaaacgggaggtttcacattccagtaatcgggttcattcagataggtatttaccagaaaatttccattcttcaacatttcataggcggaaataccatggcgggcctcgtcccaggagtcaatcgccttgataccaagacatcggaagcaaagaaaggcggtcatcagtgccaaaaatgcgaaaaaaaccggatagagacggtcaatcagacgcagaagccgtgtataaaatgatttcataaaataaatcctcataatctaaatagttacaaaaaatatagcatggtcacgaaaaaaagtaaacgctttataaaggctttacaaagcttctgtatgattgataatattgtaataggaaattaaagagagaagagtcatgaacaaaagaagagggatgtatcaggacggaatccacgtgaaaaacaatttttccatgagttccggaactctttctgtggcagccggagacgatgcactggaggcagaggcgctggtacgaatcagtggaggatctgtgtttctggatgcagaagattatctgattcactgcgatggggagcaggaactgaccaggggctgtgttttttatgaaaaacagtgacagacagggaaaatcatgctataatcagaccaaatgcagtgggatcaaagggagtactctgccctgacggctgctgaagaaagaataaacagattttacatggtggaggaaatttcatgagaacttatctcgtaacaggcggtgccggatttatcggctccaattacattcattatatgttccgcaaatacggcgaggagatccgtattatcaatgtggacgtgctgacctatgcaggtaatctggagaacttaaaagatgtagaggactatccgaactataccttcgtaagagcagacatctgtgacagcgaggcaattaccaaaattttcgaggagaatgatattgaccgcgtggttcatttcgcagcagagagccatgtagaccgcagtatcaagaatccggaagtatttgttaagaccaatgtactgggtactctggtcatgctaaatgcagcaaaagcagcatgggagctgccggacggaagctttaaggagaataagaaattcctgtatgtttccactgacgaagtatacggttctctggatgacggagataattatttctatgagacaactccgttctccccccacagcccctactctgcaagcaaggcaagtggagacatgctgaccaaggcatattttgatacttataaattcccgtgcaacattaccagctgcagcaacaactatggcccgtatcagttcccggagaaactgattccgctggtaatcaacaacgcactgcagggcaaagcgctgccggtatatggtgatggtaagaatgttcgtgactggctctatgtagatgaccatgcaaaggcaatcgacatggttcaggaaaaaggaaaactgggcgagcgttacaacatcggcggacacaacgagaagcagaacattgagatcattcatattattctggatactctgcaggagatgcttccggacagtgatccgagaaaagcactggtaagcgagaagctgattacctacgtaactgaccgtaagggacatgaccgtcgttatgccattgcaccggacaagatcaaggcagagatcggatggtatccggagaccatgttcgccgagggcatcaagaagaccattcagtggttcttcgagcatgaggactggatgaagaatgtgaccagcggtgactatcagaaatactatgaagaaatgtacaaaaataaataaaaactggctggtaccggcgctgggagtgttgctcgcagcgctggctctggtatttggaaagaccggtatttcccagaatggatttacgctgaatcagtaccacaatgcggatgccaaattcatcggtgatcacattatcaccagcgtggatgaaggaatccggattctggatctggaaggaaagacggtggcttcctatgacgggctggctgcttcctggatgtatgtgatggaagatgatgtggagtcgagagggccggaagatcactggttcatcgcttacagtaatcatgcggatgaaacccatattctggagctgaccgctgattttcagctggtggaagaccggattgcggtgaccaccgatacgctggctattgatccgattctggtgaagatggaagatggctggctcctcaccaatacagagattgacggaacgatcaacaatgcgtcaccggacggggacaacggaatctattctgtacagctctacagctccgcagacctgaagagctgggaaccgctgaccactgtcatcagtgaaaagcagaatctggaagacggagatatccggtatcttgacgggacactctactatttctttgagatggaagattatgataaaggttcttctaagatctgtgtcatgacgtctgatgatcagggcggaagctggagtgatccgatcgtactcctgcccaatgtggcggacaacgagatggcttcctgtgaacagaccgactatggatggcggctctatgtgagcagtgactatgcctgtgtaggagagagctatcagggtgccagtgtctattacaacgattataaagaggattttactccgatcagcacctatcagcggtcggagatgccggacaatgaatctgtccggttatatgaggcaaaagaaattgacggtcagatgaatttcctgtttgcaaggaattttctgacggactgtgatcttctgcttcgcactatggaaaagggggatgagatgcaatgaaaggaattattttagcaggaggatcaggaacccgactgtatccgctgaccaaggcagtgtccaagcagattatgccggtatatgacaaaccgatgatctactatccgctgtccattcttatgctggcaggaatccgggaggtgctgatcatctccacaccgagagatcttccggtatttgaagagcttttaggagacggaagtcagctgggcatgcgttttgagtatgcggtgcaggagcagccaagaggactggccgatgcctttatcatcggcgcagattttatcgggaaagacagcgtagcactgattcttggcgataatatcttctacggacagagtttctctcaggttctcagaagagtagcagcccaggagagcggagccaccatcttcggttactacgtaagagatccgagagagtacggtgtggttgagtttgacgaaaatggcatggcgatctccatcgaggagaaaccggagcatccgaagtcaaattatgcggtaccgggactctatttctatgacaatgatgtagtggagatagcaaagaacgtaaaaccgtctgcgagaggcgagattgagattaccagcatcaacaacgagtatttgcgcagaggaacccttcatgtggagacactgggcagaggatttgcatggctggatacgggtaatcatgatgcacttctggatgcggctgactttgtggcagcattccagaaacgccagggactttacatttcctgtattgaggaaattgcgttccggagaggatttattgataaagaacagctgctgaagctggcagagccgctgatgaagaccgcctatggccgttatctgacggaagtagccgaagggctgtaaatgaaaaattcaggccccggaagagcgcatacctgcgaagttccggggttttatcaaattttgaagaagaatggagaaaagaaatgggaaagattactgtagaaacctgtgatattgaaggattgaagatcattacaccgactgtattcggagacgagcgcggatattttatggaaacctataattataatgattataaggcagcaggcattgatatggagtttgtacaggacaaccagtccgcatccaagaagggcgtgttaagaggtctgcatttccagatcaattatccccaggacaagctggtccgcgtggtaagtggagaagtatttgacgtagctgttgacctgcgcccgggttctaagacctacggaaaatggttcggtgtactgctttccgcagagaataaaaagcagttctttattccgaagaactttgcacacggattcatcgtactgtctgattacgcagagttcgcttacaaatgtaccgatttctatcatccgaatgatgagggcggtctggcatggaacgacccggatatcggagtagaatggccgatcccggaaggcatggagctgacgatttctgagaaggatcagaagtggggcggcattaaagaactgaagaaataaggagagaccctatggtccgtatgtggaaagatttttgggcgagccggaaactgatctggaagcttgccagaaatgattttaagacccgttacgccggctcttattttggcgttctgtgggcaatggtacagccggtcatcattgtactggtgtactggtttgtattccagatcggtttaaacaatgcgacggcagagttaaagcagggaatcagcgttccctttgtgctctggctggtcagcggtattgtgccgtggttctatttctccgagagcttaagcaacggaaccaatgcgcttctggaatataattatctggtaaagaaagtggtcttcaacattgacattctgccgttggtgaagaccattgcagcactgtttattcatgtattttttgtgctgttcatgttgtttttatttgcactgtatggctattatccggggctgcacacgctgtgggtcgtgtacttcagcgcatgtcttctgatctttgtgaccggagtctgcatgctgaccagttctctggtgattttcttccgggatctgacccagattatcaatatttttctgcaggtcggcatctggatgacaccgattatgtggaatctggaagatttgcttgcaaaatatccgattcttatggtgctgaagctgaatcccctctgctatatcgtctatggctatcgtgcggtactgtttcagaccggttctgtggcaagccttggctggatgaatatttatttctgggcagtgaccattctggtatggctgctgggaagtcatgtgttccggaaactgaaagtgcattttgcagacgtactgtaaaggagaactatgagcagcgaagcaattaaacttgagcatattactaaaatttataaattatacggccggaacagagaccgcctgaaggattccctgggacttacgaagaagaaatgctatacggagcattatgccctccgggatgtaagcatggagattcatcagggagagacggtgggaattatcggtgtcaatggatccggtaaatctacgattctgaagattatcacaggtgttttaagcgccaccagcggcacgatggagattaatggaagaatctctgcccttctggagctgggagccggatttaatatggaatataccgggcttgagaatgtgtacttaaacggtaccatgctgggattttccgaggaggagatcaatgaacgtctgcaggatatactggattttgcagatatcggagaatttatccatcagccggtgaagacctattccagcggtatgtttgtgcggctggcttttgccgtggccatcaacattgacccggagatccttattgtagatgaggctctgtctgtgggagacgtgttcttccaggcaaagtgttatcataaatttgaagagttcaaaaagcttggtaagaccattctgttcgtcagccatgatctgaccagcattgcaaaatactgtgaccgtgtgattctgctgaacaagggcgtgaagctggcagagggaacaccgaaggacatggtcaatatgtataagaagcttctggtgcatcagctggatgaggaaacactggaagatgtctgcgagaaaagtgatattgtggagcacacggcagacggaaaagcatggaaagaccattttgaaacgaatccgaagcttctggactatggcgagaagcaggcggagattgtggattttgccatcattgaccaatatggacagtattccagtattattgagaagggttccacctgtcaggtcaaggcgaagcttacgttccacagtcaggtgaagaatcctatcttcactattaccatccggaacaagcaaggaacggatattacgggaaccaacactatgtttgaacgtgtggagaccggaaccgtggaagcgggagagacaagaatcgtcacctatacccagcggattgacctgcagggtggagattatctcatttcccttggatgtaccggatatgtgggagatgaatttaaagtgtaccacagactctatgatctggtgggaatgaccgtactttctgataaggatacggtgggcttttatgatatgaactccgtaattaccgtggagaacccggcagagcgccagggctgattcggaaaaaattttgcagcaggcaggaaggaatgcatatgcaggaacagtttggccatgtaacagtgacatatgatgaggagactgctttactgcagcagccccgcccggaagatcttctggtggagcagttgctggaggaaggctttgactgtaagagggcacaggcaccgtccttccctgttctttatcatttatctcagcttcgcggaaatctgacagaatggctgccggtgaaaatgacagatacagtgctggaatttggcgccgacagcggacagctgacggggggacttgcaaagaaggcagagaaagtcatctgtctggaggaaagtgtgagtcggtgcagactgttggcaaaacggtggcagacagtggataacatctccgtatttggcggaagtgtgtggacaacgctggaaacccttccgagattcgactggattgtggccccgggtgtgctgacggaagcacatcgatattttaccggagaatatccggaacaacaggcgctgaacattctgaaacagcatctgaagccggacggtcatctggtgctggcggcagacaaccggtttggcctcaaatactgggccggggcaaaggaaccccatacaggtcagtattttgacagtctggaaggaaaagccacttctttttcaaagcgggagctggaaacgattctgactgacaagatcggaagagcg

SEQ ID NO: 782 - DNA, 56649 bp, unidentified
  source 1..56649: mol_type = unassigned DNA
tcaattaaggtgccaatatcgattgccagagcaaaaaaggacattgaaaaggaaattgatttaagggagtacctgccatcagggctgtcgattgtaggggagacgacgacggtttccgtccgttgtgatattgagaagaatggacagcgtgtgctgggacttacatcttcggatattgccgtgagaaatctgccgaaaaattatacaatgaattttgagccggaaaacggaaagtattccgtagaattgttaggcgaagatgcgacgctggcggatgtaaatgtaggagatttaggagcttatgtggatttgaacggattatcggatggctcgcatacgcttgaattaaaatatagtctgccgaccggcgtgcaggtgaaaaataaaatcaagattaaagtcaaactaaaacgtcaggaaggtgaggtgacagatgcaccaagcacaccaactccgacagtggagtagaaactaaaaaaatcccggtggactgccaaggagcagctgccgggattttttttatattttttacaatgggatatttccgtgttttttatgaattacatcaatcgagcgtttatctgcaagcattaagatgtcggcataaacacgttctcttgttgcctccggtttaatgatttcatccacataaccgtgcatggaagcaatacttggattcatgaattttttattgtattcatcaatcttttcgctgcggaaagctgctttttctgcagggttcatattcttcatctgtttaccatacaaaatatcagcggcaccatcggcacccataacagcaatctcagcggttggccatgcataaacaaaatcagcacgcaggtgtttactgctcattgcgatgtaagcaccaccgtaagctttacgaaggataacattaattttaattgttgtggcctcagagtaggcatatagtaattttgctccgtggcggatgattcctttatattcctggtctttaccaggtaaaaatcccggcacatccgttaatgtaagaatcggaatattaaaagcatcacagtagcggatgaatcgtgctgctttatcagaagagtcacagtcaaggacgcctgccataaattttggctggtcagcaatgataccgatgacaactcctttaatgcgtccgaatccaacgactacatttcttgcaaattcttcctgaacttcgataaaggagtctgtatctacaattccgttaatgacatcgtggatgtcgtaactgtgattgctttcttttggaatgatatttgctaaatccttattaaaagtaacattttcgttgtatttaggaagtgccggacggtttgtgtgcaggtagccatcctcatagcacggaggaataattgaaatcaattccttcacgcggcggaaacattccttttcgtttggcatatgaaaatgagcgacaccgcttttggatgcgtgcacattggcaccacctaattcttttgctgtaatatcttcatttgttacgcttttgataacttttggtccggtaacaaacatctggctgatttcatcaatgacaaagataaaatcggtaatacccggtgagtaaaccgcaccaccggcacagttaccggcaataatcgaaatctgcggaatgtatccggatgccattgtattatagtagaaaatctcaccatatccggctaaggcatttacaccttcctgaatacgggctccgccggaatcgttgatgccgataaccggacaacggctctcgattgccattttaattgcattggcaattttgaaaccgtgctgtttaccaagagtaccgccgataacggtgaaatcctcagagtaaatcacgactttttgtccgccgatggtaccgtaaccggtgattacgccatcataaggaaattgtccctttttaatgttaaaagcatcttctaagttcgtaatgttcgagccaatttcacgaaatgaatcttcatctagcagcatgcaaatacgctctaaagcgtgaagtttgccaagcttgtgctgcttctccatattgtaagttgacattgttcattctccattctttcttaaaatatcacttgaaactacgaaacctatcatataccataaaaagaaaaaatgtcaatcctatgttggctttttttgtagaatagttgacgaaatgcgtatttgggtgctataatcaaatgattgaaaaaataaaaaggatggactagagaatgattcaattttttaataatttcctaaagtacaagtatctcatgggacagcttgtgaagaaaaatatcaagctccgttaccgccgttcttatttaggaatgttatggacactgattgagccgctgcttacaatgattgtattgtcggttgtgtttggcagcttgttaggaagaaacagtaccgatgctgcatttgcaggcgtgccattcccgatttatgtcttgaccggacgtttgctgtattcgttcttttcatcagcaaccaacagtgcgatgcgttccattcgtacaaacggcgctatgattaagaaagtgtacgtaccaaaatacatttatccgttttccggcattttggcaaacttcattatctttttgatttcgcttgttgtactggttggtgtaatggtatttttcttagcaaccggtcagtaccatgcaccgattaacggttatatggttatgacggtgattccgctcttaaatttgtttatcctatcaacgggagtcggcatgatattatcgaccttatgtgtattcttccgtgatatcgagtatttgtggagcgttatgttaatgctcatcatgtattgcagtgcgattttctatttcgcaagcaacatgagtggtgacacacaaaaactggtaaaattgaatccactatttggcgtgattgacaatttccgccgcgccttttttggacagccttttgatatgagattattgctgtatacatccgtttttgcggttggaacattggttattggtatgattgtattttatcggaaacaggattcctttatcctgaatatttaaggtgtaaggcaaattggaggttattatggcgaagaagtcattagcaatgaaaatagagaatgtgagtatgaagttcaatctcagttctgaaaaagttgataacatcaaagaatatgttattaaaatgataaaaaaggaattgatgtttcaggagttttgggcactcagagatatcagctttgaagttcagaaaggtgaccgtgttggtattatgggattgaatggtgccgggaaaagtactcttttaaaagtaatttccggtgtgttaaaagctacacagggaacggttacaacaaatggcaagattgcaccgcttcttgaactgggagccggatttgacagacagtataccggtgctgagaacatttatctgtatggtgcgatgcttggttacagtaaagagtttttggaagcacgttacgacgaaattgtagagttctcggaacttggcagttttatcgatgtgccggtaaagaattattcttccggtatgcgtgccagactcggtttttccgtggcaacaattgttgagccggatattttgattctggatgaggtgcttagtgttggagatgcgaaattccgtaaaaaatgtgaaaatcgtattcagagcatgtttgataaaggtgttaccgttattttcgtatcacattcaaccagtcaggtcttaagaatgtgcaacaagggcattcttttggagcagggccgtctgattgcacagggggatgttgaagacgtagtaagtgtatacgaagcaaagatgagtgagaacgaataggaggaaaagaaaatgaaaaaagtgattacttatggaacgtttgacttacttcatgtaggtcacattaatttacttcgccgcgcgaaagcattgggggattatctgattgttgttgtttcctcagatgaatttaacgccggcaagggcaaaaaagcgtatcattcttttgaagaccgcaaaaaaattcttgaagcaatccgttatgtggatgaagtgctgccggaatatacatgggaacagaagattgatgatgtagtaaataataatgtcgatgtttttgttatgggagatgactggaagggcaagtttgatttcctcaaagactactgcgaggttgtttacctgccgcgtaccgaaggaatttccacaacaaaaattaaaaatgatttgaatatgaaagactgagaaaatgattaaaaaaacaggctatgtgctgtttgctttctttttctatctgttccgcctattacccataaatcggcagaaagtattttttgtcgcaacgcatgatgacagcgaagagggaaatgtcggcattgtggcagatgctataaaaaatcagtttccatccatgaaaatggtgtatctgacaaaaaaagacggcatacgaagaccattttcgtttttctttggaaaagcgtttcatatggcaacggcatcggtgatttttctcgataatgagttcatgccgatggcgtatatgaaatttaataaaaatgtgaaagtggtgcagttgtggcatggaaccggtacgattaagaaatttggcttggattcggataccggggaagtaaaaagactagcaaaaaaagcaaatgaaaatattacgcacttgattgtcagttccgaatgtacggcaaaatggtataaaagtgcgtttggtgtagacgatgaaaaaattttcccgattggactgccgcgcaccgatttgatgttagatgattctaagaggcagaagatgcaggagcgtttttttgagcaatatcctgatttgaggggaaagaaaattacgttatacgcacctaccttccgagattcacaggttgaaaatccggaaatttgtttggattttgattcccttaatcaatgtatggaagagaatgaggtgcttcttatccgtctgcatccgcacgtggcagagcattgtcctgtcggtatatgggatatgtatccggataaaataagaaatgtttccgattatccgggagtggctacgctgttatctgtggcagaccaattgattacggattattcatccattatttatgagtactgccttttggaaagaaaaatgattttttatgcgtatgactatgaagtatttcagaaagatggtagaaatttttacgaggactatgagaaatttgtgccgggaatgattgtatatacgcagccggagctggaaaaaaactggcatacggcttacgaggatgactcacaacgagagcagttttgcaggcgcattttcaagtatcaggataaaaatgccgtaaatcgacttttatgtttgatttttgacaagaaataagatataatgttgtgagcgtattattaggctaatttgagaacggagggttacgagtgaaaacattattagagagaaagattagtttagtagtaattattttgcagtttttagtttccttgttggtttgtatttattttggaacaacagggcttgtaccggttaagtacatggttgcgattgcagtcattatggttgtattgcttgtctatcaggtgatgagccagctgacaaactccagttatatatttggacgtgtgttagctgttctgttttgtgccgtgttccttgttggtgcgaactatgtgagagagagtatggcagcattccagaatgtcggtggtgcaaccaaaaaggttgatgttatttctttctacgtcatgaaggacgatgcagcaaagacattagcagatgctaaaaattactcttttggtattctaagacagcaggaccgtgagaatacggacaaagcagttcaggatgcaagtaagaaactgaacaagacattgaacacggttgagtatgatgatccgttgacaatggtagatgccttgtacgcaaaagaagtgcaggcaattatcatgaataaaagttttgtagatacggttaagagccagtataagacattttccacggacaccagagagctggatacaagcaagattgagtcagaagtagaagaattggttgataccgatgtaacaacaaaaccatttaatgtttatatcagtggtattgatgtatatggtaagattggacagacaagccgaagtgatgtaaatattattgcgacggttaatccagttacaaagaaagtattactgacatctacacctcgtgattactatgtaccgctgtacagtaagggcggtaaatcgtattccggaggtatgccggataaactgacccatgccggtatttatggtgttgactgctcgattaatacactggaaaaattgtataacattgacattgattactacgtacgtgtcaatttcaccagtctgaaaaagattgttgatttgcttggcggtgtagaagtgtattcggattatgacttcatttctgactggggtccacacggtgccggtacacattataagttcaaaaaaggctataacaaagtaaatggtaagaaagcattggcattctgccgtgagcgacaccatttcgcaaatggtgactaccagcgtggacgtgaccatcagcatatgattgaggcaattttgaacaaggtgatgtcaccttccgtactgccaaatttctcaagtttgttgaaagaatcgaagtccatgttccagacaagtatgtcaaaggacaagattgtatcgctctgcaatatgcagttgaatgatatggcaaaatggaagattgcttatgcgaatgccgagggtacaggagctaagaagacgaccttctcgattcgctcaacggcgctgtatgtttgtgagccaaactacaattccgtgaagaagattacaaagagaatgaaaaaagtaatgaaggaaacgaaagaaaacgagagctcggcttccgataagaatgacgttattaagtaagacattacacgagataaaacggccgctttttagcggtcgtttgtcgtgaataagtggggaataaaattgattacgaaattacaagatttgtttattcttctccttaatccatggattccgattgtgggaagaataaaagacaaggtaaggtaccggctgattacgctgtgctttgtaattgaccttgttttgttttgtatcgtccgctacggacttcataaggaaagctatttttataatacggtttgtggtatttttgttatgtttgccattgccatattatcgcttgaccggacattggttcatatccactggagacgttctctttggattgcttggtttggtatgtgcatttcctttaccgtttcggatattctggtgccgaaaaaaatgtgtggactgggtctgattttagcttttgtctttaccgctgtattttttgtgtggcagaatcatacgagaaaagatttgttgtggcagtgcttcaagaatgccataaaatggtcgtttgccgttatgtcggtgatttcctttttgttccgtcctctgtatgaggaaggcaggtatgccggcatttttacaaatccgaatacgtttggattgtatttgtatattattattgctgtatttttgtcggatttggactggtgtgtggagaccggccggtcttgccggaaaaacattgtaacgtatgtttcgcttgccttatgctttttctatctggaaaaaagtcaggcgagaacttcactgattgcggttgcagcaattgtgctgctttggattgtactgcggttttatttggccaaaaagacaaaaaattaccggacctttttaggaaacttaggctgtatggcagtattcaccgtagtgctgtatcctctgtttttaatctgccttttgcatctgccaaacattgttggacatccgattgtgtttgaaggaaaacctttgtattatacaagtgaatttcaggggaataaagaaaaagcggatgagccggacgatgttgtggtgccacagtataaagatgtggaggagacacaaaacaagaaagatacgattgcaccacgcaatatgtgggaacgcatttggtataacatcaagtattcaaagggcttgaatgccattacgaatggaagaattgatatttatcttgcctattgggataaaatgaattttaaaggacatgccagcacttcaatggtagtggatggggaaaagaaaaaccattcgcataacaactggattcagtttggttacacctatggacttctcagtatgtttttctatggtgtgattacgttattaggggtagcgttttctttgaaattttacctgacacagagaagaaaaaatgcaacatatgcttttttgataccggcaatctgtatcggatttgttattgctacactgacggaatgtttgtttctgccgtttgaagtatttccggcatttgcgtactggtttgcatttggtgatttatttgtaaaaaaagtaccaaaaaataaatttttacaggaattagaggacgaggcatgatacaattttgacatgtaaacgtcctagtataaaaaaatgattgaaagataggagaaaaacatgaaggaaaataataaaatatggttgcgttatatcatatgttttgggctgattgccattctatgctacttgtttccatataccggagatgactgggcatggggaagtaaaatcggtatcgacagattaaacaactggtttgaaaattacaacggacgatatgtgggaaatcttattgttttggcaatgacgcgctcaaaccttttaaaggcagttattatgtcattttgcttaacaggaattgtagcactttgcgagtatatatttaaaagaaaatgggttttttatgtaagttgtgttgcacttgttttgatacctaaattgattttgcgtcaggccgttgtatggacggcaggttatgcaaactacgtaacctcaatgtttttcacattgttatttatagcgtatgtttatcctatttttcaggagacaatgccacgaagaaaagtttggcattgtctgccgctctttgtgttagcggtaataaatgcattaattgtagagcatttgacaatttataatgtggttttggcttgtggtgtgcttgtgtatacaatttgtgttcatcgcaaggtggttgcttctcatgtggcgtatttaatcggaagtgtggcaggggcagcttatatgttttcaaattcggcatatcatacgatcgcaaataatcaggatcagtatcgtcaaatggcagagggaggagtaatcagtcgtgcatttgacaattatgtcaatgaaattgcaaagcatctttgcctgaataattgttggatgaatttagcaatcgttattgtatgtgccatgatttataaaaaaatctattctgacgtaaataaaaacagaagtgcgttattagcaaaaatttgtctgatagttatggcaggatttacgacatggtctttgttgtcgtcctttggcatcagtacatttgcaaaacagaaccggttattatattttgaagcggcttttgtggcagcttacatgattgcacttattatttattgtattattattggcagtcaaaaaaaatgtttatggaaagttttgttttggaatgcgggaattgtttgtgttgccgcgccgttgcttgttgtaaatccgattggtgagagatgcttttttgccacgtatatactgtttttgatgctccttttggaactgcttatccttttagacggagaagagaaagaaagccggatttttacaaagacattttgtaagacatgcgcagttgtgtccattttcggattagggttttatcttaatattttttcctcaatctatcaggtggataaagatcgattggctagaattgagagacaggtggaggcaggtaaaacgtccgtggaaattcggcacttgccatacgaatcttatttatggacagccactcctgaatgggagccatggattgaacgttacaaattattttatggtctgcctgagaatttggaaataaaagcagtatgggaatacagtaagaaaaaataacaagattacggaggaatgttttatggaaaggaaaaaaatttcagttgtcgtgtccgtatataatgaggaattgtctttgaaccaattttataagacaacagtaagtgttttggacaagtgtgtttgggactatgaacttattttcgtaaatgatggcagccaggatggcagtattgaattgttaaaaggttttgcaaaggaaaatgccaaagttaaggtggtggatttttcacgtaattttggacatgaggcagcgatgattgccggtattgatcatgcacaaggggatggagttgtgtgcatggacgcagatttgcagcatccgccggcatgtattccggacataattgctaagtttgaggatggttatgaagtgatttcgatgattcgaacgaagaatgcagatgccggaattattaagcgaattacgtcaggtgccttttataaagttttgaatcttatgtcgccggttaaatttgaaaataattcttctgacttttttgctatcagcaaaaatgtagcaggcgttctgcgaaaggactatagagaaaaaatccgctatttgagaggatatgtgcagagtgttggattccgaaaaacaacattggagttcgaggcacagaagagagaggcaggggaaagtaagtacagcattcgaaaattgctgcatttttccattaatgcactgtgcagcttttcggatttgccattgaaactgggaatgtattcaggtgtatttgtggctctgtgtggttttatattgatgattttcactattataaacaaaattgtcaatggagcaccggcggggtattctacaatcattgtagttttatgttttatgtttgcggttgttcttatggtaattggaattataggagaatatatcgccgttttgtttgcggaaattaaggatcgaccgatatatattgtcagagatatttatcaggaagagaaagagactcatggaggagagaaagagtgaaagtttcggtaattgttgctgcttataatgcagagaaatatgtaacagagacgatggaaagtctcgccaatcaaagtatcgacgattatgaaattattgtagtcaatgatggttccaaagaccacacgattgacattttgagggattatgaaagccgttatgacaacataacagttgtggacaaagagaatggtggaccttcttcggcgagaaaccgcggactggatttggcaaaaggagagtatgtatacttctttgatgcagatgatgtcttagagttagacgccttagaggcactgtatgagcgtgcaaaagaaaaaagggcagatttagttattgctaagtatgatatttttaatcgttttcagacttttgcagtcaatggaatcaatgatttggtgcagatggaaaaaatagacaaatatgagccacagattctgtggacgttttcgctgtgtaataaattatttaaacgctcaattattgagcagtatgaactgcgtcttccaccgatttcctattcggaggatggggcatttttgatgcgttatgtataccgtacgaaccgaattaccggacttgaccgtgtgattttccattaccgcagaatgtttgatggtgaggcggagtcgattacggcttcgatttcttcttggaaaatcaaagactacattgaggcacaccggctgattttggagtcggcaaaagaaagtattttaattgatttcccacagtacaaagatattgaggaagtaaaagagaataatgacgatattcacaaatatttaaatgaaatcagccgaaaagaagtgcagattctgttggatcagttttatgcgaaatactggacactgccaaaggagacaattacgcatctggtttcagaaatgaatgataaaatttcaacattggatatgcgtgatatttcgatgttaaaagattctcacccggaatttgcacttgataatctggcggtagacaaagaggatttgctttctcatgcgtggtttaccattgccctttatggggagaaagaacaggaagaaaaatttttgttaagtattcagagtctgacactgcaaaatctgattgccattcggattataatgccgcttttctggaaagagacagtggaaaaagccggatttttacaggataatatggagttttttgatgtaaaaacaagagatgaactgtattatcaggcattggaacaggcacagacgccatacattacttttgcggatgccaaagtcagttatgcgaataatgcatttaagtatgtggttaagaactttatcaaatcaccggcagattttatgtcagaattgatatatcaccgcaattttggagatatgcaggcggtacttttcagcacggtggcattgaattccgtaaagacaggctatgaaaataacccatacatgggtatggattacacacttgccaataaattttttaagacggaatttttgaaaaatcaaaccctagataagtcaaaaagtctgctgtcacatctgacacagtggtaccatagaggatattttacgtttatgaatgaccgtattgtattctatgaggatttggaagcaacatatgtggattatgttggaacgaaggaaaccattccgatgatgaaggaatatttggtagatagaaaagcagatttgaacagcccggagattgttccggatttaaatgagattatgccgaagatgcttcgtttcccgtctgaaaacatcggtcagattttgttccgtaagatggtaaatttcctgcgacgctatccggtaaaagagcaggtgctgttttttacggtgcgaaaagacggtgaactagagggcaatgcaaaagcattatatccgtatgtcaaaggaaagaaagtgatttgtgccaagcgtctgccacataatccttttacgaaactttatatgtactataaaaatattacaagccgtgttattgtaacggatgactataaccgttatctgcgtcacttccagctgcgtcagagccagcgtgttgtacagttgtggcatgcctgcggtgcgtttaagaaattcggacagcggggaaccaacatgtcgattgctgcggatcatgcttatcatgtgcagtacaatatggtgacggtaagcagtgacagaataagaagtatttatgcggatgcctttgatatcgatgtgcacaaggtaaaggcgttgggatgtccgagaacggatgcattttatgatgaaaagctgatggatgagacaaagcagaaagtatatgccgcacatccggaattcaaagaccgctatgttattgtatatgcaccgacatttcgtgatataggggatgacagaacgcagtttaaaccggatttggattttgataaattatcaaaagacttactgccaaatcagatatttgtaatctgcccgcatccggtcatgaaaaataaaattgtagagaagtcttatgacaatatcgaagttatcagagatttctccacaaatgatatgatgttggtatcggatttgctggtaacggattattcttctgttatttttgaatatgcgcttttgcgaaagccaatagcattttactgttatgatttactcaattataatcggggcttttatctgaattatccggatgatttgccgggggatgtttatgagacgcagcaggcacttacagcgtatctaaagtcaccggaaaaagatacattgacagaaaaatatgaccagttcattgaaaaatatatgggagcgtgtgacggacacagcagtgagcggattgccgctatgattaatcagtatatggaggaagcgaaacatgaatgagacagaaattacatttttgagcagccgcggacgtgggctgagtaatgaccttgcgcttttgaaagattatcttgcgaaacaatccggagaggatgtaaagctccgctattatttgaataatgaaagacataaaaatccactggcagcacatggttaccgccgtgcgaaaaaggattttatggagggtatgacaaatgttgtctgtgtggatgcttctctatcaactaaaattaataacttagcaccggaaggcagtcggattttactgggtgttccgtatgattaccagtttaagaatatgtttttaatggagtcaaaaggaaaagaatttaatttaaatacctttgcaagatttacgcacatcattccgggctctccatttacggcagatttgttaaaacgggcgtaccgtttagaagataaagaaataatcgagggtgtttccctgccgtttgcctatgatataggggatgctaaaagaagagagaatgtctcggaactgatttattattactttccgcatgcaagagacaaaaagattctttctgttattgtatatggtgatgaagagatgaaaaggaaggattgggaaactattgatgtaaagcaatggatgaaagagcttggggaagaatggtttgtttttacaaacagtgaaattttgatggaaaatgcattttctatgggaaatcaatacaaaaaaagctttggctatgtaaaccggattctcccggttccggatttgttgtatgctacagacgttttggtgacaaataacggacgtttggcttctgcattttcaattttagaaaagcctttatatgtttgccactacaacaaaaattattttgaaaaatatgtaagtttaaaatatccggaaatgtattttgaaaatgccgggaggttgtgtgagacagcatatcaggtggatgtgtgcaatagagcacaggcggattttaacgcaagtatgtcatatggtattgagaaaaatgtatatgatcaaacgttgaaatgcttgttagattgaatgagaaagagaggaaaaagatgaatcgaattgcaaaatgggataatgcaaaatttgtgttaataatattggttgttatttgccatttttacgaaaattatttaggaagttctaaattggtaaattccttgttcttttccgtttatacgtttcacatgccggctttttttctgatttcaggtatgttttccaagaaaaccgtgaaggaaagaaaaattgtaaaagtagtaccatatctgctggtttatttgtttatgaaaatgtttggttattttgtatccggtattatgaatggaggaacatttatatcggttgatttcttcagggaaccgggtgccgcttggtttattcttgcgttatttttcatgtatttaattacgttttataccaaacaatttcgacctgcttatgttttgattgtatctgtttttgtttcaatggcagcaggttactccaatatggatacgaatcttttctgctggttgaggattgcaattttttatccatttttttatgctggatatgcattgtcaatggatactattacgaaatggacagaaaatagaaagttgaaaatagtttctgtggcagttatcctgatatattttttagtctgctatgtcggaattgataaattgttttgggcgagatttctgttgactggaagaagttatgaggcacttacgcatggtgcattttatggtggtattttacggttgtttacttatgtgttatcctttggacttgtgttcgcttttttatgcatcattccaaaaggaaagaatattttttctcaattaggaacgagaactttgggtgtttatgtatttcattataatttcattaacctttttgtgcattcttgttggtataaggcattatatcataatttcccaaatacatgggaaattatacttgttttgcttggaattgtggtgaccttgatttgctgcttgaaaccatttgatgcatgctgccgtgcgattttgtccagtaaatggaaacttcgcctcgatgatgagttgaaatgacaaactatctgtgatatgataaaaacaacgaatttttttggaggttttagcagattatgatatttggagtattgttagcaggcggtgttggaagccgcatgggaaatgtagagaaaccgaaacagtatatgaatattggtgacaggccgattattattcacacaattgaaaagttctttgtgaatgataaatttgaaaaaatccttgttttgtgtccggaacagtggatttcacacaccaagaatcttataaaaaaatatttgggggagacagaccgtattgctgtgatggcaggtggcacaacgagaaatgagacgattatgaatgccatttcttatattgaagaaaactatgaagtggatgatgatacgattattttgactcatgattccgtccgtccgtttgtgacacatagaattattgaggaaaatattcgttatgcactggagtatggtgcctgcgatacggcggtagctgcgactgatacgattgtacagagtgaagatggcaaggtgatttcatctgtgccggaccgcagtaagatgtatcagggacagacaccgcagacattccgcttaaagaaactaaaatcgttgtatgaatctttgaccgatgaggaaaagaaaattcttacggatgcagcgaagatttttgttatgaagggcgaagacgtatatctcgtagaaggagaagtatcaaacattaagataacttatccttatgatttgcgtgtggcagaaacattgattcagtcgaagcaggaggattaagagcgaatgcttaatacagtataccagttggtggctcctcgtaaattcgaggtcacttatgaaaacatcggattgcaggatgatgacattatcgttcgtccgacacatctttcgatttgtaatgcagaccagagatattatcaggggcttagggaagaacatatacttcgtcagaaactgccgatggcattgattcatgaagggattggtgttgtacttcgtgacccaagtggcgagtttgagccgggggaagaggttgtgatgataccgaatacaccggtagaagaagatgagtttattgcggagaactaccttcgctcaagtaaattccgtgccagcggatttaatggatttatgcaggaatatgttaaaatccgcaaggacagattagttcgtctgccacagggaatcaacaaagaagtagcggcatttacggaaattgtcagtgtcagtgttcatgcgatttcacgctttgaccgttttgcacatggtagaagaaatgtggtaggtatctggggcgatggtaatttaggttatattacggctgtatttttcaaaacaatgttcccggatacaaaactgtatatttttggtgtcagcaaagacaagctttctgattttacatttgctgacgcaacgtatcaggtaagtgacattccggagaatatggaattagatcatgcttttgagtgtgtgggtggagccggttccggaaaggcaatcgaccagattattgattttattaagcctgagggaacgatctctatattaggagtatcggagtatccggtaccgattaatacccgcatgattttggaaaaaggattgagagtattcggaagcagccgaagcggaagagtggattttgaaaagacggttgaattatatagagagcatccggaaattatcaattacctgtctaatattgtaggtgcggtaattccggttcgttcgatagctgatatgaaaaaagcatttgagatggacattcagaagtcctttggaaagacgattatgctttgggagaaatgaggtatcttatgatagcagtgattgtaccaatttataatacagaaaaatatttacgggaaacaatagacagtgtcatttgccagacactgtcttttgcagagcatatccggctgattttgttagatgatgccagtacagatggctcatttgccatttgtgagcagtatcagaagcagtatccaaagcagattgtagtaaagcactatgacacaaaccagggtgtttctgcacttcgcaatgaaggcgtacggattgccggagagatgggtgacgaacttattacctttttagattcagatgacaagttagcagatgatgcagtggaaaaagcgaaaatgtattttgaatcacatgaggatattttggttgcggctattgctgtaaaatattttggcacaagagacggagagcagcgtttaaattggcgctttcaggaaatggatgttgtggacattaaaaaacaatatacgtttccacattattatgtaggtggcgttttcttgagaaaacgtgttttaaatgaacttcattttgatgagaccatgaatttttgggaggatgcgctggcgattaatcaggtgattgtgtcagaaggaaaatacggactgattcaggatacattttatttttatagaaagagagaggatgagtcctctttagtggatacggcatggcataaaaaagagcgttatacaacgctgttatcgtccggttatggacagttatttgcctactcaaggaaaaagcaccatcgtattattccttatgtgcagtacatggtagcgtatcatatgcggcttatgatgatgaaaagtaagcagagcattatcgaagaaattttatcggaagaagagttggcggcactcagagatgatgtgcagaaggtattaaaaaagataaaagtgaaatacattttacagattccaacgtcacttccgattattgagggaatgctctcaatgcgtgccgggaaacaggtgcgtgccaaacgtgtctacaaggacaatgactgtgtacttatgtataagggcgttgaattagccagaatgtccgagcgctctgttaaattattccatatcatagaagatgaggaatcggagtttaacggtatgtggagagggcgtttttgcacaccgatttacgctatgaaaaaagaagattatatctttgccgagcataacggggtacggattgattccaaagaatttatctgccgtaaacagatttttattcttgggaaacgtctgcgatgctactatcatgcagggtttgccattgcgattccgaaagaatgggatcgtgctgtgtttggaatccatattgcagaagcagatgcggatattttgatgaatgagattgtatttaatgaggtaaggctgatttattttgaaggggaaacagaagaacatgatgaattcgaaatcgacagagatgatgaaaaagacatgtaaagatcatttttttaaagcagggcaatggttttggtttgtgtttgtgtacggcattgctttgattgcctttagcagtttggtacaaaaatctttttttgcgatgcttttactgccgattgttgtttatggaatatatcatttttttatgagagaacgaattgcccttaaagagataaattatcagattgttttttatgtcgtaagcattgtttttgctgtgtttatgtttcttgttgcttattccgtgcgtgtgcagattttttcatgggattggggaaaagtaattcgttctgcaagtgagtatacattaacagataagttgacagatactacgtactttgcaagatatccgaataatcagttttggtattgtattttgacattctttttcagaatggttcattttatatggccggagacgggaataaatgaattttatttagcgtctatagcacttggatgtgttatgacagtggcatctatcgtgttgcttcatcacatagcagtgcttatttggaatgaaaagaaggcgttttttgttggcttaatgacatggttttgtatgccgttgtggttatgggctatgtatgcttatacggatatagcaggaatgcttttgctggtagttatgctgtattgctacacgaaggctgttttgagtgaacccggctggaaagttttttgctggttgtgcttatttggagtggctgcatctgctgcattttcagttaaagttactgtgtttattctctttattgcagttttcgcctgcttgttacttcaaaaaaaatcatggaaaaagattattgccggtattgtcattgtagcaatttcgtttggagtcggtcatgaattgtgtaattatgtaaagtcttctgtaattccgttagaagaatcgtattgcgatgcctatgaatttccgctgacccattggattatgatggctcttggatatgggggatatcagcaggaggatgtcgattttaccatttcatttaattcttatgaaaagaaaaaagaagccaatataaaagagatcaagaaacgattgaaggcacgttctttccatgaaagttttaaattttttggttatgataaacaagttagaacatggggagatgctacacttgccagctgcgtatatttagctgaagggccacaggagcctgacaatatattaaaacaatttgtgacattaaaaggaagcaaatactggatagctcttttgtatatgacgctatattatggcttaatacttgttgggatgtttttatcggcacgatttgcagtaaaaagaaaatctgatgcaaaagcggtggatatgccgatttttgcttcaagtattacgatgcttggaatagcattgtttcagactatttgggaatgtaattcaagatatttagtcgtatttattcctattatgattttgttagctgctgatggtttctttgcatggagagattatcttagagaggagaggataaagtgaaacactatcatttttcaaaatccgacacatcaattgcaaaattaattgctataactttgatgcttttgcatcatttatttggatttacggatcggattttgcctgagaatatgtaccagagtttatatatgtttcgcgggcagcctatagaagcagcaatctgtgcttcttttaaggtgtgtgttgcgttctttttgttccttagtggatatggaacatatctgagcctgcgtaaaagtaaatcaatttcgaaaatgattgcaaatcgtatatttcggtttttaaaatacatatggcaggttatgattatttttgttccaattgattttatattaggtgtgacaaaggtaaatcttacatcctcatggaccattcaatatgattttgaaagcattattcttagcatgcttggatttgaaaagtataatggtgagtggtggtttgttatgccatacatatttttgcttataatgacgccgcttatgtttcggtttttacagagaaaaaaagctgatttctttacggattttctcgttgttttggggattgctttgttttctttgtatggtatccctaagttgatgagttatgatatgttgattgattttaaagggacagtatggggaattctgctttgcaacgttgtttacctacttccaatttatctatttggtatgatttttgcaaagtaccaggtattctcgtattatcatcagatattaccgaaaggaatattaagttaccctgtattattatttgttgcagctgcaggtttttacatgcgttataaacttggatcttcttatgattttttcttggttggacctatgatttatgcgtgtgttatgcttattaagaaaattccgggagttatctgggtgtcaaaaaaggcaggaagatatattacctttgtttggttgattcatagtttctacgtgtttcaatttggacagaaatttatatattccttcggaaatccgatattaatttttatcgtgctggcagtggtttcttttgcttcagcagctgctgtttactggctttttaccggattatccaaaggagtcaagaaaattagatgctttcataatcggacagtgtaagtctgttttccaaaattatatcaatggcctcacgtacaggagcgtcgccggacttttgagtcagaacaaaatcaacatatggatgcaatgcggcagcgcagtcagccggtgcaaaggtaatgccggctgtttgcattgcagacagatcattcatatcatcaccaatatacaccgtttgttcaggagtgcagtcatatttcgccattacagttttcaagatatcagctttatcgcgaacaccctgataaagcacggtaatccctatttcttcgcatcgtctagtgacaatttttgaacggcggccggtgatgataataggaataatacccttttttattaagagtttaatacctaatccatcttttgcgttaaatgctttcattacctcaccgtcattaccaatataaatttttccatcggttaatgttccgtcgacgtccattgcaaacaatttaatttttgaaaaatcttttttcatgtgagtacctccggtattagtaattattcatccattaccgtttcaaagtaagatggtgtaatgaatgagatagggcagcttgattttcttgtatttttataatcaacaagcatgctttttatatctttatttgcttcttcagcatttaatgtatttctggttttttccatggctttttcaacgtaattcggattttcactattatggctgtaaccatcaaaacctgcgatggaaatgctattcacattcatcaggtctaacagacggagaagaagcacaccagaattatcaagctgctcccaaccgcattttaccaatcgcagaaaatcgataataaagagattatcatcttttcttgtcgttacatttgatgtcacaatttttttgcatttattaaaagctgcttcattacgccaatactggtaccggtttttgttgctgaaatatgcaaaatcaatcggataacaatcggtgagaagattaacgctaattacaataggattcttctctttataaaaatgctgaatttgtccctggcaggttttaatcgtatgaccgggaagaagaaccaaaatatcttttccactgagtgcattttgaagtgatgcaatggcagaatcatcctcacagtgtgtattttgataatccaaataggtcttttcgagtagcgagtagtcgtaccgttttcgctccaccgggtccaaacggtttagcaaaaagttaatgtcgcggcttgcaattcctgcctttgctgaaaggtaggagatgttatttacatgcgcactgtgcgaaccagcaagaaaatacgggatggagtagccccattcataactgttatggaaaccgtcgatataattgtctataagatctaaaacaatatcaatatcataaccactattaaacttacggttcatatactgcatgacaagctctgtatttgtatttcctgcgccacgtcccatgcctgccattgtgctgtctacaacaatatcgcggagtccctggctcatatcgataaaatcctgagatagagcaaaggacatctgcaggttattatgtgagtggaatccaattttagtatttgcccacaaattatgatgaaccagataaaatacgcgctgtaaatcttcacgatacagagaaccgaaggtatcgacgatggaaaaggcatatggttccaattcatttattttttcaatcaagtctaaaagttcagcatctgtatatcctaatatgtcaacaggctggacataaagtttgtatcctttattgacgattgctttacaaaaatcaataacttcaaaacgttcgcttttaaaaaagcaggcacgtacaccatcaattgaagtgccgtcataaggctctaagttatcaatatggtatcggctgtaatcggcaaggcagacataagatgaatgccttttgtctgtaggtaaaaatgagcggagctgtgcagcattattaaagatggttgtgccctcccgatgtggttcgtctttcagaaatccgcattcaataacatctatgccgctttctgttaaaccttcaataattccttttattgcggtattgccaaattgactgtcaatcaggtatgcaccatcgcgcagtgtacaatctaatatatttactcgtttcataaaaacctccctgttaaatttgattctaccattctgatggaagaagccaattctcatatggtatcatatgtccaaatgcgacaatggcccctttcgctgttggatagtagcggtctaccatactatttttaattgcaagaagttccggggcaatctgttctcccggaattttattgcttgaattgtaatagcgtccaaaataatatagggtagcagatttattggtcatcttattataacattgtgttaccatttgggaaatcgttttgtgtaaatactttccatattcaccaaaaggattatgagtggcaatcaaatcccattttttgtaggataagataagattaatatcttcctgcatagcatttttacatgtggaaagcatatcggtttcatactttccgttactaaatgtttttcggacgtccgggtaatccaaaatcaggtatttgtcatttgttgtacgcattgtttgctcaaaggctgttcttcgttttggattccagccatgcgtcatgcagacaacgagatattcaccttctataagatgtccgccgccccaaagtgtctcatcatccggatgtgcggtaatcatcactttttttatggcagttaagtcaaggttatctaacatttgtttcgtaatgtagccttttgtacgagtgattttaagattccagctgcatgtaagagctggatttgtcttatatactgcagtaatagtaacagtttcaattggacgaagggcagttactgtaccattttcatcaacggttgcagcggttttgttgctggatgtccatttgattcgatgatccgttgcgttggccggacctgtgactaactgcattttatgtgatgttccggattctaacgaaacaggattgttctttgcaaattctattgaggtatatggtatatcctcaatagtaatatgatgttttgccttttttttgctttctttctcgcgaactgttatagtaacctttcctgcatggtgggatgtgacaacaccatcctcattgactgtggcaatacttggattgcttgacgaaaaaacaagggtatcatccgttgtgttttttggagaaagagtagttgtcagtgctatttgttcaccaacaagtgcggtattttttccggaaagtgtgattttttttatcttgatgcgtttttttacttttaatttaaatgaagtgtgcttttctgttccttttaccgaagcggttatggttgtagaacctttttttttggcttttacaatgcctttttttgaaacagacgcaacttttttatttgaggaggtgaaaattactttcttaaaacgcgcattatggggttttaccaatgttttcaattccagtctatcaccggttgccatggcttcttttggtttgtttgttattttgattgatttggtacgaaaataggaaacgacacgtacagaagctgtaatatcgtttggtttaccgggaattttgagagaaattgtaacggtcccctttttctttccggtgacggttccatgtttgtttacggaagcaatgctggaatcactgcttttccatatccaagcggctttgttttgcgttgaaagtgttgaatctttcacttgcattgtagtttttttcccgatttgtacggatttatcaggcatattctgagctgcctgtactttgatataagtactgctgcatgttaaaaaaaatgcagcacccaagaaaaataaggctttttttgttatagtcataataatagcatctccttttgttaaaaattctttggtttataaaataaaaaagatatgtgaagaaaatatgtcaaatggacacattgttttttcttattatgttttcaaccaaggcaacgtgttccggtaagtccacgccaatggaggtataggttgtttcttttaaacgcatgtgataccctttttgcaaggcgcgcagtggttcaataccttcacctttttccaattctgtctgctccatatttgcaaatttcaacaaaaaatcttttttataagcatagattccgacatggcgaaaaactcgtgctaactgaccgtcttttatattggacggaataacagagcgggagaaatacattgcatctcccgtgtcgtttgttactacctttactgtgcttgtggcacggatttcatcaggatctgtgatttccttttttaaactgccaaaataaaccgattcatcttccgtaaaaatggaaatcacttctcggatcatttccgggttaatgacaggttcatcgccctgaatgttgatatacaaatcaccatccgtgtgttcggcaacctctgctacgcggtcggagcctgtctgatgggtatcttttgtcatttttacattcatgttgtatttttcgcacgcggcacggattctttcatcatctgtggcaacgtaaatttcgttaagttccttgactttcatagcctgatgatagacccagtatatcattggttttccgcagatttcaaccaatggttttcccggaaaacggctggatttataacgtgccggaataacaccgattatcttcattttgattcctccatttttttactcaaaacatcttcaagttttacgcgtggaaagatttcaagatttccaccgcgagttgcattatagatatgaatattatgtttctttgcatacgaatcaagaagtgcatatacttccatggagcggtctatgatgtgctccccaatttgtttggttgttaaagtatttgcatgcattcttgtcttgattcggttaatatcggtttctgcaacttcttttgttgtgtaattatctgtaaaatgtccacctttatcatgagggtttgtacaatccacgccgagcagataaatttctttaaagcccatatgaaacgccatttcggcagctagagaaagtacggttgccttaatcatgcagtatgcctgaatgtttccgcggactttgtagcgttcggttggaatggtatggacgtaagtggtatcgaccggttttttgcgcatgcggcgataggtgcgctctgttgtaaacagaggagcctttaccattttggaaagttcgatgccaagcttggatgcgtaaattgtgtcagatacacagtgaaatgacggacgccagtcggttttgtcaaaaattttgtataccatgtttgtaccgaaggtgtattcatctttcaataaatgtaaatcttcaccggtcagactgggaccgtttccaatgagaaaacaccgttctcctttgtgactgtccttcaaacgctcgaggcgtaaactattattgttatggaacattccgtgagagcggaaaaatccgagaacattataacgcagtaacagccataaaatgcgcattcggttgagcgtttttttagtatagcgtacaaaacgttcgtagagggttctcttatgaggcagtgccctaagacacatatcaatcactcgtttgccggaattcccatcttcatatggattaaatttttggttaaattccaattgcttgtctcgataaggaaattcgcattcctgacggtggatggcatcaaccagttcctgttccgtttttgtgattggtcccggtaattcttccggcgacaggtaaagaccacgcacatcttgttcgtaggaatctgcgtcgtacatatgaaaaaccatcggacgcattaaatttgcatagtcaaacatggtggaagagtagtccgtaatcattaaatcactgactaaatacaaatcattgaccgactctacgtcacttacgtcatatatgacagggttatcttttatttttgccgctccaatttggtgatgggcgcgaaataaaagaatataatcgctgccgagcatgttcatcagtacattgacatcaaaaccatccggcaaggaaaatgccccattttcatccagtgatgagtcacgccaggttggtgtatagagaagaacctttttcccttccggaatatgtaatgcttcctttttcttttggatttcttcacttgtataatgaaaaagtttgtcattgcgaggatatccacttgcgacaaattttacagaaggatctccgattgcaaaagcagaagctattttttcactataatacggagacggagatgggaaaaaggttacttttttcccttttgcccggtatcgtctgtgcatatgagaacgtgtctgacgaggatcggaatctgtttcgatatcacagccgagtctctttaatggtgtaccatgccaagtctcgatatagatttgggtttttcgtggttttagataatcagcaactgtgatattgttaatccagtaacgagcactggcataatatctgcgataggcagaagttcccttcttcaccagtatggtatgatggttttccaataaatcaaaatgcgctgcagggtcagtgaatgcccacacaaaataaaacgagcggaatttttcatccttttgcagctcgtcatatatggcacgcacgctgtcagtggctttttttccgccataggattcaaagacaatatagttgtcagagactgtcgagtgcagttttgtaataccgtattttatccgatttttatagtaggacaaattttgtcttagcatgtaacgagactgcttgttcatggttgtatgttcctttccccaagtgttaatagatacctcatatactataacgatttataggtaaaaagtcaaatgttttgcaaatatatgagaactgtggtataatgcccataataatgtgataatataggaggacaggtatgtcaaagggtaaaataatttatatggttgtaccttgttataatgaagaagaggtgcttgatgagacaacaaaacagttaagtgataaattgcaaaaattgatcgatgcaggtgagattagtgaaaaaagccggattctttatgtgaatgatggttcaaaagatcagacatggccgattatctgccgtctgcatgaagagtatacacttgtcagtggattgaatctttccagaaaccgcggacatcagaacgctgtgcttgccggccttatgtatgcgaaggatcactgtgatgcagcgatttcaatggatgctgacttacaggatgatattcatgctattgatgagatggtagataaatttaatcatggaattgatgttgtttacggtgtgcgcagcagccgaaaaaaagacacgttttttaagaaatttacggcagaaggattttataaaatcatgaaatggatgggggttgacattgtctttaatcatgcagatttccgcctgatgagtaagcgtgttttaatgcagatggaaaattacaaggaagtcaatctctttttacgcggaattgtaccgttaatcggatatccggcagacaacgtatactatgaaagacaggagcgctttgcaggagagagcaaatatccgctgaagaaaatgttgtcatttgcatttgacggcatcacttcatttagtgtcaaaccaatccgctttatattaagccttggtcttgtcatcttcttggcaagccttggaatcctgatctattcgattgtgcgccatgcaatgggtgcaacggtacttggctggagcagtcttatggtttctatctgggcgcttggcggtttgcagcttcttgcgataggtattgtcggtgaatatattggaaagatgtatctagagacgaaaggccgtccgagatttgctatacaggatattctaaatgatgtagaccgggccgagtaagagttcagagattttgttttgacggggaaaggaatacaaaaagaaagtgatagtggaaaaaatacaaaattttgtgtgtgtggcagcgaaaaagatatttctttgcttgcacatttttattgtgggtatgattttgcttgagttcggaagacttgcaggtgatgtgtttccgttacattatcaattgttgaatgctttgctggcattgattgggttgacagcaattttcctccttttttttatatgctgcacgagaaaaatagcaggttgtgtttgcaaaaaaaacagagttgttatgttttgcatattttatgcggtaattatatttgtgatgcagatgtatctgtgtaaatgtatctatttttatacgacgtgggatgtcggtatactgcagtcagcagcagatgttgtgacacatggtggaacaattcaggattggatcagccaaagaggagattcgttttctcagaattattttaatgcttatccgaataatatttttttgacgattatttttgccggaataaaatatctgtcatctttatttggatgtgtagataattattttcctacgattgttgcaggggtgatttccacagatgctgccattgtgtttactgtgatgactgtttggaaattaacgcatagtcgaaaagtgactttcctgtctataatcatttgcacagtttttttaggattcaacccatggattataatcccttattcagatacatacgtacttccttttttgagtgcggttttgtatttttattgctccatgaaagatgagaaaaagggttatgcatcatggataggaattgtgatagcggcttcgctggggataaaaatcaagccgacggtggtgattgctttgcttgcaattgttctggcagaaatattttttttgcgaaagtgccaaattaaggaaattgctgcaaaatgtttaattgttgcaggaggaaccataattgttttgggtctgataaatagtttgagtgatgctgtgtatgaccagcggaacgcagatgcacaaatgacatggcagcattatctgatgatgggggcaaatgaggaaacacatggctcttattttggcgttgacagggagcgttcatggggaatatccgatccggagaagagaaaggaaatgcaaattgaggtgtggagacaacgtataagtgagaaaggcatttggggcacaataaagttttatatgcagaaattgataattgcaaatgatgatggctcatttgcatggggctgggaaggaaatttctttggtgaatatcgtggactgcacagtgaatttgcacaaaaattacaatctttttattatgcacaggataataagatgatttataatattttgcagagtatatgggtttctatacagattttggtttgtttctttgcaatattttttgataataggaataaaagagcacttttcattgcgatgacattgactgggattaatttgttccttatgatatttgaagtgcgtgccagatatttgtttatgtttgttccgttttatattacagcggctatgcttggccttttctatatgcaggaaaaagtcaagatgataaaagatagaaaatgtcatttgcaatagatagaagagaaggattaataaatcagtgagaaactttattcgcaaagcgaatcctttgtttcgagttgatttactaatccttctttttttatttcttgaacacccattctctttgaatctggaaactgattgcaaaaagcagggtatcgataatgcatttgcgaagtgtcgaataagtaataaatgtcagcagatgattgactaaaacagcagacaacaaaagctgaacaattgccaatgtgtaatatcttacgaaaagaaatggcgagcttgagtcatttttaaacacctgatttttgttcacaaaaaagttaaatagcgaactggcaaaacgtgaaatcacagtccgcattaatataagcacggacaaatcgaaaaacggaagcatccacttgtcggagatgatcggacgaagcagatagccaagcagccagtacaaagcaatgtcgataataaaactggataaagagcttagcataaacttcaaaaacactttgtaaatccgaatcgaatcaatgaacggattaaaatgcgagctttcattatttgccagataaattgtctgaatcggaaattcttcaattggaatctggtattccttcgcagcaatcagcatattcatttcatattcgaaccgttctccttttacatttgcaaaatgctctcttatgagaggggttggaagtcctctgagtccggtctgcgtgtcagaaacatgtatgccgcataaaagccggatcatctgccgagtcaacttgtttccaaaacggcttctcagaggaatttctttgtcgtcaaactgacggcagccaagaatcaaagaatccggatgctcataggttagttttgcacaagtgttaatgtccggaagtacatgctgaccgtcacagtccacggttacagcacctttgatatccgggcgctgctctaaaatatagttaaacgcagactttagtgcaattccttttccgaaatttacgacgtggcggattattttgcagtggcaagtctctttgcatgttttaaaatactttcgattggcaataagacttccatcatcgaccaaaatgatattggaaaagccatcgtcgtgcaattgtccaacgagtgataccatgcgctcatccgggtccagtgccggaatgatgatggcaatactttctttataattacccaaaacatttccccctgtaattctgaaatcgaaataatactgtaagtataagcctatatcgtttcagaatcaagcattcgtgattgacattctttttttacattagctttttgctgcgtttgccgcatttcgtttggcacggtaacgctccgttccatcgagaatttttttgcggatacgaagattttccggtgtaacttcgagtaattcgtcagtgtcaatgtaatccagtgcctgctctaaacttaattctttcggcggtgtaagacgcagtgcttcatccgcaccggaagaacgggtattcgtcaggtttttctttttacatacattgacctcaatgtcatcgctttttgcgtgttcgccgacaatcatgccgccgtaaaccttttcaccgggaccaacaaacaaagtgcctcgctcctgtgcattaaaaagaccgtaggtaattgtttcgccggattcaaaagcaatgagagagccttgtttacgataagggatttctcctttaaatggaccatagccttcaaattctgtattgataacaccgtttcctttggtgtctgtcataaattcgccgcggtatccaatcagtccacgggctggaatgataaattccagacgtgtcgtgcctgcatttaatggggtcattgcctgtaattcccctttacgctggctgaggcggtcaatgacatttccggtaaattcatccggcacatcgacataagcacgttccatcggttctaattttttgccattttcatcttctttataaagaacctccgctttgctaaccgcaaattcatatccctcacggcgcatattttcaattaaaacggataaatgcagttccccgcggccggacactttataagcttcggttgtgtcggtatcttccacacggagggatacgtcggtatttaacatgcggtataaacggtcacgcaaatggcggcttgtcacatattttccttcctgaccggcaagcggactgtcatttaccataaaatgcatggcaatcgtcggctccgaaattttctggaacggaattgcctgtggattttccggactacacagagtatctccaatgtgaatgtctgcaatacctgaaatggctacaattgagccaatcgttgcttcttcgacttccacacggttgagtccttcaaattcatacaatttggaaattttaactttttcatttttatccgggtcatgatggttgacaataacggcatcctgattgacgcggatggttccgttatcgacttttccgatgccgattcggccaacgtattcattgtaatcaatggtgctgattaagacctgtgtgtcggcgtccgggtcgccttccggtgccggaatataatttaaaatcgcatcaaagagcggcttcatgtcggtgcctttctcattgacatcgcaggatgctacaccttcttttgccgaggcaaagataaatgggcagtctaactgggattcatcggcatccaaatcgataaacagctctaaaatttcatcgacaacttcttccggacgagcttccggacggtcgattttgttgacacagacaacaaccggcaaagacagctccagtgctttctttaacacaaattttgtctgaggcattgcaccctcaaaagcgtcaacgactaagatgacaccatttaccattttaagaacgcgttctacttcaccaccgaaatcggcatgtcccggtgtgtcgatgatattaattttcacaccttcataggtaatggctgtattttttgataaaatagtaatgcctcgttcacgctcaatatcatttgagtccatgacacgttcggcaacttcctgattggcgcggaatacaccgctttgtttcaataattcatccactaaggttgtcttgccatgatcgacgtgtgcgatgatggcgatgtttctgatatcgtctcttgttgttttcatagaaacctccattcattcatgcaaaaaccacaaaatcgtattatagcacgattttttttgtgtggcaagttcgggcgtaaaacgcttaacaaaatgctaggtttttttgtttttttatggtaaaatagaattcatataaaaaaggaggtgctcttgtggggctgaaaaggaagaagcggttactgggaattttgattttttctcttgttattggcatgatgggaagtgccggtggagaagctgaggctaagaaaaagattattctaaataagaaaaaagccgtgatttatgttggcggtcaacttcgcctaaaagtaaagggaacaaagaaaaaggtgaagtggtcttcaaaggagaaaaagattgcgacagtttcaaaaaaaggagttgttaagggaaaacgtgccggtaagacaaagattacggcaaaagtaaaaggaaagaaacttgtctgcagactgactgtgaaggcgaagaaaaaaagagttattactacggcagaggcaacaccacagggagaaaagaaacctgcaccacaggtgacgcagacgccgggaggaaccgataagccttctgcttcccctgcgatagagccggtagtgacgccaaccgctgtgccaacgccaacaccggttgatacttcaaaaccggaaccggtattttcaaaagaaagcggaagttatgataaatcatttgaactatctttgcatgcgccaaagggaagcaaaatctattatacgacagatggcagtgagccggatgtcagtagtgtgggcggcagtgtaaaagataccataccggcaaaacttccgaccaatgagtataagcaggcaattacagtgaaaaatcgggataatgatgaaaacaggctttgctcgaaagtcaatattccatatatgtatgacccaacagattattataataatgggccattttatccggaagtcagtgcagttccgaaagcaaccatcattcgcgcaatggcagtggatgaaaagggtaatacgagtaagacggtgacaaaaacttattttgtagataagaatttggcagaggtttataagaatgcttctgtgatttccgttgtcacggatccggataatcttcttagtaaagaaagaggaatctaccgttatggcaactgggaaaacagtggtgctgaatgggagagaccggcggcagtgacgtattttgaggaagatggcacgataccgtttgagacgacgatggggatgcggattcatggcaattatacacgccgctgggggcagaagagtctgcggttttatttccgtgaagaattaggactgaaaaatctcaaaggctatcagttgattccgggagctgtcaatgcggacggaaagccgacgaaaaagtataaacgttttatcttgagaaatggcggtaacgaatatgcctacagtaaaatgcaggatgtctttatccagagtcttgtgagtgaccgtgcatttacgacgcagagttcacgcccatgcgttttattcttaaacggtgagtactggggactttataatctgatggaacgctattccgataattatttggaggaagagtttggcgttgataaagataatgtggttgtgataaaaaatgatgaacttgatgagggaaaagaagaagatttcgctctctatgaacaactgcaggcaatggcagaccttgacatgtctttgaccgataattatgagaaatttaagaaaatggtggatatacagagttatcttgactattatgcgactgagatttatattggtaacaaggactggccggataataatgtgcagttatggcggaccagagaggatgacggcagtgattatggcgatacgaagtggcgttatatgctctacgacaccgaatactcgatgaatttgtggggacaggataataacggaaatacgaatcgtctgcaggaagcaagaaataaggatgcattatttgatgcactctgtaaaaatgactcctttaaacagtcacttgccgatacgctgatggatttggcagataaaaactttaagtcagccgatgctgcaaagaaattagatgccatggcagccgtctaccgcccgttgatggagcagtataaaaagcgttttggcaacggtgatgtggacagccgggtaagggatatgaagagttttatggcaaatcgaaaaagccagataaaaaagcatattcaggaatccctttcaattacagtaaaataataaaaagaatggagaacaaggatggaaccggaaattacagatatttttgaccgtattatgaattggaagttgcttcgatttatgtggcctttttataaaaaaaataaggacaagcttttatatttgttttttggaggatgtacaacacttgttaatcttgtgattacatatggattgtggtatggcctgaagtgggaacagtggtatgccgggaaatttgcactgggcacgttccttggaaatttaattggaattgtgtctgctattttgtttgcctacgtgacaaataaaaagtttgtatttgcgtcgaaaacaacaggaatgaaagaacttttggttgaatttattaagtttgttggcggtcgtgtgtccactttgattattgaactgggtggtgttcaacttgctgtaatattgttccctgattctaatacacttttgtttgtggcgaaacttttgactcaggttttagttattataattaattattttatcagcaaattatttgtgtttaagggaacaaaagaggcatcttttgacaatcaagactaaattttgatttgaatttgtccgatatacagattacggatgcgaatgtttattttagaatcagattttagatagatgatatagaaaggtatggttatggatatgagacgagtaaaaaaaagaattggtatatcagcagcggctgtttttgtgacggtggttatttttgccgtctttttatacagcaagcagtatagccatgcagcagatgaaatatttattacctataatgaccagcagttaaaccctgaggaaacactgcagatgacttcaggaagtattccgcttgtgttaaaaacaacaggaaccgcctatgatgaggataagtatattgttgagtggtctttttcagatagtgcggcaactagatttgcaacacttgaacaaagttctactaataagatggtagcgacagtacgagcagtttcgcccggacttgtaacggttattgcaacggtgaaagacagcatgaatggtaatgcagttcttggaagtgctacgtgtaacattaatgttatgtttgctattgatacatcgaaagatgcaaatttataccgttttgtgaatgaatcagatacagagcgttctcttgttatgtatgcggatgacagcccggttcagttaggcttaagttttggcgatgcgaaggatgctcagtggattagttcgaatgatgaagtggttaaggtagaaaagaacaccggtattgtgactccggttggtgccggacgaacacagattacagccagctatacgccgaaaggtgaaagtgatacctatacggcactattgaatgtgtatgtaaaacctaaaatttcgcttactaaaggcagtgggtatacaaattcattggttaatcagaagatttcttccggaacgaatatttacacggatacagtatttaccagtaacacacaggcaatacgaaacaagattatctgggtggtgaagaaagatgatggtaaaggtaatcctcaggtattggcagactcacttggacgagaatcggatgttattcaggttactccttccggtatgtatgaaaacgagttgaagattcaaggaacggcagggaagtatgtaattgaattttatacaaatggaacctacttgagtgagagcaatcatacggatgcatatgatccaacggttattacgtttacacttaccgccggaattggtgacaaagaagaaacattaggaccgggagattccataaacctggcagatgcttttggcatgacgcgagaggattttgttaagtattttgtatccaataactggacgaaagatggtggctcaatttataattatgcaacttacgatagtgcaacaagcgagcttcaggtaaaaactacagtttccgaaggtgtattaattgattctgtaaatgtgaaaccggcgtataaaaagcaagtggcagagctgcttgggctggacggcgaggataaagatgttcttgccaatatgccaatgacatttaaggtaacaatcacattacaggatcgcatgcatttaaatcgtacggaacttacactttccgaaaaagaagaatttttgctggttgctacatataatggtgcttatgatggaactgtaaaatttgaaagtacggatccgtcttgtgttaaagttgatgataatggtttagtgacggcagtaaagaatacaaaaggcgatgttaagataatagcatctttgacaaactcagttggtaagactattcgcgcagagtgtcttgttgtggtacaggctgcattgaaatcatttacacttgaaccaaatgtgacggaaatgacaatgaatgtaggagatgtacagacaattaaggcgattatcaaccagtcaattaagaatccgccgttgtcatggacctgttctactgtaaattcgaagatttttacggtgatgccgtcagatgatagaaagagtgcggttattacagcagtgggaacgggtgtggcagatttagaagtcacaaacactgtgaatccaagtgataagaagacgatccgtattacagtccgatcagcaatacaggcaatttccctgaaacagacagaattgactgtgccacgttataaagatggctataatatggggaaaaacgatgtgtcatacacgccggcaaatgcaacggatacagaacttgtatggactagttcggacccgggaattgctaccgtggatgatgatggatatattacttttgtaaatgccggggtgacgttgattaccgtcagaccggtaaataatccaaatggtgttatggcttcctgcttgttaacgatattaggttcagcagataaggttattttaagcgagaatgaacttacaatgaatgtaggggatacaaaagatgtgaaacttgattttgagcctattaatacgacagcagagttaacatggacgccaacgggtgagtataaagattgtgttacgatgcttccctatgatgaagaacgaagaattgcttcgttccaagcaaaatcaccgggagtagtctattttaacattacatctccgcagaccggaacggaagtgttaaagattacagtgaaacagccttcgacagcattgagtgtgacaccaaaggagttaacggtaagaacgggtgacagtgctgatttaaaggcagtatttacaccggcaaattcgacagacactattatatggaaaagttacaataatagtgtggcaacggtagatgtgaatggacgtgttacaggagcaaaggcaggaacaacatttattgaggccagagcctacaatggaaaaacagcaggaccaatgactgttattatggttactgtgcaggatggtgtgaaaggagtttccttagactcatcagaaaagacggttcgtgtggacagttccgttacactgatacctatttttaatccggcaactgcttttaataaggcgatgacgtggaaggcttcaaatagtaatgttaaaattgaggcggttggtatttccaatctgaaagtaaccggtgtaaaagccggtacggcgatggtaaccggtacgacgacagatggtggattttctgtatcctgtttgattacgattctgccaaaacagaaagaaaatgatacgaaggtgacggtatcgccgaaaaccaaatatttggctaaaggcaagtcattctatgtgacagccacagttaccggctcaagtaataaaaaggtaaaatggacgagcagcaaaaaatcagttgcaaccgtgacttccggcggtaaggtaaaggcaaagaaattaggaacgacttatatcaaagcgacagcgaaggatggttccggtgcgtacgccagatgtaaagtgcgtgttgttcgtaaagtgaaaaaaattaaactgaaccgttattcgggcagactgcttgttggaagtacgttgaaactgaaagcaactgttctcccgaaaaatgcgacgattaagtccgtgaagtggacgacgaataaaaaatcgattgcaacagtcagcagtaccggacgagtattgggaaccggcgagggtattgtaaagattaaagcttcggcaaaagatggttccggtaagtcagcaacttgcatacttcatgttgttgagccgattgaggcaacgggaattactgtggcaaacagccagattaccgtggcgaaaggaaagattgcccagtccggcattaccttaaatccggtcaattcgacgacgaagattaaatatcactccgataatccgagagtggcaaccgtaaataaatatggtaagattaagaccaaacgtgccggagaggctacgatttacggaacgacttcgaccggactgtatggttattgtgatgtattggttgtagatttaaaccgcaaggcagtaactcttcgtccatacgataccgaacagcttcatgtaaatgagattagtaccggtgtaacatggtattcaagagatattaacattgcaaccgtatcatcgaccggacttgttaccggacgtaagagaggtataacaacgatttatgcggttgtcaacggtgtaaaactcggatgccgcgtgaacgttacaaaattaaagtagtggaatgggaggagactattgttagtaaatttacatgtaaaaaactttgcgataatagacgagattgatgttgatttttcttccgggttaaatattcttaccggagagacgggagccggcaaatcgattttgattggctctatcggcatcgcgctcggcgcaagggtttcgcaggaaattataggaaagcatggcgactctgcgatggtggagattgttttccagattgaagatgaagagacaaaagagaaattatcaagattaggtgtagacccggacgaaggacagattgtcatttcccgccgtattacgggaagccggagtgtaaaccgaattaatggtgaaaatgtatcggtcagtgtgattcgccaggtggctgccctctgcattgacattcatggacagcatgaaaaccagtcattattgcagaaggataaacatttagcaattgtagatgagtttgccaccaaacagtgtgtcgctctgaaacaagagattgctgctttataccgtgaatatacagcgctgaaaaaacagtggcaggatgaagatgtgtcagatgaggagcgtgcgagagaacttagttttctggaatacgaaaaacaggaaattgagcaggcatctttacaagccggtgaaatcgaagaagtggaagaagcataccgcagagcatccggcgctgagacaattgtggaatcgcttggtctggtacaccgtttgacaagtgatacggccgcgggagctgtgagccatgcgttgcagagtatgcagcggattacaggctttggtgatgaaattcggaacttgcaggaagaacttttgcagattgaaggacttttagatgattttaatcatgaaacagcggattatatgcaggacttttctttcgatgccaatgagttttcggatttagagaaaagactcgatacgattcacaatttgcaggcgaaatacggaagtacctatgaagaaatactttcgcatttggaagaagtagaggataaactgcaaaaacttgcagattttgaacagtataaggagaaacttcttgctaaaataaaggaatatgagtcggatttgacaaagaaatgtgagcagttatcaaaagaaaggaaagaaaccgcttccattcttcaggaaaagattaaagctgctttatcagatttaaattttgcctatgtagattttgaaatttcatggagccgcaaagatacatttggtgcggatggatgggatgaagctgaatttttgattgcaacgaatccgggcgagccaaagaaaagcctcggaaaaatcgcatccggcggtgagttgtcccgtattatgctggcaattaaatcggtttttgccgaaaaagaccatattgagaccttgatttttgatgaaattgatgccggaatcagtggacgtacggcacagaaggtttcggaaaaactgaaacttttaagtaaaagccaccagattctatgcattactcatctggcacagattgcggcaatggcagatacccattttttgattgaaaagatggttgatgaaaatcattcggagacagtgattcgtccgttggataagtcgcagagtgaacaggaattggcacgtattcttggcggtgttgagattacagagtcggtacttgaaaatgcgagagagatgaaagcgttagcaaaccaaaaaagttcagatagttttcagaattagaaaaatagaagttggctatactaaacagaaggaaccaaaacaatagtaagttttgtaccttctgtttttttattttgccgattatgggaggaataagtatgagaaaaaaagttcgttttttgctggctggattattagtggctgatgtattattgattggatatttgatgtatgattatattcaaaataaaattcctgattctgttttgacttacgtcggggaaaaacaggaactggacctgccggcgttttttaagaccgagcaaagtgttccggctctgcatgtgcaaaatcagggtggcagtttttctatgaagtcaaaccggttaggaagttatgaggtatcggtccgcttatttggtgtgctgccggtaaagaggatggacgttaaagttgtgaaaaggaaaaaggtatttccgagtggagagccaattggtatttatgtggagacgaatgggctgctagttctagacacaactgaggttccggcaaaagatgggcttacttatgcgcccggtgaaaatttgttaaagccgggggattatattttggagtggaatcagaaaaaggttgctacgattcaaagtttaaaccgtgaaattcaggggacaaaagataaaaaggttacggttttaatacgccgaaacggagaaaagataaaaattgccatgcgtccggtgctttcatcagatggcacatataaaatcggaacatgggtacgggaggatacacagggaatcggcacgcttacttatgtaacgaaaaccggtgaatttggtacacttggacatggaattactgatgttgataccgggacgctgttgaatttacacgggggtgaattgtttcagacgcagattgtcgatattatgaagggggagaaaggaaatccgggagaactgcagggatatatcaatatgattgcaaaaaatacgataggaaaaatcaaaaagaatacggagcagggtgtgtttggcgagatgaaagaggagcgtgtgtccgcctattccggaaaggcgtatgaagttggcagaaaacaagagattgaagccggaaaggcgtatctgtatgcgaatcttgaaggcagggcgaggatgtatgaaattgaaattgaagatataaaaattaatgcaagggataataagagtatggaaatcagggtgacggataaaaggattttaaaactgacaggagggattgtgcaggggatgagtggctcgccaattatacaaaaggacaaaattgttggggctgttacgcatgtctttgtcgatgacccgacaagaggttatggaatttttattgaggagatgttagcgcagtaaaaagaaccgcatttgctgtcaaaaaccgaagttaggagtcgaaagatgatgaaatataaaaagaatattaataaaaaattaaaataatttagaatttactcttgtaatatggagaaaatgggtatatacttttaatcacaacgagtttataaaaagtttataattatttgaagggggtactggttgtgcagaaattaaaagtgttaattgcagatgataatccaagaatggcatccatgattcagaatattcttatggatgatgatgagattcaggtcgtgggaacggcagaagatggagtagaaacactgggaatgattgaggaaacggagccggatttgcttttgctggatttgattatgccgaaattagatggtcttggtgtgatggagcgtctgcaggaaaagcagaagatgaaaaaggtgccggagattattgtggtgtccggtatttcacaggaacgaattacggatacggcatttgccttgggagcttcatattacttattaaaaccattcgagtcggaaacacttctttctcatgtacagaaatttaaaccgggtgcgagggcaaaactcattgctacgggaaatgagaaccgaagaaatgaaaaaatggcgaaatacaatcttgaatcggatgttaccaatatcattcatgaaatcggggtgccggcacatataaaagggtatcagtatttgcgggatgcaattatgatgtcagttgacgataaagaaatgttaaattctattacaaaaattctctatccttctatagccaaacaacacgggacaacaccaagcagagtagaacgagcaatacgacacgcaatcgaagtggcgtggagccgcggaaaagtggatacgattgatgagttattcggatatacggttcataatggaaaaggaaaaccaacaaattcggagtttgtagcgctaattgcggacaagatacggttagaacagaaaatgaaagcctaaaaaaatcttttcaccgctccctttttggtgtataataataccaatatgattttgtatcaaaaagaaaggggagaaggatattgaagaaagtattatttgttgcttctgaatgtgttccttttataaaaaccggtggattggcagacgttgtcggttcacttccaaagtattttgataagagtaaatatgatgtacgggttatgattccaaaatacactgcgataccggaagagtataaaaaccagatgcattatatcacgcatttttatctggaacttgcatggcgcaagcagtatgtcggtgtgtttgaaatggaattaaacggtgttaaattctattttcttgataatgaattttattttagcggcagcaagccttatggagaaatttatcaggatattgaaaaatttgccttttttgataaagcggcgttatcaacgctgcctgtgattgatttccgcccggatattattcactgccatgactggcagacggggctgattccggtatatctgcatgatgcattccagcagagcgaattttaccgtggaattcagtcaattatgacgattcataatttgaaatttcagggtgtctgggataaaaagacagttatggatacggcagggctggatgcatactattttacacctgataaattggaagcctttggggatgctaattatctaaagggtggtcttgtttacgcagatcagattacgactgtaagtgatacctatgcagaagagattaagacaccgttttatggagaaaaattagatggtctgattaatgcgaagtcagggtgtttgaccggaattgtgaatggccttgactacgatgagtataatccggcaaaggatccacttatttatgcaaattatgatgcaagaacatttcgcaaagaaaaaattaaaaataagcgcggccttcagaaagaacttggtctttcgcaggatgataagaagtttatgattggtattgtgtcaagactgaccgaccaaaagggctttgatttgattgactatgtgatagaagaaatctgtgcagaagatacacagcttgtggtacttggtaccggagaggaaaagtatgaaaatctgttccgccattttgcatggaaatatccagaccgtgtatcggcgaacatttactattccaatgagcgttcgcataaaatttatgcggcgtgtgatgcctttttgatgccgtcgctctttgaaccgtgcggattaagccagctgatgagtcttcgatatggtacggttccgattgtaagagagaccggcggactcaaagatacggtagagccttataatgaatatgagagcaaaggaactggtttctcattcagcaattacaatgcacatgagatgctcaataccatccgctatgcaaaagatgtctattataatagaaagagagagtggaataagattatcgaccgcgggatggcaatggatttttcatggaagaattcagcgaaaaaatatgagcagttgtatgacagaatgtaaaaaaatacaaattatttgaatttactcttgaattttattacggaattgggtagaataggttctagaagtttgtatattttttaacaaaccaaaattttaactatttttaggaggaaatatcatgtcagtaaaagtagcgattaacggatttggacgtatcggacgtcttgcattcagacagatgtttggtgcagaaggttatgaagtagtagcaattaacgatttgacaagccctaagatgcttgcacaccttttgaagtatgattcttctcagggtaaatatgagaaagcagatactgtttctgcaagtgatgattccatcacagtagatggtaaagagattaaaatctatgctttcccggatgcaaacaactgcccatggggtgagcttggtgtagacgtagttttggagtgctccggattctatacatccaaagaaaaagcacaggctcatatcaatgcaggtgctagaaaagttgttatctctgctccagcaggaaatgaccttcctactatcgtatataacacaaaccacgagacattgaaagcagatgatacaatcatctctgcagcttcttgtacaacaaactgccttgctcctatggcagatgcattgaacaaatatgctgcaatccagtctggtatcatggttacaatccatgcttacacaggtgatcagatgactcttgatggtcctcagagaaagggtgacctcagaagatctcgtgcagcagcagtaaacatcgttcctaacagcacaggtgctgcaaaagctatcggccttgtaattcctgagttgaatggtaaactgattggttctgctcagcgtgttcctacacctacaggttctacaacaattttgacagctgtagttaaaggaaaagacatcacagtagatggtatcaatgccgctatgaaagcagcagctacagagtccttcggatacaatgaagacgaaatcgtttcttctgatatcgtaggaatgagatatggttctctcttcgatgcaactcagacaatggtttgcaaagttgacgatgacacatacgaagtacaggttgtatcttggtatgataacgagaactcttacacaagccagatggttcgtacaatcaaatacttcagcgagttagcataagtcttgatttaggacaaggtttgaaattgatcccaaaaagggtccggtcggttggaccggatccttttttcatagaaataattaaaatggaggtttgttatgttaaataaaaaatcagtagatgatattaatgtaaaaggtcagcgcgtgttagtacgctgtgactttaacgtaccgcttcaggatggtaagattacagatgaaaaccgtctggtagcagcacttcctacaattaagaagttgattgccgatggcggtaaaattattctttgctcccaccttggtaagccaaaaggagagccgaaaccggaactttctttggcaccgattgctgttcgcctttctgaacttttgggacaggaagtaaaattcgcagcagatgataacgtagttggtgaaaatgcaaaagctgctgttgctgctatgaaagatggcgatgtaattcttcttgagaatacacgttatcgtgcagaagagacaaagaacgaagataatttctccaaagaacttgcttctttggctgatgttttcgtaaacgacgcatttggtactgctcatagagcacactgctcaaatgtaggtgttaccaaatatgtagatactgctgttgttggttacttgatgcagaaagaaattgatttccttggaaatgcagtaaataatccggagagaccatttgttgcaatcctcggtggtgccaaagtttcttccaagattccggtaattgagaaccttttggataaagtagatactttgattatcggtggtggaatggcatatacatttatggctgctcatggtgagccggttggtaaatctcttttggaagaggattacaaacagtatgcacttgacatggagaagaaagcagaagaaaaaggtgttaaacttttgattcctgtagataatatagtagcggatgatttctcaaacgacgcaaacttcaaagttgttgagcgcggtggtattccggatgacatggaaggtctggatatcggacctaagacatgcaaattgtttgcagatgccatcaaaggcgcaaagacagttgtttggaacggaccgatgggatgttttgaaatgccaaactttgcaaaaggaacgattgcagttgctcaggcaatggcagatttgaaagacgctacaacgattatcggtggtggtgatagtgcttctgcttgcaacaaccttggatttggtgacaagatgacacatatttctaccggtggtggtgcttcacttgagttcttggaaggaaaagaacttcctggtgttgcagcagcaaacgacaaataataatataagattttgattctgtggtggtgttttgtatgccaccacagaaatttttggagaaaaaaacaataattacacatttagtgcagagtgagaagatatttgtataaggagtgatttttatgtcaagaagaagaattatcgcaggaaactggaaaatgaataaaacaccaagtgaggcagttgcccttgtaaatgaattacttccgttggtgaaaaatgatgatgttgatgttgtattttgtgtaccggcaattgacattgtaccggttgttgaggcggtaaagggaagtaatgtaaatgttggggcagaaaatctttattttgaagaaagcggtgcttataccggtgaaatttctccgaacatgcttgtagatgccggagttaaatatgtcattatcggacattcggagcgcagagaatattttgcagaaaccgatgaaacggtaaataaaaaggttttgaaagcatttgaacatgacattaccccaattatctgctgtggtgagacattgactcagagaaaacaggggatttacgtggattggattcgtatgcagattaaaattgcattccagaatgtaacggcagatcaggcaaaaaaagcagttattgcttatgagccaatctgggcaatcggaaccggtgagacggcaacagcagaccaggcagaagaagtatgtgcagcaatccgtgcttgtatcggtgagatttatgatgcagctactgcagatgcaattcgtattcagtacggcggttctatgaatgccaagaatgccgcagaacttttggcaaaaccggatattgacggcggactgattggcggtgcttctttgaaaccggattttggtcagattgtgaatgcataacgcgaatgaactcgggaacttgttaaaaagtgaaataaactattgacaagaaccgtatcagtatgtataatatgtcttgtgtctgtcaaagagatggacacaagataaatgcgcgagtggctcagttggtagagcacaaccttgccaaggttggggccgcgggttcgagtcccgtctcgcgctctaatataaaaaagagtgattccaaaaggaatcactcttttttacttcgagccccgccgtggctcgaagttcgaggtctcggctgccgcctcggtcgtagcaaaacggtgtccaccggacaccagctacgtctcgcgctctaatataaaaaagagtgattccaaaaggaatcgctctttttttacttcgagccctgccgtggctcgaagttcgaggtctcggctgtcgcctcggtcgactatgctgttagaagtatttcgacaccattttcttcaattgcttttaagtcttcttctaatgcatcgccatcagtaataagaacatctaaagcgttaataggacaaatgcttataatagaatctgtgccaattttactggtagggtaaagtccataaactttttttgcagacgcaagaagagtgttatacagacataaatttctggttcgctggatggataatccgaagtcagcaccacttgcttatgtgtaaaaaaacagatgtcaattctttaggattccagtaattccgtagaaaagctttgtgactcgtgggttttgagtacgtcggtatgagttgcaagaagtccggtggacttctgttatgcaacgaccgaagcggagcggagaccactggtattttcggtgcccataccgctacgtactcaatgagcgaaagcacccacgagacgcaaagcttttctgctgaactacggaaactaaaaaatccgccatccgtttatttaacacaaacacaagcggtagcccttgcattttttttcatattttgataaactgtaaaattgagaatagaactaactatattattgtgttttagacgcagaaatgaggcagatatggaattaattagtatacgcgatttgtatcgcaaccaggaaaagtatgtagaacagacggttacggtcggaggatggttaagaagcgtcagagattccaaaacatttggattcttagtggttcatgatggaacatttttcgagccgcttcaggtggtatattcagataaacttgataatttttcagcaatttccaaattgaatgtaggtgcagccgtgattgttacgggaaaagtagtagcaacaccgggaacgaaacagccatttgagattcaggcagatgaggttgttgtagaaggtgagtctgcaccggattatccattgcagaaaaagagacactcctttgagtatcttcgcacgatttcccatcttcgtccgagaacaaatacatttcaggcagtgttccgtgtgcgttctttgattgcgtatgcgattcataaattcttccaggagagagaatttgtttatgtacacacgccattgattaccggaagtgactgtgaaggtgccggtgaaatgttccgtgtgacgacattggatatggaaaaccttccgatgacagaagaaggaaaagtagattacacaaaggatttcttccgcaaagaaactaaccttaccgtaagtggtcagttaaatggtgaaacgtatgcgatggcgtttaaaaacatttatacatttggaccgacattccgtgcggaaaattcaaatacgacacgccatgcggcagaattttggatgattgagccggaaattgcatttgcggatttgaaagatgacatgatgttagctgagagcatgttgaaatatgttatccgctatgtgcttgagaatgcaccggaagagatgaaattcttcaaccagtttgtggacaagggactgattgagcgcctgcggggagttgtggatgcggactttgcacatgttacttataccgaagctatcaaactcttagaagagcacaatgataaatttgaatacaaagtaagctggggatgcgatttgcagactgagcatgagagatatcttacggaagaaattttcaaacgccctgttttcgtaacggattatccaaaagaaatcaaggcattttatatgaagatgaacgacgataataaaacagttgccgctatggattgtctggttccgggaatcggggagattatcggaggaagccagcgtgaagatgattatgataagctggttgagagaatgaacgaatgtggactggataaaaaagattatgaattttatctggatttgcgtaaatatggtacggcacgccatgccggatttggtctcggatttgagagatgtgttatgtacttgaccggtatgcaaaacatccgtgacgtcattccgttcccacgtactgtaaataattgtgacttataaagattacactaggaggttagtaacatgaatttaataattccacaaggctatcagtcagcgttagatatccgcgagactgaggtagcaattaaaaaagtaaaggatttctttgaaaaggctttggctgccaatttgaatctgacacgagtttcggcaccgctttttgttgacccggattccggattgaatgacaacttaaatggtgtagagcgcccggtttcttttgatattttggagcagaacggaagggtggcagaaattgtacattcattagctaagtggaaacgtcatgcgttgggccgttatggttttgctcatggagagggactttatacagatatgaatgcgattcgccgtgatgaagaaaccgataatgtacattctttgtttgtcgaccagtgggactgggagcgcattatcgacaaagaagaacgtaatgtagatactttgaaagctattgtaaataatgtatatcaggcattgatggaaacagaagattatatggcaatgcagtatgactacattaagaaatccctgcctgagcagattacctttgtgacaacacaggaacttgaggaccgatatccggacaagacgccaaaagagcgtgagtacgaggcagtaaaagaatatggtgccattttcctgatgcagattggagataagttagcttccggagagccgcatgatggacgtgcaccggattatgatgactggtcattaaatggtgatattatcgtttattatccggttcttgatatggcatttgaaatttcttccatgggaatccgtgtggatgaaaaagcattgaaagagcagcttgaaaaagcaggatgcccggagcgcgaaaatcttccgttccagaaagaaattttggaaaagaaacttccgtataccatcggtggtggaatcggacagtcaagaatttgtatgtttttcctgaaaaaagcacatattggagaagtacaagcatcgatttggccggatgatgtgtgggaagaagcatcgaagaaaggacttaatattttataatggataattttaccttttatgcgccgacttattttgattttggtaaaggcgccgaaaagcatgttgctgatttaataaaaaaatttggcggacataaagtgctgcttcactatggaggaggctccatcaaaaagagcggactttatgatactgtgatttccgtattaaaggaaagcggtttggaattttgtgaacttggtggtgtaaaaccaaatccaagaagcggactcgtatacgagggaattgaattgtgcaaaaaagaaaaggttgactttattcttgccgtcggcggtggaagtacgattgattcgtctaaggcaattgctgccggtactttgtataatggagatttcatggatttttatcagggcaaggcatccgttgagaaagcacttccaatcggaacgatattaacgattgcggcagccggcagtgagggttctccaaatacggtaatcaccgatgaaaaaacaatggtgaaaaagggaacaaaaagtgatttgcttcgtccgaagttctctattttgaacccggaacttacctgtaccctgcctccgtatcagtcggcagcgggagcaacggatatcatgattcatgtttgtgagcgttatttttccaacacagaggaagttgagattacagaccgcttgtgtgaagcaattttaaaaacaattgtatatgaggcaccgcgtgtcattgaaaatccaaatcattatgaagcgcgtgcaaacattatgtgggcaggtatgttagcacataataatgtttgcggtgtcggtcgtgtgcaggattgggcaagccaccatattgagcatgaattgtcagctctttatgacgttactcatggcgcaggacttgcagtaattgcaccgctttggatgcgttatgtctgtaagaaaaatccgggtaaacttgctttatttgcaaaccgtatctttgaggtgccgatgaatgagaaacatccggagaaaaccgcactcaaaggaattgaggcgtttgaagcatttttgaaaaaaatcggcatgccgtcttctttcgcagagattggtgcaaaagaagaggatatcgagcttatgaccgataagcttttgaaggggcgtaagaccgaaggaaattatgtgaaattgaatcgtgatgatgtgattgcgatttatcggagtgcattgtaaaaattaaggaggcagatatggaccagagagaatttctacgtcagatggaagagttggtagattttggacgaacgaaagaaaatttgctcaccaaacaagaaattgccgattattgcagtgactggaatttgacagaggaacagatgccatttgtctatgcataccttaaagaacatcggattgaggtagaaggatatcgtgcgccggtagagaaaacggaagaagaggctgtcgaaaaaagcgaaaaggattccaaatatctgcgcttatataaagaagaactgtgtcagttaaagcggtacgaagaagaggaacttgtgcgtttactcgaacagttgcgaagaggcgaggaagaagtaatttcttctgttatcgaagcgcatctgcaccgggtcatgcagttggcggataaataccgcggccgtggtgtgccggtggaagatttgattcaggaaggtaatttggaattaaccgcctgtgttgcgatgctctgtggaaatgaagaagttgtggattatcaaaaagctattgaacatgcagtgagaagccggttgattgaattggtagatgaagaactggcaggaacggacagcgtgcatgcactgcttgggcgtgtgaaccttttgctggaggcaacgaggacattagcacaggaatacggacgtattgcgacaattgaagaactttccgaatttacccatatggatatcgaggaaattaatcagtatgtcgatttgtcccacaatgaaatagaactgggaaaaggtgaaaatgaacgaaaataaagaatttaaactggaggctctcgttgagcctctttgcttatggtatgaaaaggaaaaacgcagtatgccgtggcgggatgatgctacgccgtatcatgtatggctgtcggagattatgctccagcagacaagaatagaagcggcaaaagcatattatgaccggtttacaaagtgtctgccggatattccttctctggcagcagtttcggaggaagaacttctgaaattgtgggaaggacttggatattataaccgcgcacgcaatttaaagaaggcagcttctcttttggtggagcggtatgatggcaggctgccggccgattatgatttgctgctttcactgccgggaatcggcagatatacagcgggggcgattgcatccattgcttacggcttagcagagccggcggtggatggcaatgtgcttcgtgttacgatgcggtatttaaattgcgatgaagatattatgaagatgtcggttcggactaagatggaaaaacaacttcgtgccattatgccaaaggactgtccgggcgaatttaatcaggcactgatggaactcggggaagtaatctgcattccaaatgggaaaccactctgtgaagaatgtccgctttctcatttgtgtcttgcccacaaagaagggcgtgagatggaactgccgaaaaaggcggagaagaaaaagcgccgtatcgagaaaaagacagtccttgtattccggcagggtgaccggattggaattgtaagacgaccaaatcaagggctattagccggtatgtgggaatttccatcaaaagaaggacatttgacgatgcagcaggtgaaagagtatttgtcagaaaccgtatcctgtgaggtgacggtaaaacgattaaagagcggcaagcatattttctcccatgtggagtggcacatgcgcggttatgagattattcttccggaaggaaaaccacaagatgtagtgcatgggcttttgctttgtgacttgtcagaggtccaggaaaaatatccgataccggttgcttttcatattttcttacaccagatttgagtgtggaataacgtaaaataagggctttggatgaatttccggctcttatttttatattccgtaaaaacacatgatatagtgcatactgcaaaaaaaatacaaaagaattacaatatatagtagacaatgcatacctcatttggtataatgattcctgtaggaaaaattatgaacgttagtattggtacggattgaaaggagttgtacaaaaagtgagggtaatcaaaagg

SEQ ID NO: 783 - DNA, 24418 bp, unidentified
  source 1..24418: mol_type = unassigned DNA
aggaagcggacagtctggtacggaattccacggaggagacgttccggagataccgcacaagcgttgtgtatgcggcggacggcagtgtgatatccaagctcaatgaccagggagcgtcctattatctaaagcgcgacgagataccgcagtccgtgatagatgcggtggtctgtatggaggatcagcggttttaccagcatagaggtgtggacttcagagcgcttgtgcgcgcggcgaaatcactgattgaaaaccggaagatcacgcaggggggaagcacgatcacaatgcagcttgccagaaatgtatttctgacgcaggagaagacctggcagcgcaaggtggaagagatttttattgcacagaatctggagaaaaaatataccaaggatcagattctggaattttatctgaataatatttattatggcaacggctactatggaatcggggcggcaggcagaggctactttgacagcggggttgatgaactggatctctcgcagatcgcgtttttatgcgcgattccgaataatccgaccgtgtatgacccggttacccatatggatcatgcgattgagcggcgcgaccggattctggggaaaatgcgggatgacggtaagattacacagatggcatatgcggcggcggtggtggaaaatattaccttaaagcggccggaggcgatggaaaaaaataattatgtggaaacatatgcctattattgtgcgacgcgtgcactgatggagcaggcagggtttgtgtttcagtatcagtttgcgacggaggacgagagggaagcttacgagcgggcttacagcgaatcctacagcgattgccagaagcggctgtacacggagggctatcagatttatacgtcttttgatctgcagcttcaggaggaactgcaggtagcagttgacgataccttatccggttttacggagaaaaatgacgagggtgtttatgatctgcagggggcggcagtctgcattgacaacgataacggctacgtgcgcgcgatggtgggcggcagggagcaggattttgacggatacacgttaaaccgcgcctaccagagttaccgtcagccgggaagtgcgattaagccgctcacggtatacacgccgtcgttcgagcggaattatacgccggagagcattgttgtggatgaaccggtggaagacggaccgaaaaatgcgaacggtacctaccttggaaatgtgacggtgcgcaccgcagtcgaaaaatcaatcaataccattgcgtggaagctctatgaagaactgacgccgcaggtcggtctgtcctatcttgagaatatgcatttttccagattggatgcggcggattatgtaccggcgacagcgctgggcggttttaccaacggtgtgtcgcctctggagatggcagccggatatgcggcgctcgccaatgacggaatgtaccgcgagccgacctgtattatgcggattacggatgacactggagcggaagtgtatctcgctgcacaggagggacaggaagtctaccggcagaatgcggcacggatgatgacagacgttttaaatggtgtatttatcaacggtacggggcgcggactgggactttcagatatgccgtgcgccggaaagacgggaacgaccaacgaccacaaggacggctggctggtcggttatacgagatactacacgaccagcgtatgggttggatacgatatgcccaaagagatggacagcctgatgggtaatacctatccgggaaaaatctggcagacatttatggagcaggcgcatgagggactggaatggctggattttctgccctatacgcagattccggatgcttcttccggggagatggaagcagaggatgcagcgacggatgagggaaatgcacagggggaaacgccggcggagaatggagacacaccgcaggagaatgtgacggatacaccggacacgccacagggaagtgcgacggatgttccgtcatcttcacaggaaaacgggcaggggatatcggatacgccggatgccacacaggaacagccgtcagacgctccgcagcagaatacaacaggaacgtcacaggaaaatgcatccgacgtatcgcaggaaaatgcagcgcagtcatctggggaaaatgcagcgcagtcatccggggagaatgcttcggatacgccgcaggagacagcgcccggggcaccttaagagaatacaccttaacattgacagataagactggaaacgttatcataagcatgggtaaaggcatcggcagagtacataacagacagaaaacgatgtaaggatacaaatagggaacaggagaatggaagaatgaaaaaatatgcatttggagttgacgtagggggaacgacctgcaagatcggattttttgagacggatggaaagctcattgacaaatgggagatcaagacgaataaggaaaacggcggagcatcgattctgccggatgtggctcaggcgattgagggaaagctgacagaaaagggaatctccagggacgatgtgcagggtatcggcgtcggcgtgccgggaccggtaaaaaatgacggtgtggtacaccgctgtgtgaacgtcggctggggtgttgtaaatgtagaaaaagaactgggagatctgaccggactgaaggtgaaggcaggaaatgatgcaaacgtggcagcactcggcgagatgtggcagggtgcggcaaaaggctgcagagacgtcatcatggtaacgctgggaaccggagtcggcggcggtattattgtcgacggcaaagttgtagccggatttgacggagccggcggtgagatcggtcatattacagtgaatgcacacgagaaggagcagtgtaactgcggacagtacggctgtctggagcagtatgcgtctgcaaccggagttgtgcgtgtggcgaagcgtaccctggagaagacatcggaagataccgcgcttagaaatcatgcagatctgaccgcaaaggacgtatttgacgaagccaaagcgggtgataaagtggcgcttgaagttgtcgatgaggtatgtggcattttaggagcagcactttccaatatcgcatgtgttgtgaatccggaggtcatcgtaatcggtggaggcgtctccaaagccggtaatattctcacggatgcagtgaagaagcactttgttgccacttcattccacgcatgcgccaacacaaagttcgtacttgcgggactcgggaatgacgccggaatgtacggctgcgtagagatgctcttagattaaaaagggctttcgcccgcgtgcatcgcactataaacgggatacgttttattatgggaagcagagactatcacgttccagatgcaaccggaggcggcaattctaagcgcaaaatccggtatttctaaccatgccgcgtcgaacatccttgatcatctgtgtttttccaagtttggaacattccacgtggcgtgtccgcaaaccgcagacaatttaaggacttttgtgtgtgccccttgttggcaccactgaacacaacataaccgcgcgaagccgatgtctgagttatcatctgccttgttttcaatagcagatgataacgagtttcggttcgcgcggttttatattgtctgtgaagcggtgccactaggggaaccagaaagtccgctcattgtctgtgttttgtcggacacgccccggggactgtccaaacgtggaaagacacagaactcgatgttcgacgcggcacggaagaaatcctcggattttgcttcaaagaattgccgcctctggttgcattctggaacttcatattctccaatattcttataataaaacatatcccgttttaaagtgcaaagcgcgggggcggcagtcctttttatagcgctgcctacgcttctacggcgcgtttgcggacttccgcaagtgcatgtgataccggcggaatgcagataataatcaaggtgatgattgcctccggaacaaggtaggatgcctgatagccggcagaatatgccagcgggctcatgccttccggtgcgtatgctgcgaaaaatacaacgccggagatcgttgcaaatacaaaacgtccgatgacgccggcgatatagccgatctgaagtccccactttttcttattgaagaagccggcaagacccagagcaccgaatgccagcgggtagtctaagagcatctgcgggattgtgtagaaaatcggctccagtacgaactgcaccaggccgtaagccactgcggtcataatgccgacatacggaccataccagtaagcgatcagaacgatgaaaagcatggacagcagagtgacggaaccacccattggcatgtcgaacagcttgatcatcgagcatacaacggccagcgcgatcgcaacagcagagtagacgagctgctttgtggtcagtgcggacttgtgcgtggcgttcttgtggcgcacgatagcggcaacaatcagaagaagggcgatgactgcgatgacgattgcaataccgacggtagtcagatggacggaaccgtcaccccagccgccttccggtgtagcaaaaaagttattcataaaaaaatcctccttggtgaatatgtagccaggaggatttgtctgcgttattgcaaaaagcttccttacgccggtattatccggttcaagtaataagggtcgatgaacgatcatctctcagcagaatctgcacccctagcgttttcatattcgatattattataacgaactttactataacgattctatttggaattgtcaagtacgattgtgttcttctccagttcttctgtgagcggcgcaatctgtgtgagcagattggtcatgtcctcgaagagggaactcttggtggtcccgagatcattggcgtgattgatatgctccataacagcgtcaaactgccgttcctcaaggctgaaagactggctgacttcatccagcttctgctctgcggcggacatggcggttgtaatctgctggtgtacggtgtccgcaccgccggcagcggttgtgatctgatcaaacacttcatacgtggaatcaacattttccatactctggttcagggcgtcctgcgaggtggaaatactggtattcaggttggcggtgccctgctcgacgtcgccgatgctgatatctaccgtgctgacaagactcttgatctcactcgcaagatttttgacctcctcggcaacgaccgcaaagccttttccctgctctccggcgcgggcagcctcaatcgaagcattcagggcaagcatgtttgtctggttggcaattgagatgatctgtgccatgcagtccttgatcttctgaacggaaacctggaaatcggaaaaggtgttctgcatttccaaaaagcgctcctgcacttctttggagctgtctttcaatccgtcaacacgctgctgtgcaagaccgacagagctggcaatgtcagatttgacggaagcaaattcaccggaagccctgtccacatcgccgaacagctcatgaaaggaatccagcttttcgcggagtgcggcattttcgtccagaacgagctggaatgcctgtgtgatggactgcagttcatctaaagagtgcacttcgctggtggagagctgcttctggtaatctaacaggcagtccgcaatatgcgcaacgggatgaagatctaagcggctggtggacgtggctggtgcagccgctgcattctttggtgcttttaatgaaaacatggaaatcctcctctttctatcacagattattcaaatacgacacaggtcatggtctggttgacgaactgctgattataatgttctccgaatccgatcagaccggcgtgctcaccgagtgtggacatggttttcagataatcttccatatggtgttcctgtgagaacagaaggtaacggaaaacacagttgatggagaaaacgccggaaatatggttgaaatcgcggcggatgcgctgcagcgtctcatccagaatctcgttgtaatcctgttcttccagaagaacgagcacatcggaatcattgacctgtctgtaacagcagagaccattcccggatacttcctttaaggaaataatacagatgtcctgtccgttcattttgccgagcggattgtggaaagtctggttgatgatattgctctcgctgatatgtaaggcgtccatataagcctgcttggaagatttgccgtttaactcgccgacatagtatctgctgcggtcggtattggaagcgatgaagcggtagcccggcatcggtttgtagagattctccttgtagacagcaacttttcctccgttgtttttcacaaaagcgtagacatcggcgtcttcatagaccgttccgttgacagagacttttccaccgtccccggtgccgccgacaagcggaattccagccttgccgagaatgctgtggatcgtggtcagcacacaggcgtcatttccggtacacaggtcaatacagacggtatctttcgaacttgcgtggacgttttttaaatcctgttccatgcgttcgatatatttgaccggcatggtggatgcctgctccaaaacgttggcaacagcggtgacattgtcataaaaagcaaccagaccgactcccttttcgacgaccctggtactgtaactcatgccgatacagccaatgctcgggactcccgggaaaagggattccagttctgtaacgtgtgcctcaaactggtctgcgttggacatcaggataagaagtcccggagcgtgaacgccctgtgcagcttcttttaagtttcctgtctggctcattccaaaatattgtttcatcagcgaactcctcccacatcttattacgaatattgtaagcaattttgcatgatatttcaacgcattaacgcaattttagcaaaacgtttccaaaaaataccttgacaatcaaacaggacagacatatactttgaaaagcaaataatttgattatcaaaatatttgaaaagcaaataattaaaaggaacagggaaaaggagaagaaacatgttagagaagatgagaccgatcattgcggagcagttaaacgtacaggagtctgagattaaagagaacacaaagttaaaggaagatctgggtgcggattcgctggatctgtttgaacttgtcatggcgctggaggaggaattcggcgtggagattccgtcggaggatctggaatcgatcgtgacggtcggagatgtgatcacatatttgaagaaccgcggggttacagcataggcgaagacagcagccgggacataccggtgtttaagggtaagaaaacagaccggcaggaagaaaagaggagaagcatggaaacaagggtaagcagattgcttggaacaaaatatccggtcattcagggtggtatggcatgggtggcggaatatcacctggcggcagcggtgtcgaacgcggggggactcggaatcatcggggcggcaagcgcgccgccggaagtggtaagagaacagatccgtgaggtaaaggcgcggacggaccgtccgtttggcgtgaacgtcatgctgctcaatccaaacgcgccggaagtggcgaagattgtcatagaagagaaagtgccggttgtcacaaccggtgcgggaagtccggcaaagttcatggaggcatggaagcaggcgggcgtggtggtcatcccggtcgtggcgagcgttgccatggcgaagatgatggagcgtgctggcgcggacgctgtgattgcagagggaatggagtccggcggacatatcggtgcgcagacgacgatgacgctggtgccgcaggtggcggacgccgtgtcggttccggtcattgcagcgggcggtatcgcggacggaagagggattgcagcctcctttatgcttggcgcagagggggtacagatgggaacccggtttgtcgtggcgaaggagtctatcgtacatgaaaattacaaggaacggatcgtaaaggcgcgcgacattgattccgaggttacgggcatgagcaccggacatccaatccgggttctgcgcaatgcgatgagccgcgaatatttaaaactcgaaaaagagggcgccggatttgaggaactggagcagctgacgcttggctccctccgaaaggcagtgatggacggggatgtggtacacggcagcctgatggcaggacagtgcgcgggacttgtgaaaaaagaacagacctgtcaggagatgatagaggaactgatggcgcagaccgcggggcttttaggtgacggagatttttgggaaaagaagagcgtcttcttgggacgcacatcggataagggagaatgacatgggaaagacagcatttttgttcccgggacagggagcacagtacatcggtatgggcagagatttttacgagcagattcccgtgagcagggacgtgtttgcggcggcatccgaggcgtccggtctggatattgcggcgctctgctttgaagaaaatgagaaaataaatatcaccgaatacacacagacctgcatgctgaccgtggaggcggcgatccttcaggcgttgcttgcagaaggaagaacaccggatgtggcggcaggattaagtctcggagagtacggggcactgctggcaagcggcgtgatggagcagagggatgcgtttgcgcttgtgagaaagcgcggcatctacatgcaggaggcggtgccggtcggcggcgcgatggcggcggtgttgggactggatgcggaaaaaatagagaagatctgtggacagactgctggcacggtatccattgcgaattacaactgcccgggacagatcgtgatcaccggggaggaagcggcagttgccgcggcaggtgaacagtgcaaagggagcggcgcgaagcgtgtggtgccgcttaaagtcagcggaccgtttcactcgcccatgctaaaagaggcgggagaaaagctgggagaggcgcttgcggcggtaacactccgggagataaagctgccgtatctggcgaatgtgacggcggactatgtccgggaggcggaggctgtgaagccactgctgaaacagcaggtgtgtgcaccggtacgctggcagcagtccgtggagcgtctgcttgcggatggtgtggatacgtttgtggagatcggcccgggtcatacactgagcggatttatgaaaaagatcttaaagcaggccgaagtcccggcagatactgtacaggtatacaatgtggaaaccatggatgacttcaaggaatatatgtcaaagtagaggagagagtcagatgctggaaggaaaggtagcgcttgtgaccggagcgggaagagggatcggcgcagcgatcgcagaaacacttgcaagggaaggtgcgtttgttgtcgtgaattaccgcggatcgggacaggcggcacaggaactggcggagaaaatcggcggagtcgccatgcagtgcgatgtggcggattttgaagcctgcgaaaacatgatcaaaacgatgatagagacgtatgggcatctcgatattttagtcaacaacgccggaatcacaagggacggtctgctgatgaagatgagcgaggcggattttgaagcggttctttcgacaaatctgaagggaacatttcatacgatacggcacgcgtcccgctattttttaaaacagcgttatggaagaattgtcaatatttcgtccgtgtccggtgtgatggggaatgccgggcaggcaaattacagtgcaagcaaggcgggggtgatcggactgacgaaaagtgtggcaagggaactggcgtcgcgggggatcacctgcaatgcggtggcacccggttttattgagaccgatatgacggatgccatgacagagagcgcaaaggaagccgttcaaaaacagattccactggggagatgcggaaatacaaaggatgtggcagaacttgtgacatttctggcatcagacaaggccgcgtatatcaccggtcaggtgatctctgtggacggcggcatgtgtatgtaagggagcagtaaatgaaagaaagtgaggcaggtatgagaagacgggttgtagtaaccggaatgggcgcgataacgccgatcgggaactctgtagaagaattttggaatgcggtgcgggaagaaaagacaggatttggggaaatcacgcattttgacgcatctggatataaatgccatctggcagcggaagtaaagaattttgacgggaaaaattatatggatcccaaggcggcaaaacgcatggaactgttttgccagtatgcggtggcggcaacgaaagaggccatcgcggatgccggacttgagatggagaaggaagacccgtatctggtgggaacagcgatcggaagcggcgtcggaagtctgcaggcgatcgaacgcgaatataagaagcttctggaaaagggaccgggacgtgtcaatccgcttctggtgccgatgatgatttccaacatggcagcaggcaacgtgtcgatccagtttggcttcaagggaaaaagcatcaacgatgtgacggcttgtgcgactggtaccaacacgatcggcgaggcgttccggagcatccagtatggggaagcggatgtcatgatcgcaggaggtacggagggcagcatttgtccgatcggaattgcaggatttacggcgctgacggcactgtcgtccgagaccgatccgaagcgatgctccctgccgtttgataaggagcggagcggatttgtcatgggagagggcgcaggaatcgttgtgctggaggagttagagcatgcaaagcggcgcggcgcaaagatttatgcagaggtagccggctacggatgttcctcagatgcctaccatattacatctccggcggaggacggtgcgggcgcggcgcgtgcgatggaaaatgccatgaaggatgcgggggtaaaaccggacgagattccatacatcaatgcacatggaacggcgacacatctgaatgatctgtttgagacgcgcgcaatcaggcttgcgtttggggaacatgccacgaagcttaaaatcaattccacaaaatcgatgatcggacatctgctcggggctgcgggcgccgtggagtttgtaacctgcgtcaaggaaatgcaggaaaattatgtgcacgcgaccgttggctaccagacaccggatgaggagctggatcttgactactgcagggaggcagtggcgatggaggtgccgtatgcactcagcaattcactcggattcggcgggcacaatgcgagtcttttacttaagagatatggaggcggggcgtgatggaactggacatcggacagatcatggagatccttccgcacagacagccgtttctgctgatcgatgcggtggaggaactggagcccggaaaacgcgcggtggcgcgaaaatgcgtcagctacaacgaaccttatttcggaggacatttcccgggggaaccggtgatgcccggggtactgattgtcgaggcactggcgcagaccggtgcggtggcgatcttaagcatggatgaaaatcgcggaaagaccgcgtattttgcggagatcaaccgtgccagatttaagaaaaaggtggtgccgggagatgtgctgactctgacaacggagattatccggcggaaagggccgatcggcatcggcagtgcgacggcaaccgtgcgcggggaggttgtctgcgcggcggaacttacgtttgcaatcggcagcaaggaggagtagagaaaaaatggcggctttgtttcagaagcggaaaaaagaatcggcagaaaaagcgccggtggaggcagtacaggcgctgcaggagacgattgtgtgcccggcctgcggcagggagatcaataaaaaggaagcggaaaaaaatctgtatgtctgctatgagtgcggcagttatttcagggtgcgcaccagaaaccgcatccgcatggtggcggatgcgggaacgtttaccccgtggttcgaggatctggcggaggcgaatccgctggagttcccgggatatgaggacaaagtaaaagcggcaaaggaaaagaccggactgcatgaggcggtcaccataggtcactgtaaaatatacggtgaggacacggtgcttggcatctgcgacgccagatttctgatgagcagcatggggcatgtgatgggggagaaaattgcctgtgcggtggaacgcgcgacagaggaaggtctgccggtcatcctgttttgctgctccggtggcgctagaatgcaggaggggatcgtttccctgatgcagatggcaaaaacatctgcggcattgaagcggcattcggaagcggggctattgtatattccggtgctgacagacccgacgaccgggggcgtgacggcaagttttgccatgcttggagacatcatcctggcggagccgggggcactgatcggttttgcgggaccgcgcgtgattgagcagacgatcggggaaaagctgccggaaggttttcagcgggcacagtttcagctggagcacggatttgttgacaggattgtggagaggaaggagctaaagcttaccctgtaccgcatcttaaagctgcatcacaaaaaagaaggttatgccaatttcgatccggtgcgggaggcagactgcctcgaggcgacagaactgatgaaagagcgcgccacaaaggcgaaagcattgtccgcgtgggagaaggtcaaggcagcgagaaaggtggaccggctggcgtctgtggactacatagagcagatttttgacgaatttatggaattacatggagaccggcagttccgggacgatccggcgattgtcggcggtgtggcgtatctggatggccagccagtcacagtgatcggtgtgcataagggaaaagatttaaaggaatgtatgcaccggaattatggaatgccgtcgccggagggatatcggaaagcactccggctgatgaagcaggcggaaaaatttaagcgtccggtcattacatttgtgaacacctccggcgccttctgcggcatggaggcggaggagcgcggacagggcgaggcgatcgcgagaaacctgtatgagatgtccggcttaaaggttccggttctttgcattatgatcggggaaggcggaagcggcggtgcgctggcactctctgttggaaatgaggtctggatgcttgagaatgcgacctacagcattttatcgccggaagggtttgcatcgattctctggaaggatggcagacgggcaaaagaagcgagtggcgtcatgaaaattaccgcgcaggatttaaaagcgctcggcgtgattgaggagatcataccggagtacggcatggcggatcagccggcactgatttccatatcgcgttacatgaagaggcatataaaaacatttttgaaaaaacagaacggaaaaaccggggatcagctcgctgcggagcgctatcagagattccgcgtgttttaaaaggaaggagacccgatatgaaggtaaagatcgtgggcaccggaagtgcagtccccgaaaaatgtgtgacgaacgatgatcttagtcaatggatggatacatcggatgagtggatcagaagccggacgggaattgagaccagacatctggctgtgagagagacaacgacagaaatggcagtggaggcggcgaagcgggcacttgcatctgcacatatggacgcggaggagctggatctgatcattgcggcgacgatcacgccggaccggctgctcccgaaccttgcctgcgaggtgcagagcgcactcggggcatgccgggcggtcgcctttgacgtcagtgccgcctgctcgggttttttatacgcgatggatattgcacgccactatctggaagccggcggaagccggcgggcgctggtaattggtgcggagacattgtcgcggatcatggactggagcgaccggagtacctgtgtgttgtttggggatggcgcaggtgcggcagtgctggaagcagatgaggcggaggagcatgcgggcatcttaagcaccgtgcttggaacggacggcgcgggcgggatggtattgcgctgtgacaaccgcagaaatcacaatccgtatgtgaagggcgacaccgcgctctcgtacgtgtccatgaacgggcaggaggtctataagtttgcggtgcgcacggtgccgaaagtaattgccggggcggtggaagcggcagggctttcgatggatgaaatcgattttttcctgctgcaccaggcgaaccttagaatcatcgaggcagtggcgaaacgcctgcatcagccgatggaaaaatttcccacaaatctgcagaagtatggaaatatttcctcggcgagcgtgccgattttacttgataatgtcaataatcatggtatgataggagaaggcagtaaaatagtactggcaggctttggagccggtcttacgtggggcgcagcagtgctccgctggcaggcggtgtaggcggtgtggtcgggaacagatactgctatgaacaggagtatgatacatgaccacggatgagacattgaacgaattactggtaaggctattcaaggatattatggagattgaggcgagatgtctggtgaatgaggaatttaaggacatcagctacaacgattttcatattatagaagccatcggattaaaggagccgaaaagcatgacggcggtggcaaagttgatggatgtcacgaccggtacgctgacgaaggcgatggatggcctgactgagaaggggtatgccgtaagagaacgcagcaagcaggacaaacgcgtggtgtgggtgtacctgacggacaaaggaaaagcggcatatgcgcatcacgaagagtttcaccgcaaaatgatcgccaacatcaagggacagctgaatgagcaggagacgccgattttgatctatacgctggcaaagctcgtggactattttcaagaggaatacggattggaggaggaatagacatatgagcagaggagcgttgggcaagaataactgggcgctgtttttaatgcttctggcaggaattatgctgggcggttttatcggaaatgctgctgcaggcgtttcgggacttagctggctgaattatgggcagagcttcggcttcgccagcccgattgtgctggatctgggcattctggtgatcacattcggattatcgatcaagattaccatcgccagcattatcggcgtgctgattgcgattattatttatcgcttgatttaagttcacaagaaatagaaaagcctcgggcaggggaaaactcctgcccgaggctttttgcgtatgtctgatgcggggacataaatcgttccggggacactatcctgctacaaagctttaacaatttagcggaataaagaaaaaaagattgcacatgaaaacattttatactaaaatgtatctgatgaaaatattgcagtgtatacacagcacaatatactaagagtaaggagacaaaaaaatgggatatgtagatgaagttcttgcaaaagtaaaagagaaaaatgcttccgagccagagttccttcaggcagttgaagaggtgctggagtctttaagaccggtgattgaggcaaatgaggaactgtataaaaagaatgcgattttagagcgcattacagagccggatcgtcaggtaatgttccgtgttccgtgggtagatgacaatggacaggttcaggtaaacagaggtttccgtgtacagttcaacaatgccattggaccatacaagggaggattaagacttcatccttctgtaaacttaagcatcatcaaattcttaggatttgagcaggtatttaagaattcacttacaacacttccgatcggcggcggcaagggtggttccgattttgacccgaagggcaagtctgacagagagatcatggcattctgccagagcttcatgacagagctttacaaatatatcggtgcagataccgacgtacctgccggagatatcggaacaggtgcaagagagatcggtttcttattcggccagtacaagagaatccgcggattatacgagggagttctcacgggtaagggacttacatacggcggttctctcgcacgtacacaggcaaccggatacggtctgttatacctgaccaacgcattgctgaaggatcacggcatcgacatcgcaggcaagacctgtgcagtttctggttccggtaatgttgcaatctatgcgattgaaaaagcacatcagttaggagcaaaggttgtgacctgctctgactctaccgggtggatctatgatccggaaggaatcgatgttgcattattaaaagaagtaaaagaggtaaaacgtgcgcgtcttaccgagtacgcggcagcaagaccttctgcagaatatcatgcaaagcagaatggtgagcacggtgtatggcagtacaaggtagatctggcacttccgtgtgcaacacagaacgagcttgacatcgaggatgcgaagatgctggttgcaaacggcgttacatctgttacagagggtgcgaacatgcctaccacactggaagctaccaaatatcttcaggcaaacggcgtattattcgtaggcggtaaagctgccaatgccggtggtgttgctacttctgcactggagatgagccagaactccgagagactttcctggacatttgaggaagtggatggaaagctcaagggcatcatggagaccatctacgcaaacatttcagatgctgcaaagagatacaatgcaaccgttggcggacagacagactacgttgcaggtgccaatattgccggatttgagaaggttgtagatgctatgttagcacagggtgtgtgctaatcaataaaaacgaaccccggaaattcaatgtttccggggttttattgtgcgtatttttacagtgagtgttcgtaagtttgagtaaaaatttgatagtaatatactggcaatatacttataatatacacgcaagatacaaacgattttgcataatatacgcataatatacttggttttttgcactgttttagaatatttatacagtaaaagggaggcatgacctcccttaaattttgttgacttcatcaataagctgttgtgtggttttatgtgtgtacactccctttgtgacattgtttttcatgctgtgacccattatgagtttgatgcaaacctcattcgctccggcatcatccatgagagatgcgaacgtgtgccggccatcatggggaagatgtttcatgttgagcttattcataactgtattgaaattcgcactaacataggaaccgtatgtgtagtgattgccatatttgttgtttaccagaaatctacggttggcattgtaccggttctttacgagaggcaggattttgtctgcaataggaataactctgtctgttccggcttctgttttcattcctccaatcatatattgttcgtccagatgcacattatccgtggttatctctaacagttcggtaggacgcagacctgtatagattgtaatgaggatgaggtcaacattgtttaccacatacagtttgctccacaaggttgcaatctcctcattcgtgtatctgctatgaatctgttcttccgggtttacccatgagtaaacaaaaaactgtgacagatctttttctatatagttgttcatcagggcgtacttgtacagattattgagaacggttcggatattagaaacggtggaatttgatttacaggtccatttgttgatacattcctggacttcatcagtccgcagagcattaaatttcttgtggtgcagatcggacagatgattaaaggcaatttcgtagtttctccatgtgtttgaagatattttgtccggcagagctttcctataatttttccacttcccgtacatctctgcaaatgtgggagtctcggcatatctgatgtgctccgcaacgacatccgcattattcaattcagataagtaagagtaggcgtgctcctgtttggcaaaatattcaaggtacttaaatgtctgacggtaggagatggaatactcatatccctcttcctgcataagatcctcagcgaatgacaacactggttccgatgagatggcagaccaaacctgttttctccattgccatttgaaattgtatcggacaaaatctctcagaatgtttgacggcggttctttcggagcatcaatttctacaaattcagaaatttcagaagttcggacggcataaggcttacgcctcttgccttttagtttgattacactaccgtaaccgtttggcagacgcataatatcatcctcctttttcctaaaaatgggcgtaaaaatgcccggtatattgtttttctaccgggaagatgatataatgcaaggtgttcagacgagcatacatcggctttccggtgtgtgtttatagataccgtctctgttggtagcagaggcggttttctattttagtatttctgtcggttttcaacgactctgccaatgattctcactggcttattctcaatttcctcatttgaatagaacataggctcataggtctgattaaaaggaatgagtctgattccactagggaactttgccaactttttgcaagtggcactgtctccattgactaacacaatgacaagatctcctgattctgcatagttctgtttgcggacaatcacaacatccccattgcagatacgaggttccattgaatctccctttatttttagagcgaagaaatctccggtatgagccaattcctctgatatttcctcataatctataacatcctcaatggcttcaataggtattccggcagccacattaccaagaaccggtatacgaattgctttcttagccattttcactttttcgggagaaaccgatactttcatattatcgtctaactgagaaaacaactcatcaaaactcataaacattccgtttgccgctttctttatagaggtcatagacggaacaggcggttctcctgttttcggattgagattattttcaagctgagatatgtaacctttactcaaaccactagctttcgcaaaactatccatgctcatgctattttcttctctatatgcccttattatctgccctaatgtcatacgaaaacctcctttcgatgtttagtccattatacaatgcactgtacaaaaagtcaatttttttgtaaaatgtgcttgacaataaatgtttagtcggctatactcaaattgttcagtcgagcaaacatcggacaaagaaaggaggcgcagtaatggcgtatcgaatcagagaacttagagaaaagaagaaacttacccaggaacagttagctcaaatgtctggcgtaagcagaacaaccatagttctgcttgaaaacaatgaagagcatgaggctatggtcggtactctgaaatcgttggcggcggctttgaatgtccctgtcagcaaactttttacccaaaaagtttagtcgagcaaacacgaaaaggataatccacaacgaactaaggcacagcaaaacgaacagattgaggtaagaagcaatgaacaatgagagagtgacaccaaaaaatgcagcgaaagagttgcaaatggatgtgattacgctccgtgaacttatgaaaagggagaaattgcctattggatatgccataaagcgagagggtaaatccaagtggggattttacatatatcgccaccttttggatcaggagaaagaacgacttggtataggttaagcatccgcaaggattgtttaatagatattttttgaggaaaggagacgcaccatgagaaaaggtacagttaaatggttcaacgccgcaaagggctatggtttcattacaggcgaagatggagttgacgtgttctgccatttcagcgcattgcagatggacggttacaagactctcgtagagggacagcccgtagaatttgatgttgttgacggaaccaagggaccgcaggcatccaacgtaacagtaattcagtagcggtttaggggtaaggcattgccgaaccccataaacagagaaaggaaaatccaccatgaagatttcaaaaatcacgataaagcaactcttcgggattaaggaatggcagggggacggaaagaacattgagcttgtcggagacaacggtactggaaaaacatccgttattgacgcaatcagatatgctcttacaaattcctccgaccgtgaatttatcgtaaaaaacggagagacagagggagagatttacatagaaacagataacggtctctccattgacagaaaagccagaacggcaatgacagattacaaatctgttaaacagaacggcaatgtaattccaagtcccgagtcgtttctgaaaacaatattcacaccgttgcagctttcccctatggagttcatctctatggataagaaaacccagaacgcaacgattttggatatgattcagtacgattggaaccttgacaccatcaaggaatggttcggggagattccgagggatgtaaattacgagcagaatatcttggctgtcctgaatgatattcaggcagagaacggttactactttatgcaccgtcaggatgtaaaccgtgatattcgtgcgaagaaagcagttatcgcagatatcggcagctcacttcctatcgactatgacggagagagatgggaaaaggaaaacctctcagacctctacacagagatcgagaagatccgcaagaacaacgagactattgaaaaggcaaaacgccttagagacagtcacgatggaaaaatccgctcattccaggcagacaaggaaattaagattgccgcacttgatacggaaatggctcagcaggaaaagaacattgagagtgagttggcacagcttgaagagagaataaaagccctcagagagaagaaagacggccttgctggcgtaaaagcggacaaggtaaaggtaattcagtcggagtatgatgcatccgtgtctaagtatgaagctgagcaggcatcctacgcagaatacgcagatatggaaaccacacctattgatgatcttatggaaaaagccaatgagactgagaaaatgaaaggtcatatcaatgagtggcgcagaatgttgaacatccagaaagaggttgatgagttgcagagtgagtcaaacagtctcacagagaagatcgaactggcaagaactcttccgggaaccattctggaaaccgcagagattccgattgagggtctgaccgttaaagacggaatacctcttatcaatggattgccggtaagcaatttgtcagagggagaaaaacttgacctctgcattgatgtggcaattcagaatccggcgggattacagatcatccttattgatggtactgagaaactgtctgaggaaaaccgcacacgtctctatgagaagtgcaaaaagaaagggttgcagttcatagcaaccagaaccacaagcaacaatgaattaacagttattgaactgtaggaggaaacactatggcaggaaagaatgataactttgacgcacttatggcaatgatggcactcaaacacattatggatgatacgaaagatattgaaatccatccattcacttgtgaagtgaccgtaacgcctacatcaatcagttgcagttcttctggaaataaggcatttctcgaagatattgacggtggaatggagtgggcggaggaaaccaacaacctcatcaaagatattatgtctgagcagacgataaaactcactgatttgatgaaaaagaaatttggtttcgataccgttaaagttaagccaaactccgaagatggttttgcggattttttgaaaaaccttttcggggggggtacagacgatagcgaataaaataaataatctgcctgccatagccttttcttggtaggcagattcataaaaatacaaggaggctatttatggcaacaaaagacacaaattatttagttgcagtccataaaggactggacgaaagccttgaaaaacaggttgcagctctgccggagaaattcaacaagcagagatttttacagaactgcatgacggttctgcaggacggacaggctgatttttcaaaatgtgaagcaccgactgttgtgcgaacactcttaaaaggagcgtttctcggtctcgattttttcaatggagagtgttacgcaattccttacggaaatcagtgtcagtttcagactgattacaagggagagatcaagctgtgcaagagatattcgagcaatcctattcaggacatttacgcaaaggtagtccgcgagggagatgagtttgaggaagtaattgaaaacggtaagcagtatgtcaatttcagacctaagactttttcaaacgcagagattatcggtgcatttgcggtagtcctctacaaagacggttccatgatgtacgacacaatgagcaaagaggacattgaacataccagacagacattctcaaaggcagcaaatagtaaggcttggaaagaaagttacggagagatgtgtaagaaaacagttctccgccgactgtgtaagttgattgaccttaactttgataccgcagaacagtgtcaggcatttgaagatggttcggcatttgatgttaaggaaaaaccgaaagagaagtaccaggcacaggacatttaccagtctcacgatcagagttctcataacgcagatgagagttctgatggtgtgattgacggaacattcaaggaagtagatgagtaatcttcttaaacttaccccggagaactattacaccaaagaagccaatatgcagtatgtgtccgtttctcagtacaaagagttcaacggcacgaccggaaaaatgggttgtgaagcatacgctatggcaaagctccggggagaagttgaggaagtaaccacaactgcgttaatggtaggctcctatgtggatgcctactttgagggtacacttcctacattttccgcacagcacccggaaatcttctcatccagaggtaaaaccgccggagagttgaaatccgaatacaaacaggcctcaattatgattgaccgtgccgtgaaagatccagttttcatgcagtacatggccggagataaacaggttattatgaccggagaaattgagggagttcctgtcaaaatcaaaattgacagtgcagacggcagacgaatcactgatctcaaaacagtaaagagcataacagaaaccttttacgcaaaggacctggggcagagactcaatttctgcgaatggtggggatatgatttgcaagctgccgtgtacagagagatttacagacagaatacaggtgatctcttgccgttttacatttgtgctgtcagcaaggataagacagacaacattcctcatccgagaatcaaggttattgaagttccaccgctgatgatggatgaaaaactggcagaggtcaaaaacaatatcgtgaaaatccaacgcattaaagatggagacattgagccacttagatgtgaggtatgcgattattgcgccgatactgagattctggatggtcctgtctccatggatatgctgatgggagagatttaatgaaagattcaatcgtaattgatatgaaatacgctgattacgatatgatagacggctcttacggtgttgagagacaccatttgatgggtggggcgaacaggaaccatgcagacgaggatggtctgtgggttcctttatcgccggaccatcacaattcaagtagaatgagtgttcatcacaacaaggaaatgaaagtaatgagccatatcattgcacagttggcgtatgagcttgaaatggtatctaccggacaagccaaggataaaaacgaggcaaaggaaatgtttcggagaagatacggaaaaacattcgtatagtaggcgatacgcttattataaataattctttagaaaggaagtgaaaacagtggcagagaaacttacattggcatccatgtgtgccggaggcgttcaggaacgtatcgacagagcgttagcgaaaatctcagataacattctggatttgaacactgatgcaaagaagaaacgtgtccttgatgtaaagatcactcttactcccaatgaggatgatagagaggatgtttccgttgaggttcagacttccgttaagttggctcctgagatgggactgaaaactcagttattcatcaacaaggacttccgtagcggcgtaacaaccctcacagaacacgcaaagggcgcaatcaaaggtcagcttactcttgatgagtgtggtatgtgcatggacccggaaaaggattccacaccgacagcagaggaacttggatgcgatcctgagaccggagaggtattggaagaaaaatctgaacctccaaaagagagcacgaaagtaatcagcatgagagacgcagtaaacagttaggaggcattatggttttcaaggaagcatacgaagctctcaaacagggagctatcgttaaactgccggaatggtctggctattg

SEQ ID NO: 784 - DNA, 33218 bp, unidentified
  source 1..33218: mol_type = unassigned DNA
ttcgtgatattaccataggccagtattatccggctcagtcgccaatacataaactggacccaagagtaaagcttttcgcaacacttatatatattattgcgctgttttcctacaagggaatagccggtgtgctgtttatagttgccgcgcttgccgcagttataaagatatcaaaggtgccctttaagttcatggtaaagggactcaaatccattataatactgctgctttttacagcatgcttcagcgtgtttttcacacagggagagtacacaatctgggagtacggtatactgcacatttctgacaccggactgataaatgcagcaaccatgatgatacgacttgtgctgctcattataggaacctcgctcatgacactcaccaccacaccaaaccagctcacggacggtcttgagaaatcactgggctttttaaacaaaatacatgttccggtgcatgcgatagccatgatgatgtcgatagcgcttcgttttattccaatccttattgaggagacggacaaaataatgaaagcacagatggcaagaggagctgattttgagcatggaaatatcataaaaagagcaaagagcatggtgcctcttttagtgccgcttttcgtatcggcattcaggcgtgcggatgacctcgcaatggccatggaggccagatgctacaatggtggagagggcaggacaaagatgaagccgctcgtatatgaaaaggacgataaaatagcatatcttttcatatttgcgtttttagcggttgtgatagtgcttagaatccttctgccggtgaatctgggcaatcttattttcagatagtgaaatagatagtgcaggtaaaacaggagagatatatgcgtgtaaaaatgattgtagcctacgatggcacaaattattgcggctggcagatacagccaaacggcataacaattgagcaggtattaaacgagcacctgagccgcctgttaaaggaggatataaaggtgacaggagcaagccgcaccgatgcgggagtgcattcacttggaaatgtgtgtatgtttgataccaatacccgcatgccggcggaaaagatatcgtatgcactgaatcagaagctgccggaggatatagtggtggtcgattcctgtgaggtaagcgatgattttcatccacgcttctcaaagagccgtaaaacctatgaataccgcattttaaatgcgaggttcagaaatccgacacgcaggcttgacacatatttctatcattatccgcttgacacagccaagatgagtgaggctgcaaaatatcttataggagagcatgattttgcaagcttctgctcggcaaactcgcaggcacagactacagtccgcacgatatatgactgtacggtgtcaaaggccggtgacatcatcacaatacgtgtgataggaaacggctttttgtacaatatggtgcgcataatcgcaggaacacttgtgaagataggtggaagcgatatgccggccgatgcgatgaagggcataatagccgcaacagacagggcagcagcaggtcccacagccccggcacatgggcttacaatgataggactggagtacgagtaacagctttagatttttaatattatattaagatttttggaatatccgtttttagcttcgataataggttataatgtcgttacggttaagacatggtacggtaaaaagaagcttggagatgaagatggttatgagatttacagaagttaaagagaaaattataaaaaacaaagccataaacagcacagacaaagtaaaaggcagacaccgtagagtgatccgtataggagcgtttgccctgatatttgtagtgctgttttcgtttgtctcgacattttttaagatgacggatgctgtcaatattgcgactatagagggcttttataaggagccgaaggactcaattgatgtgatgatgataggagccagcgaggtatacgctgattacagcgcaacagaggcctggaagaattatggatacacctcatactcgctgggggtatccggagcgcccggcagcctgtacaaatcaatgctcagggaagctctcaccagacagcatccgaaggttgtggtgtttgaggtgaatggctttttacaaaaagacagctactacgacaggacggtaaagctgcacagctggatagacaatatccacaatgaggaaaacaggcttgatacaataaaagagattgtgccaaagaatgagcaggacaactttacaaatcctttaaagctgtatcacagcaactggaaggatatagacaaatgtgcacacacctttgccacaagagttggaatgtattttgcaaaaacatcatgcatgaagggattttcatctattgcaaaatattccgattgtccatcaggcaagcagaaaaagctctactttaccgacaagagcagagcgtatatgactgatctgcttgagtattgtaaagcacagggggtggaaaaggtgctttttgcgaggttccctcatgagaagaaggtaaagaatccacaggtgctttgcgacgtgaaggagctggtggagtcttatggctatgattttgtgagctttgaaggcgataaggaacttatcggaatcaatgagagggatgatttctacaattcagagcacctgaatataaatggaagccgcaaattcactgcatatatgggaaaatatttgtctgataattacaggctaaatgcagaccactcaccggagcttcagagtgcatggggcgagtgcacaaggcgcgctgacaaggtgataagtgcctgcgcaaaggatacggatctgagtctgggcaatcattattttgagatgtccgtttatctgccttataatttttcgtcaagccttgcgacaaataaggtagcagatacgaacaacgatgcaaagcctgtaaaggagttaaataccccagttaaaaaatagcatgatagtgtatggaatttaaaataaatactgcctgttaattaaagtatggcggcagtattacattagaaaatagatttggagtaaataaaatggaactcatttcattaaaatatgcgatatttgtaatcgtattgcttgtactatattattgctttcctaagaaataccgctggtatgtgcttctggcgggaagcatggcatactatgtgattatatgtaagtggtatgtgctttttatcattttcacaatatgcaccacctatggctcgacaatatggattgacaagctgctaaaggagcagaatgccatcgtaaaaagccataaggaggactgggacaggcagaccagaaaggaatacaaggaaaagggcagaaaaaagagagtggcagtcatgctttttgcgctgctttgcaatttcggcatattggcattccttaaatatataccatatgcgggcgagcttggacttttgcttccgcttggcatatccttctacaccttccagtccatgggctatgtgatggacgtatacagggaaattgtcgagcctgaaaagaatttccttaaggtagcactgtttgtatcatttttccctcagatcatacagggaccgattgcgatatatgataagcttgcaaaccagctctacgagggacattctctgcgccttgaaaatctgcaaaagggtgcgcttctggtgctctggggagtcatgaaaaagcttgtgatagccgaccgtgcggtaaatatcatcaattttgtgatggataagccgatggaattttcaggcacctatgtattttttgcggcagtagtgtatgcgctgcagctatatgcggatttctcgggaggaatcgatatagtgcgcggtattgcggagatgtttggcataacgatgtcaacaaacttcaatcatccgtatttttcgcgctcgctcactgagtactggcaccgctggcatatgactcttggagactggtgcagaaactatattttctacccgctttcaatctcaaagcgtttcctgaactttggcaaatggctaaagccaagatttggtgcgcatatcagcaaggtgctgccgggctgcatcgcgagtgtcatcacatttatcgtcatcggagtatggcacggtgccaatatgaaatacctgtatttcggactctggaacggcattgtcatcatgcttgcagagctttttgctccggtaaacaaaaaggtggcaggcggcttttttaagctgaccggtctcaaggaaaagggcatatttgcaacgattgtatcagtgctctggacctttatgctcatactggtaggctactattttgacatagcggcaaatgcgtcgacagcatttcacatgctttttaaatcagtcacggatttccatatcagcgagcttggaataaacaacatcattttgaatctcggtgcatgcggactggacgaatacgatatacttttacttataatatgtacgctgctgtggttcttcatcagcttcgtagaggaaaataaaaagctcgacatgcgcgatttcatactttcaagaaagctgccgcttcgctgggcgataatatatcttggcatctttatagtaataatattcggttactacggaccgggagtgaatccggcggattttgtatatatgcagttttaaaataaaagtttaaagaaaaagctggaaataagggtaaaaagcacttgacaacagccggttacgcaagtataatatctaggtctgtaaaagtagataaatggaagccaaagccccggcaaccatttagtatagataatgatagtcatctgagatggaacagaggactataagatgtcaaaaaggaagtggcgtccggacatacgcgatttcaagagacatcggcattaaaagtaatcgaatcatttaaggaggaaaaccgatgaaaacatttatggctagtcctgctacaatcgacagaaaatggtacgtagtagacgctgaaggtaagacattaggacgtttagcatcagaagttgctaaagtattaagaggaaagaataaagcaatctttacaccacacattgacacaggtgattatgtaatcgttgtcaatgctgacaaggttaaggttactggtaagaaattagaccagaagatttactatcatcactcagattatatcggtggtatgaaagagacaacattaagagagatgatgaacaagcacccagagcgcgttatcgagtacgctgtaaagggaatgcttccaaagggacctcttggacgtcagatgtatacaaagttattcgtatacgctggaccagatcacaaacatgcagctcagaagcctgagacattagagttttaataggaggtaaagtaaattggctactacaaagtattacggaacaggaagaagaaaatcatctgttgctagagtatatttagtacctggaacaggaaagattacaatcaataaaagagatatcgatgagtaccttggtcttgagacattaaaggtagttgttcgccagccattagttgcaactgagacagttgacaagttcgacgttttagttaacgttcgtggtggtggatacacaggacaggccggagcaatccgtcacggaatcgctcgtgcactccttcaggtagattcagagtacagaccggttcttaagtctgctggattcttaacacgtgatccacgtatgaaagagcgtaagaaatacggtctcaaggcagctcgtagagcacctcagttcagcaagcgttaatcaaatcgatttacagcttacagaatgcgaaaaaagcccgaaaaatcaaggtttgatatgtacccagaatcctggacacatatttatgaactaggctgaacacatggatgctaccctgtattgtacaggcggcatccattttgtttttgcctgaattcttttgttattataataatctatatattctgcaaccgcttgtgaaaattcttcgaaagaagaatagtttttttcatagccataatacatttcattttttaatcgtccaaagaatgtctccataatacaattatcataacaattaccttttcgtgacatggattgtataatgccatgttcctgtaaagcatttctaaaataagcatgttgatactgccagccttgatctgaatgaaatatcaatccttcaactgaaggaaatttttcaaatgctttattcagcattctttttatctgttcaagattaggactcatggataaatcatatgagatgatttcatttgtattcatatctagcactggagaaatataacactttccccatgaaaaattgaactgtgatacatctgtggtctatttttgtaaaggcaaagttgtactgaaatccctgtctattatgttgtcagcaatcttaccaacttcacccttataagaatgatatttctcctttggtctttttccggctagacctgcttcatgcataagacgctgaactcttttatggttcacctgatacccgcgattaataagttcctggtgaacccgtcttacaccatacctgcgcttgttctcaacaaaaacactttttatttcttctagtatttcttgattgcgttcggcaataacatcgtttctgctaatctcaaaatagtaagtagatctagccatatgcattgctttaaggagatattttaattggtatccgttttctctgagttttttgatgattgctgctttttcgccttgagttgcgcagcccatttttcttgcctcaaggcgatccgtttttttattacttcattctcgactttgatatattcgttttcagctctcaagcgtatcagttcttctcgttctgattctgttaaaggtaatggatttgttgacttcttcattcttgattcctttgttggacgtccttttttactttctactaatccattatatccttgtgatttatatttgtatacccattgataaagcattcctgagttaatacctgcttctatggcaactttcctctttggtatgcctgcaataacttttaaaaccagttcaagtttttcttccggtgtccacactttattgaacaccttatgttttaaaacttctggaccatgtaaatcaaccaatccagaccattctcgtatatgtcttttgagagtatctggattcgaaccctctgggatatctggatacgaacctgaatgatacaattcaacacacatcagtttaaactcataactataacgcataaaaacaccctccttactggttgtccagtaaagagggtacatatcagttagttccgggatattttagctttgattattacgatgaagtctaataataactcacgaggacagagaacttgacggctaaaaaattcgcagagtattaaactctgcggacacacaaaaacactttattcgacataatgtgtttatattttacattttgattctaattttgtcaatctagtattcgctataatcgtagctttttttcgcgcaaagcttgctcaatgtataatatatcttcgcactagcatccattattggctgcgtatagcatcttacttttgtttgccgtcaaaatattagtcaggaggtgatctcatgccgagaaaaggcgaaaatatctacaaacgaaaagacggcagatgggaaggcagatatgtgaaaggtcgtgacggcaaaaaggcgatatacggttatgtatattcaaaatcatactctgaggtaaagaaacagctgatactgaaaagagccgagtacgccctggaaaataataagccgtcagtttcaacaatgaaagatgcactgttttctgacttatcggagatgtggctccgttccattcagtcatcagtgaaggaatcaacatggattaaatataggaacattttaaaatgcaatgttgtcccccggcttggaaataagaacttgagtgaaattgattattcagtagtatctactttttgtaataatctaatggaatccggcggtaaagaccagagtggactcgctgcaaagacggtagctgatgcactttctcttaccaaagctgtcattaaatatgcttcccgaatgaaatatgtgacagatcgtaccgccctggatgtatctgtgaaagtaaaaaacgcaccactaagggtgctgagtgttcaggagcagcagattttaattgccaatctagcggaagaattggatttcacggaattgggaatctatatctgcctgttcacaggtataagggttggagaattgtgtgcgctgacctgggatgatatttctcttgaaaataacatgatccatattcacaggacgatgcagcggatacaaacaccggacagtgaaaagaaaactgagattctgatagcagagcctaaaagccagtgttccatccgagacatccctatagagagctccttgcgcgaaaaactgattcagcaagcggtaaaggaaggatacgtgctaaccggaaataaaaacaaatatgttgagccacgcaccatgcagaaccgtttcaaagcaatcttggaacgatgcggtattcggaatgcccatttccatacacttcgccacacttttgctaccaggtgcatcgaggttggttttgacgtgaaaagcctgagtgaaattctggggcacgccaatgttagcatcacactgaaccgttatgtacacccatccatggagctaaaacagaagaatatggataaactttcagagttatttgccgtcaaataagccgtcagtattcagaataaatgcttagtttccaatgagaattaagctttttactgagagtttaatactctgcgaaaaaatggaacaggagggaatcaatctgtgaagattgcagtagcaggtgctggatatgttggcttgtcaaatgccttaattctagcaaaaaacaatgaagtgcttttagttgatccagatgcagaaaaagtcaaattgataaacggaggagaatcgccaatcgacgatgaaggaatccgtaattttttgcagaaaggaaacttccatttgagggcaacttcaaatgaaaatgaagcgtatgcagatgcttcatacgtaatagtagcagtaccaacaaattataaagaagagattgcaaaatttgacacctcaatagtcgaaagcgttattgaaaaagtttcccgaataaataaggatgcgataatcgttattaaatcgactgttcctgttggattcacaaaaacaatatctttaaaattcaatacttccaaagtcttcttctcaccagaatttttaagagagggccgagctttatttgactgtcagcatccaagcagaataatcattggagcattatgtgatgacagagaaatatctcataaaatagttgatttactgtgtgaatcgttggatagccgtccgcctattcagattatgggagctactgaggctgaagctgtaaagctattcgcaaatacctatttagcgatgagagtaagctattttaatgagttagatatttatgccgaagaaaaaggtctgaacgcaaaagacattatcgatggagtttgtttggatcctagaatcggaacgcattacaacaatcctagctttgggtatggtggctactgtcttccaaaggatacaaagcaattatgtgtaaattatcaagggatacctcaaaacctgatatctgcgattgttgattctaatgatacgcgcaaagattatatagtatcgaaaatattgcaacttaagccccgtactgttggcatctatagattaattatgaagagtcaaagcgataattttagagaagctagcattatggatataatgcgtaaattgaagctgaagggtatcaacataattatatatgagccaatacttaatggagtgtcatattgtgactatgaagtgacagatagtcttgttgctttagctgaaaagagcgatgtgattgttgctaatagggtaactaacgaattggagccttataaatcgaaggtatatagccgcgatttatttggtgaaaactagtatcaattatatgagagagaggtaatggtatggacttttcaattgtaattccaacctggaatcgttcgcatcttgtagatgcgttactcaaatccctttttgaagaaagaaatcgatatgatgacggtagaacagaggtaatcgtagtagatagtagtaccggagaagaaaaagaaagcatcgtttcatcatgtaaacagtatgatgcgagatatattgacggtgatgacagtgttagaaaaaaacgtaataagggaatcagagagtctcagtatgattatattctttttatagattcagacgtggttgttgaaaaaggtttgttgaatgaatatgtagatgcatataaaaagaataattttgtcagactgggtggggtgcttggctacacagagtttgtcggcaagaaaactttttggtggaagattttagagttaacatcgttagtcaattcgttttcctttgcacgtgattatccttttcattcttggactataggtaataatgtttcttttaaaaaatctgttcttgaagaaattgggatgtttgaggagaactttccatttaaactgggaggcgatgatctagatatgacataccgtgttacaaaagccggatatatgattggttctgctccaaatgcggtcacatatcattccagagaaacatggaataatttcaaggcaatacataatagagcaatgagatggggaacgatggagcgactcatttgcaatagacataaagagttatacaagagagtaataccaaagaactatatacttattctgttggcttttgttgttagtttaatagttggagttgtttctaagaattgggttccttctatttctgtaggactactagctgtttgggacatggtgtggtcttacattaagagagtgaaaacaaaaggtttttgcaatccgattcatttcttatgtgcaatgggaatacaaggcatgtatgaatattacagaataaagcaatcgttgaaagaaaagagtttaggagcattctattgtggtcaggtatttaatagatttcagattaaatatggaatgaaagatgactcaaagcgaatctgggatcttttactgtcctataccgtaatatttatgatcgtaaatatcatttgttttgtaattgagagggtgtaatcatgatgaatctgaatggaattagtatcgtaattgcgacaaaaggacgagttaagttgcttggtgaccttttggagagtgtatatactgctagatcaaattttaatggagattcggaagttattctggttgatgacagttccgaaaaagacgtaatagagattgaagcaatgtgcaaaaaatacgatgcacagagaattgaatttggtccttcggtagcagaaaagagaaatgtgggagctagaaatgctaaatatgatattgttctgtttctagactctgattgtattgcaacaccgaaccttttgaatgagcattataagttatatacagatgatcacgttggtggcgttgctggattacttgagtttgtcggtgaagatacatggttctggaaatcagtagaaaaatcgccttttgtcatttgttttggtttccctagatggatgcaggaagtcccatggactcctacagcgaactgctcagtacgaaaagagatatttgaaatggttggcggattcgaccgttctttcccagacaaaccgggcggggaagatgtagacatgggactccgaataaccaaaaagggatatgtatttaaatgcacaaaggatgggcttgtttatcacagcaagaagacatggattccagtaaaagcaatgtttaagagattgtggcattacggagcagcaaattattatcttgcagataaacatcccgattatgtgatgcgaattatgccaaggaaaacgatgctttatctggtgggaataattgctattctttttagttctataattaaaatgaatccaatgctgctttttatgattccagcatggcttgttgtagatatttctttaacatcgattttctttaatacatttgcaagctataaaagtacagatttcctccatcagtttgttgtgcagctgctaatccttgataacgaacttggatatgttgttaagtgcctccagaagggaaaaccgtcatatattgcaaacgatgtagtgtattttgatggtcagctcgatggccttttagataatggtgccattgcggtatggtgtaaccttgttagctttataatgctgtttgcttatttattcttgttgtaatactcaagaggataatgaatatgagaatattagtaacggggggagccggctttatcggctcccacttatgcagaagattattaaatgaaggtaatgacgtgatttgcgttgataacctttttactggctctaaagacaatatttctgatttgctgttgaatgagcgttttgagttttgttttcaggatgtaaccgagccgttagaatttttaaatattgatcagatttataaccttgcgtgtccagctagtccggtacattatcaatacaatccggtaaaaactattgaaataaatattatcggggcaattaatgtattaaatctggccaaaataaataatgcacgcgttttgcaggcgagtacgagcgaagtttacggggatccacttatgcatcctcagaaggagacgtattggggaaatgttaatccgataggtatccgctcatgctacgatgaggggaaaagagctgcagaaaccctgttctttgattatcatagacagtttggtgtgaatataaaagtggcaagaatttttaatacctatggcccgaacatgcaaaaaaatgatggtcgtgtggtatcgaattttattgttcaggcattagagggagagaacataaccatatatggggatggaaagcaaacacgtagtttttgttatgttagtgatcaagtagatggtctgatcaaactgatgaatagtgatgttaatgtgactggcccaatcaatatcggcaatccttgtgagttgacagtatctgagatagcgaactttattgtttctatgactgaatctacttcccaaatagtgtatcaagatcttccggcggatgatccacaaaaaagaaaaccagatatatctcttgcaaaagaaatcctggggtggaagccagtcgttgaactgactaatggcttgaatcagacaattgattattttagtaaaataataaattgcggatgaaacggagaaaaaaattatgtatgaaacagaattatctatactaaaaggtttatatcggaaaggaacatttgactcgcctttttacaggaaattagttaacgatgaaaactgtttcaatgattatgatagttttcaaaagattccatttatgcgtaaagagcatctgagaaatactactgtgatgcagagaacaacaacgccagtagatgatatatatggttttttttccagtagcgggacgacaggagcaaaaactttttatgcctatagcaacgaggataagaaaatacatgagctttttgttcgcagatttttcaattcgttaggaatttcaaataaggatattggtgcaataatggcccctgttgatactggcgttatggctcatactatgatgtggcaattcacaacgatgggagctagttacgtaaattgtccggaaccttcacctgagaacatgattgatacctgtgaaaatgtcccggtgacgacaattgcgacaaggcctagtgttgtatccggaataatgtacgatggagatttgtgccaaagagctaataaaagcaatgtcaataaattaatcttaggtggagggtatctatccgaagagagaagaaaacttttagagcatgtctggggagcaaattgctataaccttcttggaactagtgagatgtttggacctatggctgcggaatgcgctaaaaaagagggtctccattatccacaagaatacataatgatagaagttttagatccgattacttacaatccggttgcacccggaaattggggaatagctgtatatacatctctttggcataaaggttttcctcttttaaggtattggactgatgacttggttatgattatggaggaagcgtgtacgtgtggttgtggaatgccacgaatcaagcataaaggtcgttttttggattctataaaaatggatgatcgttatatttctcctgatgaaatcgaagatttgttgttctctgagggcgctatcggagaatggaaaatgataaaggaagataatgtgattacgttgctgacagaaactcaaaatgcgttcgatgaagatgttgttagaaatgaactgaaaaaattattgaaacatccggttcatattcagcggcttaatccatttgaactgaattttgatggccacgaatgtagatttgatggattttgaacaatgattgcattacattgaacggagatattactatggacaatttagttgctgaagcatttgatttttcaaaagcagtgtatgaagaaaagtttattgatccgggaaaacagggcgatatttggctagataattatttgccagtattatatgttctttacttaaaatacattgagcattattacaatgaattaaattacagtgacattgacaagatgtgtgatgaatttggaaacatagtcagtggtgggggtgaaataagtccagagttagcaaaagtcgtaggccatatgaaaataacgaatagagaattggataagattatccctcagatacgtcaaatgggagctgattatagcgatgcttgggcgatgtgcttttactatctgtatggacaaaacgtaaatgctgatggtgctgtgaaattacttcatgttgtcgaaaagataagtggttacaggaaaaatgtcgatccacgtgtgacaaataataaggatgtatttattagagttgctaatgatatcgcatcaattgtgaaaaagacaattctgggaaaaaatgaaagtatcgtttgtccggaaggatattttgtaggatttgggttgttttgtgtgaaatactatgtttcacattctgtagccattgatatcgcaaatcattatctgaatacttccgattatcgaggctatattagccagacctttattaagaatgttatccagtcgatataccataataatgcaaaggatgctacagattgttatacaatgtggaatcatttaaacaaagttttaaagagtattagcggtaatagtgttgaatcaagcaagcagttaattatggcactggttacgtttgttagcgccttacagattacagacgataaagagcagcaggaattagtgctgattttgaactcaaatatgagtaattatctgaactcgatttctattgatttccattgagaaaggtatgtgtatgcaacatttagattatctagagatgcatttgatgaattcttgtaatttgaaatgcaagggatgctctcatttttcaaacattgctactgacgaagatatagaggatatcagctgttttgaaaagaatattgaaagattgtcaaaggtgcaacctattatttataagataaggctcttgggaggcgagcctttcttgaatccgcagattttggactattgtagagtggtacgaagattctttcctcacacggatattcatatagtaacaaatggactgttaatcaaaaaaattgaaagtgtgattcttgaggctatttctgaattaaacatagtgatagatatttcgttatatcctccaacggaaggaatgctttcagaaataaaggcaaagcttcaggaatgtggattacaatatgaaataactccgccaattaccgaatttagaaagagaatggatttaagcggaactgcggatccgcaggaagcctatgacacttgtgttagcaaacaatgtcatttttatcataatggatatctttcggcttgtcctgcaccgtacgttataaagcattattgtcaaaagtttggaattgatgtacatgtttcggaacaggacaggatatcaatttggcaacaaaatttgaccagtgaaataattgtagaaaaaatgaattcatcaatggatatttgcagactgtgcaaagaacctgaagtttttcaatgggaagctggtaagaaggctatattagaagattggcttattgagaaataggtccgtctcaaagaaataacaggaggctatggtaatgaatgttctgcttgtaattcctaagtttggtgatgttgaaaatacagaagcattcattccaatagggactgcatatataaacgctgcaattcggcgagctggctttaatgtggatgctattaatctgaattaccgaactaaagaagaacttatggaaaaaatcaagttctgtgacgttattctgtgtggcggtacagcacatgattggttgaaactaagagaattatttagacttgcgcgaaatattaatccatcggttattactgtaggcggaggcgcgggctattcctcctccccgcttgtcttttcggaaatcacggaagttgattatgcggttataggtgaaggagagagaacgacctgcaatgtgcttagtgcgattgccacaggcgcatcaatagaagaagtcaaaggcgtagtttataagtattctgacaagtacatttatacaggtgctgcacccataatcggtgattttgatagtattccatttccgtcttatgaaggattagatattgatgagtattttgcacatcaacaaggaatgagaaaacgcaagatgggcgaaaagaactattttcaatttcagtatgagtatagtgatgaacctaaagaacttccgatgatgctaagtagatcatgtccgtttttatgcacgttttgctttcatacacttggaaacaagtacagaatgcgatcattagataactttttctcagaactcgatgaattaattgaaaaatatcagattaatggtatctatctgattgatgagttgtttggcctcaatgagaaaataataaccgcattttgtgaaagaatttctgaatataagatacgttggtttgctgaaataagaatagaaactgcttctcgttctgtattaaagaaaatgcaggaagcaggatgccagaatgttcaatttggtgttgaaaacatttgcgatgcgattttgcagaatatgaataagaagaccgataaaaacggcattgagatggcattaaaaaatgcatatgatgccggaatgattgtttcaggaaatatgcttgtcggggcagagaatgaaacgtgggatacatttatagagaattttgattggtggaatcataaccgccagtatgatttggctatgataaatattattcaatatcctggatcggcatatcataatcactgtttggcacgggggattatccaggatcaaaaagagtttattatggcgggtatgcccatattaaacatgtcaatgatgtcaaattccgagtgggataagatgaatagaatgattcgattgtcgcaaaaaaacaaagcctttcagggcgaaatatacagtattacgccagttgaagattcagaagatttgatggtttctacagaatgttcatattgtcaaaagaaatactcggttcgagaaacaagaagcgattggaaacagagtactaagtttgcttcaagctgtcctcattgtggaagaagaaatgttcatgataaaactgattatcgtcgagactttcagtatgaattactgcagcagtggatttcaaatatgattcagggcgaatccgttgttgattggttattggacgaaaaaatccatacagtaggtgtatggtgtaatggtgatcttggaacttctattattcagacattagctggagcaacgggaatagaccttacgtacattgttgacaagacaaatgatagacaattgcattttcactacagagatatacgttttgtcgatgaaatagagatgtgcagttataaagtagattgtcttgtggtttgcgaatctgctgagtttatcgctgagagaaagaaactcaggcagattggatataaaggaaaaataatttcatctgccgatttgatatttggacatgagttttatttgcaggacgcaatatatgaataatggaggagaaagtaagtatggaaggaaatatgtttgcacatatatatcaagctcgttcatcttctttcggaacgtcttatgagaaagaaatgaaagatattcgagaagaagtgatttcatgcatagaaaaagatagctgtccaactgcacctcgatttattatgtttaaggttattgatagatgtaattctggttgtatttactgcggatatgctaagcaaaatcatcctgaaacgtattttcaatcgccattggcattagatacagagaatttgatttcagtatttgatcaggctgagcaattaggcgttgatgctattgctttgaacggaggagaaccattacttcgaaaggatgtagttgaattaacggaagctctttgtcaaaggagaatattacctattttaatgacgaatggggtgctcttggaaaataagtgggatgcacttggcaatgcaggattaaagtatataatcatttctcttgactcattagtaccggaacattatgaatttcagcgaggaattaatttcacgtcagcaatgagaggggtggaagcagcactcaaaatgcgagaaaaatatggtgatgtgattattcatctcactacggtactaactcgttacaatttggaagatatgattccgttagttgaattctgcgataataataagatttggctcgaaatatctgtttatgatacatacggtatgacggaagataaactgtcagttacagacagtctccggctgaagcaggtagtggaaaagttgaaggaactaaaacagtgtggatcttatatttctagttcatatgagtatttagatcatctggaggagttctgtataaaacataatcgaattccacagaattattcatgtttttccggttatggaattttactaatggatgatacacttaatgcccgtccgtgttgggggagccaagttggaaatattggaaatattaaggaatgtacacttgctgaggtatggaataacacactgatgcagcattacagaaaggaaatgctttgcagccgctgtggaggctgttggaatttgtgtacagagtttaactcgatggttagaaaagtgtaatcaggaggtgaacattatgcctggtaaatatgaggtacttgctccagcggggtgtttagaagatgtaaaactaatgattagcgagaaggcggatgccatatatgttggattgcaaggctttagctcaagaccacaaaaagcagatttttatttaaacgatattaaagaggctgtatctttgtgtcgcaaatcagatgtgaaattatatgtggcaattaatgttaatgtagcacagtcggatatagaaagactgaaaaaagaaatattagttcttgatgattatcaggttgatgcagttattctttctgaattcggtttgatagctgatttgcaaggaaaactacagcacgcaaaggttcatgctagtacgttgcttggtgtatataatattgaaacagtgagacttcttagaaaactaggggtgacaagaatcattttttacgccaacctttatattgatgagatggcagcaatcataaatgccgttccagacctggaatatgaattggtagctgaaggaggaacttgttttaatgatataagacaatgtaagctgccacatggttttgaaaatggtgaacatatattgttctgcagaaaaggttttgaattacaatcttgtgacaatacttcttgccatgcaaaaccaatttcagagcatccaaccagaactgcagaaatcgtaggcatatatatggctatggggattacttctttcaaaatcgaaggaaggactgtagatggcagattacgagttcctatggtgagggatctgttgagtaatatagaacgtttcagtatggggatgccattgaaaagctatcttcattatttttcaagaacaaaccgggagatgagataatgaattatgttgctttagatcaatatacaaaagatgacattgttaaaatttctgatattccaagtatcgatggtgttgttctaggggatttgtattgcaataagagaatgttcgagttttctgaccatgaattaatcgattttgcaagattggctcgtggattaggaatacattgtgtgtatcagacacctcgatatcttacagaacgcaattttgaaagagtaatgcagttggttcagtatttacaaaaagaatgtctgatagagaaagttatagtgcaggatgttggtgctactagctatataagaaggatgtgccctgatcttccgattatctggggatatatgggcatatcaagaaatggggcagagaacttactaagctactctttcctcaggaataacggaataactgaaattgaaacagacagagtgacaagaattccatatttattggaattgggtcttgaggtattactcatgcaagagcatgttacatataaaaccgttaaccgagaatgctattacatgcacgaaaaagaaatatatgacagaaattgcaggagaatgtgtttgaaaagtacgtcagctttagttaatgaaaagtgtggatttgatttttctattgacggttatacgctaggcaaacaatatgagccattagatgagagagaattatcagcatgcaggtgtaacgataggattactcgagcattatcattggcagaactgttatgtagataaaaaattaggagtgaatggtcatggataagagtatgagaacggtactattgtgttcagcagaaagaagaagtcaagctgtcatactgttagaaaaatataaaggtcagatgccaattgaagttgtcttatccgtagagactataagcgaggatgattcagtagtaattgattgggattctcgacaaatgctgcgtaaaagttattcaaaattgcagaaagttaggaagctatttttcctgttcttgtcggcgttaattgatatcgatgacgagaacctgatttttaacatggaaaaaaatgccttggagcagcaggactggatgttgtgcaaaacaataaatgaggccaaaatagagatttctatgattaaacgagaaatcagactcaatagttatccaacggaaatacagttggagagcacagacatttgtaatgctaggtgcataatgtgtaatcatttttacaaaaatggaacacatccgttgaggcagcaatctgaaattgttcaaaaattgacaaatttattgccttatcttagaacagtctttttacatggaaacggcgaaccttttatggtacctaatataaaagattatctatctgtattttcaaaatataagattaaatttgcgaccaatagcaatctgtctattgtaaatatggatataatcgatgcattaagggaaaactttacagagctaaatgtatcatgtgatgctgctgataaagtgacatatgaatatatacgccaggggctttcttttgaagcatttgtagaaaactgcaaaatggttagagccgaatgtcctaatcttcatatgcgtatgatgtctattacaatgcgtcaaaacatccagagtctcccggacattgtgtcttttgctgcggaactagggtttaatgaaattgtgtttactgaattaagcacagacgttcgattagagaacgaagaagatactatgacgcattatccttttattgcaaaaaaatatcttcagaaagcaatttctaagggtattgaaaaagggatagttgtaagagttcctgagatacgaattgatgatgtccctgaaaatgcagaaagcgaattagttgagtttaatcgcacggaaattttcaaaaacaaggatgaactcgatgcattgcacagcagattatcagggaataatacatataaggaaaaagagtttgcagagtacgactttgaaaaactgccagatcttgtcgattgtacatttacaggtatttgcgattggtgtgttcaaagaccatatgtagatttggatggtaatgtgtcgatatgttgtattaaccaatatgtcagaataggaaatatatttgatgcgtcgtttgaggatatatggaatgggatgccgattcagcatattcgaagaatgttctatgaaggaaagctcccacatttttgttcaggctgtgagttccttattcaagggatgctagaatgtatttgcttagaagaaaaagatattacgttacagaataaaatacgaatgagtgaaaagtataaggatggtgtgcagatatgatttcagttgtaatgcccgtgtataacgaagaaaagaatattgtcgatactttgaatgcgctatttaacaatacagtgcttccagatgaagtgattgtcgcagatggtggatcttcggataatactgttgcacttataaaaaataagttcccacaggtattggttgtagataatccaaaacgaaatgcggcatcaggacgtaatgtgggtattaaacatgcaaagggagatattattgcatttacggatggtgattgcattgttcagaatgattggattgaaaagatatccgaggcatttgcaaagtatgatattgacgggcttggtggaaaggtggagatagctacgcctataaatcatattgaagaatactgggggaatctcgcatggaaactcattatgagttttggtgatgaaccatatattgttgatcaatgcaaacttaatgatgcttttgtaacggcgaattgtgcgtataagagaaagcttttggttaagctaaagggatttagcaattggtttgcaaataatgcggaagacgttgatctgtgttggcgagctatcaaatatggcgcaaaacttatgtacatcccagatgtatgtatttatgcacataacgttacaacggtaaaaggcgtggcaaagaagagttttagaaacggatattcaagcagtaagcttcagaaacgatacggaagcaaagtgaattttgatccgaatatttataaaatgttaggacacaatgttgtgggattggtcaaaagggaaaaggatgccggtcttaatattattgaattaggatgtcacttggctggtaaatattatggaagctttagagcacacgtaataaatatctaatagaggtgtactatgcaatatttggattatttggaaacacatataattaataaatgtaatttaaattgtaaaggatgttcacatttttcaaatatcgttgatgatgaagacgctccagtggatattactgtttttgaaaaagattttgctcgactcagcgaactgtttgatcatattttcactattagattaatggggggagaaccttttttaaatcctgacatgggaaaatatatagaaatagtgcgcaaatattttccaaagacggatcttaggattttaacaaacggactgctgattcccaaaactgaagatactatattaaatagtattgcggagaatggtgttgtattggacataagctgttatccagtaacagatagaattagggaccaaatagagagccgattgcaaatgtttggaatacagagtaatttttctgaattagtaattgattttcataagcggttaaacattcaaggaaatcatgatattcaagaaatgtacacgagctgtccgagtaaaatctgtacattcgttagcaacggaaaacttgctctttgcccagctccattcatgtcaaagtttttaaataagcgctttaatacacagattgatgttgagagtgatttgttggatttgtatgagccaggcataacagcagatagaataaaagaatacttaaaacggccaatgaaatcatgcggatattgttctgatcccgaagattttaaatgggaatgtggaaagaaaccgatgttggaagattggcttgttcaggaatcattggagaaatgtaaccatggaagtactctttgataatgagaaaagcgaaaatgcaaaaaaaataagtcgctatttggatagtatgaattctggaatggtggatttttacccaacttatatccagctggaacataccaacagatgcaatgcacaatgcataatgtgcaaccatagttacataggtaataatggggcgcaggatgtatcggaagaagtgatacaaaaaataaaagatatttttccatattgtcagataattatgctgaatggtgatggggaaccttttttatgtaagaatattgagcaatatctaaaattatatcggcaatacggtgttcgtgttggtacgaacactaatttatgtggaattaatacatctctactgaacaatattggtgaatatatagattatcttaatatatcttgtgatggatgtacaaaagaagtttttgaaggaattagaaaaggattaagctttgatcattttatagagaatctcagaattttgaattctgttgctcctaatctacgtaaaaacttagactgtgtaattatgactcaaaatattcttcaggctgtggatttagtaatatttgcagctgagtacggctttgcatccattaagtttaatatgttaggagtgaatccgtgtattggaaatgagcgggattcccttatacattatcctaatgtggcagccagttctttaaagttagctacagaagaagctgaacgactagggatagatatcgtgattcctggaatatttaataaagctgttgatgaaaaccgattggctttggagcttgatgaaatcaaaaagtatgattggtcaaccgttgatagaagaattatggttagtaagagtagattttcatctgcatcattgaccggagattacttaaatcagctagtcacgctagattcacttactaatgatagtatatgtgcacctgagatttgtcagtgggccatagaacgatgttatatagatttggcgggtaatgtatcgacctgttgctacaacgtgcatcattatatgggcaatattcttgaagtggagaattttgatgaaatatggaatgggatgacatatcaaaacttcagaatgaatatgaaaaatggtgttttacctagttggtgtaaggattgtggttattattggagtaaggtgaaaacaaactttgctggagtgaggtgaacggaacaacatgaacatagcaatattgagtgacaaaatcacaattgctcgaattcagatggaagtgcgatccatgtactatggctttatttgcaatgataaagaaatcttctttgtagatatatatgatgagaatattaaaaaagatatggtaatagtcgattataattatattgatgaatactggacaagtattccggttccatctgcgaaattattattatatttaaacggttttatcttcaatccatatgacaaaactgggattgaggagtttgagaaaactttaatagagaatgaacgatgggatatattacgtgcaattaataaagcaaagatccatttaaatgtgctgcataaaaaattgattttggatacaaaaccaacatttttgcaattagagattactaattactgtaatgcaaaatgcataatgtgtccgcatatataccagggcaatgcgggcgcaaagcatttgagtaaagatacatttagtcgtttggaggaattgcttccatacattgaagtggcggttcttcatggaaatggagaaccgtttatgaatccaaatttcgaggaatacttgaaagaatatcggaggtatggaatcgctatttcggcatgcaccaatctttcaatatttgattcacaaatagcaaccatagttgacaactgctttgacgacatacgtgtttcgtgtgatgcatgctcgaaagaaatctatgaaaaaatacgaacgggactttcgtttgatcaatttgtccaaaatttaggaatcttgaaaacatgctgtcataatgtgaagaaaattttaacttttgttgttatgcgccaaaatatttctcagattaccgctatggtggactttgctgcaaaatatggttttgatgaaataatttattccaatatgttacctagcattgctttaggaaacgaggatgattccccaatacattataaggcagctgtgaagtatcagttagaaattgctgaggttaaagcaaaagtaatgggtgtgcatatcacctaccccaatacttatgttgaagtcataggcgataatacagcagaggtagatgaaagtttccgttcagatgaagaatggagaatgcaaatagcacagatccatgaagcatttaatggaaaacaacgaccaatagatgatcttgatcattgtttatggacccaggacaaaatctcatgcataggaatttgtgattggttggttgaaaagacatacattgatatcgatggaaatgtttttttgtgttgtattaattcgacatatcgaataggcaatattaatgacgaatctttccatactatctggaataaagaaagcatgcaagaaataagggattatttttataaaggaaatcttcctgacttttgtcatggatgtcaatttgtgttgaatgatagcttgaaatatttaagatgcacggatacaaatgatgcattcatgagaaaatcgatgattcgtaattaatgtgtgagatgaatagaatgaatgaacataaaaaaagaaaatataagttacctggtatttttataggaatcgttgcgattagcgttgcccttggtgcagtattagttttggatatggggaatatttcaggagggttcacgccgcagaatttgaagttggcaaatgtgaattatgataagtatggtgtggtggctaccattattattagcatgggggtgttcattactacatatttggtgcaagatttttcaaaagaacaaaagtatcaagatgattcttttgaagctatgaaactagtactagaattgatgaagaattcatatctgacacttgagaaaagcgatgaagattttcttttggagttggggagactaaaaaagcgtaatgttgaatgcacactatcagacaatgaaatacatttctttcagacatacctgtttaacaattacgataaggtgattaatagatatgcagcttctggattactccccactgttttgattgaaaaatatattcgacataagatactgtttggtaaatttgttgttcaatatattagagacgacaaaatatacttgaaaacagctgatttaataagaaaacagttactagaaagcttaaatatcgttcgagacggaacaacttgttctgaacgcaagaaaacaatagatgaaattgtacaagaaataacaggaaatacaaaaataccagagcgttaggaggtaaagatgtattatacaaaagagcagattattgaaataatgagggactggttacctgttttgagatcttccgttaatgtgacacaggctgatctgtgcgcagcaataggaatatcacgacaaacatattctgctatagaaataggaaaaaaggaaatgtcatggacggtttttctggcattgttcatgtattttatagctaattcacgatctaggactttggtgcgaaaaaaagaaaactatgttgcttcggtattccattatctcggggcaggtgtcgaagatgttcaaaactttggaatggaataatcggttagtacagttaataatgtatatgtatttgaggtgattatcatggaagatgaattgatattagtgaatatttttgatgaagaagttggatcctgtccgaaactattaactcatcaacaaggcatattgcatagagcattttctgtgtttgtagttcatgatggaaggatgctattgcagaaacgcaattctgaaaagtatcattcaggtggtttatggacaaatgcatgctgttcacatcctagaaaaggggaaatattatctgatgccgtatcacgccgcttattggatgagttgggggtgaagttccctgtccaggaatattttgacttcgtttatcgtgcagaatttgcaaatggaataacagaatatgaatacgatcatgtgttgttagctgattattgtggagatattcgacctaatactgaagagatagaagaactacgttgggttgattttggagaactgaaagaagaattgactaaaaacccggaacattttacggcatggtttattattgcagcacctaaagtcttaaaaagattaagcgaggaaattaagaaatgaaaaaattattcagttatattcgtctttctgagtggtatgattctaaagtcccgttgatgatgggggcactcatgtacttttattatttggatatgcaacagtatagtgcggaacagtttctggtcagatttatcgcatatatgctttatatatccatgttccttgcatttagctacgttatcaatgatttttcagacattgaagttgatagaaaagctggaaaacataaaataatcagtgaattatcgacaaccgttatcattatatctatggtattaatggtggctattggaatcattcctttattactcctcatacaaaatgtaattggttatttattactgacagcctttatttatcttgctggcgcagcatattcgattcatctttttcgttttaaggaaaagggggtaattggtttgcttgagtgttcaattgctcaaagatgttttccattactacctttgtttttcatcgtaaaagtaccgatggtattcttttggatttttcagttgatatcatttgttaatggcatcagatatctactgattcatcagaatattgattatgagaatgatttaaagagcggagtgatcactctggcaacaagtgggagaataaattacaagttattaatcaaactgtcattggcgatagagacagttttggttgttgctttatttatccagatttcgttgatatcaaagcttggaatcgcaataggtgttttctatctgatatttgaatggcttattggaactgttgttgtgaaatatatcaaggcagattggcttggaagctttatatgcgttccgtttgaggatttgtacaacatcataattccggtttttcttgcagcactcctggcaataaagaactctcttttgattattgcagtaatgttgcttgtatttatcacttggaatagttttaagggaaagtgggcgttcataaaaatctttcttcagataaagtttaaacgaaaataatccggctttttctagcattgtgccgttgtttgatttttattgagctagtccaccttggaatgaatgaacataacagagaggaggagaatggcatacgtttgaaagaatcaaggcacgtgttgttttttccgtaattgctcaacctcgaaaatataatgttttgaagataaacacaacgtgcactaatgaaagtgattttaagtataaagaactgaaattagaatatgaaggtaacgaattgcatggatattattttgaaaatgaggataaaaaggaaaagacgatagctttcttatgtcatggctacggaagtggtgcaaaagacatggtgccatatgcaaaaaattttctggagaaaggatatgaggtttttattccggatcttcgtggacacgcgcagagtaaagggcaatattctggattaggtgtcaatgacgttagagatatagacgcatggatggaattaatcgaccaagagaatacgaaaacaaaaattatatttggagcatctatgggaggtacgattgctttaagatctgccattcagctttcagcaaaccgaaagattaaaggagtcatagttgattctgttcctattgacttttggaaaatagtcgaatgcgtttattcatggaaaatgaaaggatcattaaatcaaattaagagtcatctcaattctattatgagaagagaattgcattttgatttggatgatttgaatcttatgtcgatactgaataaaatgaaggttcccgttctgttcatacatggtaaaaatgatggattggtggattatatggatacacaaagagggtttgaaaaaattctagctccaaaagaattcctactagcagaagaaagtgatcatctgggagctttgtacgaacttggagatgaatactggaaatgtatagatagttttattgcaatgattgaatccaccggagagtaatctgtagatagtttgagtttataaatattcaagatataaggagtgaatgacaaatgaatatcaatattgaaccatatatcagtgttgttccgagagtattccatacgggtgagtcccagaaaataactattaaatcaaaacatgattttgttcatttaaagggtgtatatagtgtgtcaattcttccgcgctacgagtaccagtataatagtgaactgggaacagctcattatgattctttcgatgtggaggctgttaataacgaactatcattttattatgagtttggagttgaacaagaatataacatatttgtcgagcctcatgataaaacagggagaaatgtacaaggagtgaagacttctgtatacgcactagatagtgacctatatggcaaaaaggtgatgaagggagatctccatttacataccacattctcagatggccttgaaacaccggaacatcgtgctgtagtagctagaaaaaatggcttcgattttattgcgattaccgaccataataattatttgggcagcatccatttacgtgaaaaaatggacagatgcaaaacaaacatgatatttatcagaggggaggaagttcacgccgccaagtgcccggttcacatcttgtcattaggggcgaataaagcaatagctcctcaggtaactgaaattactgatgaacaaaaacaaatattgttagatttggttgatctctattcggggaaagtagatgaaaaagtagatatcagggctttcgtagcagctatggatgtttttaataaaatcaaagatgctggaggtgtaagcgtactctgccatatttattgggatgcagtagataccatgcaccataacagaatgggtgccccagagcaacttataaatgcccttgttaatgaatgcaagttcgatgcatttgaaatcacatcgggcgcacctgaaagtgaccttaaagctaattacttgcaagaaatatattatagagaaaaattgcctatgaacttcccaataataggaataactgattctcatacaacattagaagctatgacgatattcgggaaaaactatactattgcatttacagatgatcgaagtgagatgggtgtcttgaatgctttacgccagggccttacagtttcagtagatggagtgggaagtaatgtgatatgccatgggtcacttcgcttggttaagtatgcatcatttttaagagaaagattctatcaaagacatgatgaattagctagattggaagctctattgatggagcgagttctcaatgaaaactacgattatatttcacttgttgaaaccgtatgtgatgataataatatgctcatgaacgaggaatggaaagtaattatgtaagaaattaaggagcaaaagcaatgtcaattccgttcttgtattggttatagtaagcaaaatgtattttcatagtagtagtcctttctttgttaaagtaatgagtagttctgggaatgtgtgggcagttaaccgcatacaacacatatgcaacactgtcatacacaaagcccctatttctgggcttttcttgttatcaaaacgttaacaaagagataattacaaagaatatcaaaagaacatcaaaacccttggaaatccagtattttcaagggttttctttatgtctgaatttggagaaagaaaatatataaatatagaaaacctttgattcctgtattagcgggtccaaatggcttgtaaaaatacatatattgtgataacgtaagggcgtatgaatgtcagcggtttttgaagacaggcattacaaataatgaataagaggcagcaaaatggattttgaaagcagaagacaaagaattttagacaagatggaggacaattctatagcaatattgtactcaggcatcgagcaccatgtgagtgcagatgagtatgatttatttacagcacaggctaaccgcaatttcttctatctgaccggacttagacgtgacaacatggtccttgtcctggataaatgtgtagagcctgctaggacgatgctcttcatagaggaggcagaccctacgatggagcgctggtacggcagaaaggtgactatggaggaagccgaggaaatatcaggaattgatgagatagaatatatttatgagcttgagagcacactggacaggataatgacgggtgaggatgtatacacagcatattttgacacgtatcgtcatcagaaggtggatttgccggattacaatgtggtaaaagccaatgaatttaagacagattatccgggagttgctgtgaagaatcttttcccgcttgtggcagaggagcgtatgcagaaggatgaggatgagattgagctgacccaaaaggcaatcgctctcacaagggacggactctgcaatgtaatggctaatttaaagccgggcatgaaggaatatcaggcacaggcagactttgaatatataataagacgcggtggggcagagtggacagcttttcctacaattgccggaagcggaatgaatggaacgatgcttcactatgacacaaatcgtgagacgatggaggatggaacactggtgcttcttgaccttggagccagaatagatggctacaattcggatattacgagaacatatccggtaaatggcaggtttaccgagcgccagaaacaggtttatgatatcgtgctcgccgcaaaccgaaagattgtcgaggctgcaaagccgggaatgactacaaaggaattaaatgaagtatgtaaggatgtgcttgcagacgggcttatgaaacttggactgataaagaattctgtagaaatttctaagtattacatgcatggcgtgtcacaccatctgggaattgatgtgcatgacgtgacagttgactcaaacagcaggcttcgtccgggagcaatcatcagtgacgagccgggactgtatatagatgaatgggaaatcggtatcaggattgaggatgatgt

SEQ ID NO: 785 - DNA, 9665 bp, unidentified
  source 1..9665: mol_type = unassigned DNA
atgtgtggaattattggatttacaggtaaattaaaagcccaggatgtcttattgacaggacttgcaagccttgagtaccgtggatatgacagtgcgggaattgcgtactttaaagataccggaaaaatttcacttcggaaaactgtcggaaaagtaaaagatcttcgtgccatctgcgatgatgataacaattctacgtgtggaatcggccacacccgctgggcaacccatggtggcgttaccaatgccaatgcacaccctcataaggtcggacaggttgcattgatccacaatggtatcatcgagaactatcatgatctcgccaccaaatacgatctgacggatgaactgatttccgagacggataccgaagttgccgccgcattgatcaataaactctacgaaggagatccaaaagaagctctgcgcaaagcagtagccgaaattgaaggttcctttgccttctgcgttctgttcaaggatcatccgggtgaaatttatgcggtaagaaatgtcagccctatggttgcaacatactgtgatgacggtgcttttattgcatctgacctgactgcttttatcgcatacaacaagcgttatttcatcgtgccggaatatcatattttaactatgactgcggacggcattacgttagaagatttagacggtcattccgtagaaccggaatatatggaagtaaactgggatgttaccgcagcccagaaagatggttatccgcatttcatgatcaaagaaattcatgaacagccggctgccatcacaagaaccattaccccacgtatcaaagatatgcttccggatttttcggaagatgccattgcggattccttctttgaaaatgtaagcgacattacgatcgttgcctgtggtactgcaatgtacgcgggaatggtaggaaaaacaatgatccagaaccgcctgcatattccggttaccgtggcaatcgcatcggagttccgctatgaagaacctgtaatcaatgaaaaatccatggtgatcgtcgtatcccagtccggagaaaccattgatactttggaagctcttcgccttgcaaataaatatacaaagaaaacactgtctattgtaaatgtaaaaggctccagcattgcacgtgaaagcagctatgtattatatacacatgccggtccggaaatcgctgttgcaagtacaaaagcatacaccgttcaggttgcttctttttacctgcttgcatgcaaacttgccatgaaacagcaaaagatttctgtcgaagaagcacgtacatttattggaacactgcaggaaattccaaattacatcgaggaagttcttgcacaggctcctgatattgaacagctgaccaaacgcatgatcaatgccaacaacgcgttctttatcggtcgtggactcgattataccctttgcatggaaggtgctttgaaattaaaggaaatttcttatattcatgccgaagcctatgctgccggtgaattaaaacacggaaccattgccctggtcagtgaaggggttcctgtcattgccgctgctacccagaaacatgtatacagcaaagttatttccaatatccgggaagtaaaagcccgtggtgcttatgtcattcttttgtccaaagacaaagaaatcacagatccttctatctgtgatgtacacatcaatcttccggatgtatccgacgaatttacgatttttgaatctgttgtaattttccagctgattgcatattacacatccgttggaaaaggcttaaatccggatcagccacgtaacctggcaaaatctgtaacggtagaataaaaaaaactgtcgcgcgaaaattcgtgcgacagtttttttgacatagagcctttctaaaacttttgaaggcaaaaaaagaaccccagaagctctctaaaagcctctgaggttgcccctgccaaggattctctcacccatgtaccggaatccttgtttcatcggcgcgacaggatttgaacctgcgacctctgcgtcccgaacgcagcgctctaccaagctgagccacgcgccgtttcaactgcccaattatagtaacacattctccggtgtttgtctagtgaatttttttaatttatggtacaatacaaaaaaagaacggagaagaacaatgaaacatactgctttaattacaggtgcatcccgtggaatcggtgcagccctggcatgtcgatttgccgctgaaggctatcatctggctctttgctgccataactcttatgaaacgctgcaggcacttgccacaaaacttgaaacaacctactccatacaggtgctttgcttccgtggtgatgtaggagactatacttttatctgtgacatggtgcaaaaaacactggataccttcggccagattgatgtgttaatcaacaatgccggcatctcttatatcggtctgctcaccgacatggatattaccgactggaaccggattattgcgacaaacctcacatccgtcttttccacctgcagacaggtcatcccctccatggttcatgccaaatccggacatatcatcaatatttcttctgtatggggaaatgtcggagcttcctgcgaagttgcctattctgcatgcaaaggcgggatcaattcccttacacgcgctttgggcaaagaacttgcccctagcaatatccaggtaaatgccatcgcctgtggggtaatcgatacggatatgaaccgttgtttctccgaggaagaacgctctgcactcatcgaagaaattcctgccggccgtatgggatccccggaagaagttgcttcactggcatattctcttgccacagcaagcagttacctgaatggacagattctcaccttagacggtggatggatttaatttcttatctctttggaaatctttttccatttatttaagaattaaaacgcaatacgcgttttctctgttttttatatcaactttctataaaatcatttgtatgaaaacgaatgataaaaataaatacaaagattttggtgaccgtctgagtctgattatgtataaacaaaatatttccaatatccagctggcaaatgcaatgtttgtttcgccgtccacgatcagcggataccgtaccggtcgtcgttctccgaccgttgcggatcttgcagccatcgtgcagattctgaatgtttctgcagattacctcatcggaaccagtgaaattacaaccagacccgataccaccgaaaaaaagagttgagcacgccctgtttccagagcggtgctcaactcttttttataaatcatgttctgccagtaaaattaccgtagaacgttccggaacacgcacacgtgtctgatctccctgtgtctgggcttcaaaatctgccccatcctggtattcacagaaagtatttactacaagtttccaatgataagactccggcaacgaaggcaggcgcatctccaaaggctcccaatacgcattcattccgtaaaagatcatatcatcatccgtatcatcggcatttcttcccgcatacatgattccaattaaatgtgtattatagtccgtataattccggttcggctctccgttatggatacttacggaaggtaacccgcagactgccggctttgtatcccttcgcagaatcggatgctttgcacggaaatggatcataaaacgggcaaaatcatgaatctcctgaaattcttccagtctgttccagtccagccaggaaataatattatcctggcagtatgcgttgttatttccatactgcgtattacaaaattcatcccctgcaaaaaacatagccggtccacggctgcataacaacgcggcaaatgcattcttcacgagtctgcgtcgcaggctcataaccgccggatcatccgtctcaccttccaccccgcagttccagctcaggccgttgttatccccgtccgtattgttccatccgtttttctcattatgcttttcattatatgaatacagatcatacaacgtgaacccatcatgacaggtcagaaaattgacggatgcactatatccgcggcttgccggatcatacatgtcggaggatccggtgatacgtgtaattgcacgccctgcgacgccactgtcgccctttaaaaagcttctcatatcatcacggtatcttccgttccattcggcccagcggttccatgacggaaaacttccaacctgatacaagccacccgcatcccaggcttctgcgatcagcttcatatcccccagaatagagtcaaatgcaagggcttccagaatcggcggattctccatcggtgcaccattctgatctcttcccagaatcgatgccagatcaaaccggaatccatccacacggtactctactgcccagtgccgcagacaatccgtaataaacctccgaaccaccggatggttgcagtttaagacattgccacagccgctgaaattataataatatccatccggtgtaagcatataataaatattgttatcaatccccttaaagcaaaaacatggaccgtcttcatttccctctgccgtatggttgaataccacatcaagaatgacttcaattccattttctttcagttcgcggatcagacgctttaattcatcaccctcatgattatgctcctgatgaaatgcataacttgtattcggggcaaaaaaggaaaccgtattatagccccagtaattgtacaactgcacgccatccaccacacgggcactttccatttcatcaaattcaaaaatcggcatgagttctaccgcattgattcccagatctttcaaatacggaattttctgtcgcagaccttcaaatgttcccccaccttttacaccggaggacgcatctttggtaaatcccctgacatgcatctcatagatcaccagatcttcaaatttgtaattcagattccgataccgcccccagtcaaaatcactttgcaccacacgggctttatagacaaaatcctttccgccttccggtttttctccccagtttctctgaccggtaacagctttcgcatatggatcaagaagcgtatgttttctgttaaacagtaaccctctcgcctgatcggcaggaccgtccatctgataggcatactcaaaatcctctgcttttaagccaaaaacaaggatagaatacgtatttccaattttataactttccggaatgcggattcttgcatacggttcctgtgccgccggccggaataacagcaggacacagctcgtagctccatgggagcttacggtaaaacttaccccttcctctgtctgatatgcaccattcatctgataaaatcccggacgtacatcaaatccaccgatattatcgagtggatgaatgacttccccgagactttccatttcttcgtctatcggccagcttttctgttttgacggataattccaaaaacttgcattcatgtgctgattcctcttatcattattatttacttgccacataaaattatattatccccctactcttccctgatgattaccctgccatttgcgtcaaatccgattttactgtacttttccgaatactcattcatatgatcaataatcgtctgttttctgtcgccttttgctatggcaggctgaaaattatttctttctgatgtggaagaaatgctgcatggtatcatatcggctgatatatctgtctgcagtaccccatccacaaaggtaaaggtctgttcatagatcgccgtatctttgtcttttggattcctgttccccccaaagcagaaatttccaagactgtagcagatcatttttccgttgtataattccattccctgcaatacatgaggatgtgtaccgaccagcagatctgctccccagtcaatcacctggtgtgccagcttctgctgataatcattcggataatgatccccctctatcccccagtggcaacaggcaattaccagatccgctccttcttcccgaagttctgcaatcccatcccggatataattggcatgtgtttcatcagcggacagctggcttgcggagacaattccgattttgataccatccttcgtggtataggtatccacatgatcattgaatccgaagataatccctgctttatttaacacttctctggtatcatcaagtccctgctgcccataatcaaacgtatgattatttcccagacttgccccctccacagaactgtctgtcataataccaacatactccggttttccttttaagttccacgttttttccacacgctcggtcgcatttgacaacacacattccagattgatcagtgtaaaatcatcctgctcaaaaatacttctgatatttttaaaaaaataatcctgcccgtatttatcatagtattcatgaaaggaacctgcatacccatgcgtctgtgttgccccaagcgtacagtcacctgtcgccgtaatttttaccgtctgtatcaccggttcctgctgcgtttcagttgcagtcccggtttccgtttcttccagcgtacccggttcttccgtcatctgtgtctccgtgattttttccgtagaagagggcaaagccgatgacgttgctgcaggagaagaacatcccgtcagcaaaaatcctgccattaggattggcaatatccattttttcatacgttttcagactcctctttcacaagaatatccaccgtgtgaccgcttgcacccataagatccatccgttcacaggttgccagatgatactgcagaaacgcatcaaactcttcttccgtcagcgcatttaaaaacggacgcatataatttgctgcaccgtctgccgctatgatctgccggcgcctgacctctacctgccggtccaatgcttcaatatcttccagacgaaccatggaatacaaaggattggcttttgaagtacaatgataatccgctgtgagcattccctccttaagcgcctccagaatatgtttttccttaaacgcatacgtgataacggaaaattcattcataatatacgccacgagaatcctgcctccgggtctggtcaccctcaccgcctcccgcagcgcagcaagcttgtccttttcctcatgcagatgatacatcggcccaaacaacagggttacgtcaaaggaatcatcggaaaattttttcagattcattgcatttccctgatatgcatgcacgcctgcacccttctgtttcaggcgtcccagattatgctttaccagttccacggccgtcacatcgaacccttcctgtgccagcggtacgctgtatcgtccggttcccgccccgatatcaaggatatgaatttcctcttttgcacgttctttcacaatttcatccagacactgatggatataatgcatacttgtcacaaattccaccctgccgtgtcggctgtccagacgcttctcttcattaaatttattataataggcttctaagtctgtcatattttaatactaacacattttctttaaaatttcactcacaatcgctgatgcgacatccgctttgctcattatttccagttccctgcagtcatctgccgtaatcagcgtcaccacattggtatctgtaccaaatccggctccggctaccttcaggttattcgccacaatcatatctgcattcttttttgcaagttttgcacgggaattctccagcatatgttccgtctccatggaaaatccacacagaaactgtcccggttttttgtgcgcgcccagatacgaaaggatatcttccgtgcgttccatcgtaagagtggcatccccgtcttttttcttgactttctcatcgaccgggtgatccggacgataatccgccacagctgccgctttgataataatatcctgttgctctgcggtctcctttacggctgccatatccgcggcagatacaaccggaacgacctttacaaacggcggcggagtgattgccaccggtcccgtgatcagtgtcacttccgctccacggcgcatacagttttccgcaattgcatagcccatttttccggtagagtgattcgtaatataacgcaccggatcaatcttctcctgtgtcggtcctgctgtgaccattactttttttccgaccatatccttttcgcaggcaagatctttcataatataagaaaacagtgtttccggttccggcattttcccggctccggtatccccgcaggcaagataaccgctcgccggatcaatgatatgaaacccatagtccccgagctttttgatgttatcctgtacgatcggattttcaaacatattggtattcatggcaggggaaacatacttcgggcattttgccgcaagaatcgttgttgtcagcatatcatctgcgattccgtttgccatcttgccgatcacattggcagaagccggtgctaccataaaaatatccgcccgttttgccagtgccacatgctcgacattgaactggaaattccggtcaaacgtatcgaccagacacttgttgcttgtgagcgtctcaaacgtgataggattaataaaattggttgcattttccgtcatgatcacatgcacatccgcatgctgcttgacgagcgcacttgccagataggcgattttataggcagcgatacttccggtcacaccgagtaccacacattttccttttaacattgtctcttactcctttgcagaaaaaatcacatcttctgctattttatcacactttttccctaaaacaatttaatttttgtcatctgttccagtatggaatctttgacagaatcgttcagatatgctggatttaattttctttttgcatatgcaaggtaagaaccatttgtctcttcaatcaaaactgccgtaaaaaaccgctcccagctaaaatatgttttgctttccacatattcccacggcttttccagcacctgatctgcccatttgctttttactacttttgcctttaatatcagccattcaaatgactccggcaaataaagcaccacttgatcttttccacccatcaactgcatcactctgtcaatttcagaaccaaatgccgcaccgtctgcaattacaagtatgcgttcatttttatgcatatttaaataatggaaaacatttgactttccattcattgtctcacatttcaattgctgttgcctacatacagaattaaaaaactgataaccggaattactgtcttccgttattacaacctctggtttaatatccttctttaaagtctgtgctccatatattctgtaaaactcatgataacacggttttaatgttccgtattttcctgaagtacgaattccatagatttcctccacactatacggcaaagaaggcaaggattccctggaaacaatgacataataattatctgttttctgaatagtatctgcgaattctactgtcttgataaattcgtttccttcatcaataaatacaatactatcctgcattgctgataactgttctttccacagtgaaccttcgagcacataacattttttgtcacacgtcagttccacgggcgtaccggatggattatttacgtattcccgaatcatatctaccaatgtggttttgcctgtcgcactgtctccccggatgaccgtcagatttcttcgaatttcaaaatcatattttaagcgctttgttgatacaataattctatgttttcccttcat

SEQ ID NO: 786 - DNA, 22767 bp, unidentified
  source 1..22767: mol_type = unassigned DNA
ggacaatgccgattgcaatctccggattttttggagaacatcaatttacacagtggggctatgtcttcgcattgtcagtatttagtcttttacccatacttattgtgtttatctgctgccagaaattctttgtggcaggtctgacaagtggcagtgtaaaaggctgataccatatattacctttcctttgcggtgtttacagttgctggtaaacaccgcatatgacgatttatccgaacgaatagaaagagcttatgaaaagatttatgaattgaaggttgaataagggacagaagtttgaagcagatgtagcctacatagacatttatcaacaggcaacaaaatctatttatgtggtggatgattatatgaataccaagacattacaacttttgtcgcaaaaacaatccggtgttgaggtaattctttttacagagaatggtcatgggaaaaaaggttttcttacaagtgctgtggttaaggactttataaatcaatatccaacacttagaatcaaacctaatccggattcccatgatagatggatcattcttgattatgggttacctgcagaatccgtatatcattgtggtgcttccagtaaagacgcgggtaaaaagttatgtgcaataaataaagtggattctgttcaaatgattcatcctgtaatagataggttacttttattgccggataaacagatataacctgatccctttgaggatggtcatattccctggatgaaattatgcgtagtccaggtaatgaggtctatgcactcagatccagattccgtccaatcactgcggcagcatcggcggattttttgttctgctgataaggattgctctcgtcacggtagctgatcttagtcgtggtggtaccgccggcggtgtagacagtgccgcattcgggacataccgcggtccgcagggatactgtggcggagagaactttaccgttgttctgtgcagctttgttgtaggcattggttacatgctcctgctcatgggcgcgcaccctggaggcggaagcctgcggagatatatgggatgcagatttgaaagagaccatctcatcggaaccgtcctgatatttgcggttcttgcaggtctcacattctgcgggagaagatttcctgccgggcttttccacatcggattttccgggatttactatcatacccttctcttcgggccgtgcggaagataccgcaccggtagaataaccgtatccgtaattgccggtcagactataattattataataatcgattccgtaaatacctgtcatggaacttctcctttctgcataatgctttgattcattacgtatatgtcttctagttgcccccattgtagcatccatgttctatgagggcaagttaagattgccaaaaaatccgctcaacttcggaaattaccgaagttgttcctaagattacgatgggatccggacaagaatcagccagagtcagtgcctgttgcacggaatctgtccatatcgtgccaataccctcttttgccaatgactcctgctgtttttgggaaaaatgataatgcggattcccggatttggtgagaatgattcggttcgcaacttccctcatggaccggatcacccctgcgtaatctttatcctccggaatccccacaattaccgtacaattcgaaatccccagatgacgcagaacttcttttacattttcacagctggcggaatggatgcacgcatccagcaggataaaaggatccgaacttagaatctccatccgccctggatgatggattgcagacagttggcggcgaatttgattgcacattgtatctgaaaatatatccggagcattggattcccggcaaagatctgccatgacatccacgcacagagccagagccagtgcgcagtttttcgcctgatgttctcccaataacggaatctgtaaatcaggataaatgttatctccgatcaccacatcaaatagcataccggaacaggtatagcggatattttctgcctgaaaatcccgcccataaaacttataaggaacctgtaacatctcggcacggcgcactagcaccttcaatacttccggctcctgctccgcaaaataaacacacttctgctccccggtgatgacgtgggatttatcttctgcaatggcagtcagcgtatctcccagctctcttgtatgctctaagaaaatccgattgatcacggcataatcgtgacgaatgtagttcacatcatcatattttgcccctttgccgcattcaaatacattgaaatctgtatgtttttccgaaaaataagtcagtgccaggtccgcctgaatgcccatggggctgatacataccgaatccggcagatcggaggcaatgtccaaaatctccggctggatctctgccatcagacggcaaaagtcggtttcactgatcatggtatcattgacgcggaaacgctctctgaaatccgtaatatgaggactggtcattaggcctacggataaatttgtctgcaggatccgggaaatcatattggcaacggatccttttcccttgcttccggtgacgacgacacagggagcaatcgatttctgtcggagcagagatctcgtcagctcaggatgtctttttccggcatcctgagcggcatagtcctgatgtgtggcagcccgcagataggaagcatagacgaagtcttccgcctctttttgcgtagtgatcttatgaaattccagtggtgttccggaaacattattcataaaaataagcatacctttccgtaacctgcaattttattgatacgatagtatcgtatattttcgtacactgtgcaggtacaaatatgagatgagttccttatgcaaagtctgatcgtattgtttccataacttttgctgcaacattaataccggaggctttttcaatgccttccagtcccggcataacattgatttcgcaaaaataaggtttttctctgccaaaaagcagatcaattcccaaaaaatccagtccggtctgctcgtaaatatctgcggctatggcacggatgccgggcgtgacagggtaaggatctaccgaagcgcccagagctacatttgcacggaaatccccctgggatctgcgctgcatacaagcaacggcttctccgcggatgctgtaaaatcgcagatccctgccgtagctttccgagataaattcttcgaagagccattccttggaggaagggtagttaagagagagctcttcataagaagctttatcccggatgcagacgatttcctcgcccatggagctttccagtcctttaccgacaaaaggaagccccagttgttctacaatagaagaaaaaggcaacagtgaagttcccagaagatatttcgggatcagaaaggcttcggaatgaagccttcgtacctgttcaaatttattaatatagatgttataagcagttaaaggattatagcttcgggtggcaagtgcatttatagcatccttttcccgtccccatttatagcggttgatgacaaaatccacaggttccagtattttaccatgatttataacaccatgcggagagaccatagtatcgtggatccctacaatctgcagatccatatccagggcagaagcttcctgtaccagacgattgcaggtataagcgttggtcatagcattatatttttctatgatatatcctctgataggcataagacacctcgtgatttcagtattctcatggttaacatagcaaaatgtaatcaaaatagcaagaaatatagttcttctattgaaaaaggagcaatatcctgcgtataataagagacataaaagcctaaagtactaccacagaatatattaaatagaaacaaaagaggagacatacaatgaaattactcgaagagcgcattcgcaaagacggtacagtaaaagcaggaaatgtattaaaagtagattcttttctgaatcatcagatggacattgatctgttcaatgaaatgggaaaagaatgggcgcgtctgttcgcagaccgtaagattacgaagatcctgactgtggaggcttccggtatcggtattgcctgtgtggcagcccagcattttcatgtgccggtggtatttgcaaaaaagtcccagtccgtaaatattgacggtgaagtatattccaccaagatcgaatcctttacgcacaaaagagtatatgacgtgatcgtctccaaaaaattcctacatccggaagatcatattctgatcattgatgatttcctggccaacggatgcgcactggagggtttgatcgacattgtcaataaagcgggagcttctgtagagggtgtcggcattgccgttgagaagggattccagaagggcggcgacctgatccgttccaagggtatccgtgtagagtccctcgcaattgtggaaagtatggatgacaaaaccggagagatcacatttcgatcttaagagttagataactattcagaaccacattcgcaaacgagttaataaaaatttaatacttctcttgacaagaagtcagacaaatgcttatactgactaatgttgagagagtacaataaaggggtcgtatgaaggtgtcatacaccctttttgcgttgactcaccggtttatctgcagatctgtgcccgcgctgctacatggatctgtaacgaagcagcagcgcagaaagaggagaattatgaaaaagaaagtcgtaagtttactcgcagctatggctctcgcagttactgctctggcaggatgcggatccaataacgcagctaccaccggcacagatgctgcaactgttgcagctactactgaggcagcagctactactgaggcagcagctactactgaagcagctggcgaagctgtcagtggtgtaaaggcaggttttattttcctgcatgatgagaactctacttatgatctgaacttcctgaacggagcaaaggcagcttgtgagaagcttggcattgagtacatgaccaagaccaacattcctgaaggacaggaagcttatgaagcagcttgtgagcttgctgatgcaggctgcaatttcatttttgcagacagctttggacatgaggactacatcatcgaggctgctaaggagtatcccgatgttcagttcagccatgcaaccggaaccaaggctcataccgagggtctggacaacttccacaatgcatttgcttccatctatgatggccgttaccttgcaggtatcgttgcaggcatgaagctgaatgagatgatcgctaatggtgatattaccgaggatcaggctaagatgggttatgtaggtgcttatacttatgcagaagttatgtccggttatacatccttcttcctgggcgctcgttccgtatgccccagcgttaccatggatgtaacctttaccggttcctggtacgatgagaccgctgagaaggaagcagctaacaagctgatcgagggcggatgtgtactgatcagccagcatgcagactccatgggtgctcctaccgcatgtgagaccgcaggcgttcccaacgtatcttacaacggaagcactgaggcagcctgccccaataccttcctggtatcttccagagttaactgggagccttactttgagtatgctattaaatgtgtagcagatggaactcctatcgataccgattggtgtggtactctggagaccggctctgtagagctgagcgatcttggtgctgctgtagcagacggtactgcagaagcagtagaagctgcaaaggctgatctgatcgcaggcaagactcatgtatatgatatcaccacctttactgtagacggcaagaccctggacagctatgaagctgatatcgataccgatcctgattatactcccgaccatgaggtagtaagtgacggatacttccatgagtccgatgttgcattccgttccgctccttactttaatgtaagaattgatggaatcaacctgttggatgagcagtattaattgacttattgaaatagcccggacggcgcagcgtttatcgccgcgccgccctttttctaccttatggatcttttgcttttgtggatggatgaggtagaaaaggggcggccagtgtgcttatgccaggtattaaaagacctgcaaattttcaggtcgtggataaattggaaaggtgactaggatggaaaaagagacaaaagtagctgcggtttcaatgaaaaacattaccaagacttttggatccgtgattgccaatgataaggtaaatctggatatctataagggtgagatattatcgctgcttggggaaaacggcagcggtaagacgacactgatgaatatgctctccggtatttattttccggatgagggacagatctttattaacggtaaggaagaggtcatcaaatcccccaaggatgcgttacggctgggaatcggtatggtgcatcagcattttaagctgatcgatgtactttccgctaccgagaatatcattctgggtctggaaggcaggcttaatatcaaggaggcttcccggaaaatagaggagatctgtgacaaatacggttttgaagtagatccgaagcagaaaatctatgatatgacggtatcacagaagcagaccgtggagattgtaaaggtgttgtatcgtggtgcggatatcctgatcctggatgagcctaccgccgtactgacaccgcaggagacagagaagctctttaacgttctccggaaaatgagagatgacggtaaagccattgttatcattacccataaaatgcatgaagtggaatctttgtccgacagggtggctgtgcttcgtaacggtcagtatattggaagcatgctgacaaaggataccaccgttacggaaatgaccaatatgatggtgggacatgcggttactttgaatattgtcagaccggaacctgtgaatccgaagccccgtatcgaagtacagggactgactgtacgtaacgaagaaggtatcgttaagctgaaggatgtctcctttaccgccaacagtggtgagatcctgggaatcgccggtatctccggctgtggacagaaggagcttctggaagccattgcaggtctgcaggtaacagaagccggtacgatcagttatgtggaagatgatggaagtaaggaaatgctgatcggcaaggatccgttgaagatcgcagagatgggtgtatcgctttcttttgtaccggaggatcgtctcggaatgggcctggtaggcaatatggatctgaccgataatatgatgttacgttccttccgacagggacatacaccgtttacgaaccgaaagccttccaaacagcttgcgactgatgtggtagaaaatctggaggttgtaaccccgggtatcaccactccggtacgcagattgtccggtggtaatgtacagaaggttctcgttggaagagagattgcgtctgcacctaccgtactgttgacggcttatgcggtacgtggactggatattaattcttcgtatactatatatgacctgatcaatgaacagaagaaaaagggcgttgccgtgattttcgtaggtgaggatctggatgtgctgatggagctgtccgaccgtatcatggtattgtgcggcggagaagtgagcggtattctggatgcgagaaagacagacaaaaatgaggtcggtatgctgatgaccagagtaggaggcaaagaacatgaaggaaaagaataaagagcctttgtttcatatcgtaaaaagagatgcgcttccctggtataaatctctgggtattcgatttttggcaatcctgctggcactgatcctgtgcggtatcattacgacgatcaccacgggaatcaatcctttacaggtatatcagtccatcgttctgggtgctttcggatccgtccgcaagacctgggtcacttttcagaatatagcgatcctgcttttgatcgcattggcattgactccggcatttaagatgaaattctggaatatcggcggtgagggacaggtgctgatcggcgggctgacagcagcagcctgtatgatctgtctgggagataagcttccgaacgcagttgtgatcctgtgcatgatcgtggcaagtctggcagcaggagccatctggggtttcattcccgcatttttcaaggcaaaatggaataccaatgagacgctgtctacgctgatgatgaactacatagctactcagttggtggcattttatacgatagtatgggaggttcccaagggatccggtaagatcggtatcatcaaccagaacaccaatgtgggctggctaccgcagatcttcggttccaaatatctgttaagtattgtagtggcagtagtgatcacgatatttatgtatgtatatttgaactacagtaagcagggatatgagatctctgttgtgggtgaaagcgaaaatactgcaaaatatgtgggtatcaaggtagaaaaagtcattatccgtaccatgctgttgtccggtgctctctgcggactggtaggcctgcttctggtaggaggtatcaatcatactgtgaccaccacgattgcaggtggacagggatttaccgctgtactggtatcctggatgtccaagttcaatcctctgaccatggtattctccagcttcctgatcatattcatggatcgcggagccagtgagatctctaccaatttcggattgaatcattcttattccgatattctgacaggtattatcctgttctttatcatcggctgtgagttcttcattacttacagactgcagttccgtaaaaaagcagaaaaggaggaacagtaagcatgtggtcatttttacttgcatttattccgagagcaatcgtacagggaattcctctgttatacgggagtaccggtgagatcatcacggagaaatccggtaatctgaatctgggaatccccggcgtcatgtatgtgggaggtatctgtggtgtcatcggatctttcttctatgagagatcagcaggagacgcggcgaacatgaatgggtttcttgccattgcgattccgatgctctgctgcctgttaggatccctgtcgatgggactgctgtactgcttcctgactgttaccctgcgggcgaaccagaacgtgaccggtctggcaatgaccaccttcggtgtcggcttcggtaacttctttggcggatccctgatcaagctggtaaacagtgatgtaccttccattgcactgtctgctaccagcagttatttcagtaagtcacttccttttgcgggaaaacttggctggtttggtaagctgtttttatcctatggattcctggcttatctggcagtgatcattgcgtttgcggcatcgtatgttctgagtcataccagaaccggactgcacttaagagcagtcggtgagggtcccaataccgcagatgcagccggtatcaacgtatcccggtacaaatacatcgctacctgcgtgggatgtatgatcgcaggtctgggcggactgtactatgtaatggattatgcctgcggtgtctggtccaacgatgcgttcggtgacagaggctggcttgccattgcgctggtcatcttcactatctggagaccgaatatcagtgtatttgcttctttcctgttcggtggtctgtatattctgtatctgtatctgcccaccggtatcgagcatatggagtatcaggagctgtataagatgatcccttatgtcgtgaccttactggtactggtcatcaccagtatgaggagcaagagagagaatcagccccccgcaagtctgggattggcgtacttcagagaagaaagataataattttatagaaagacgattaaaaacggcgttttccggaaatttccggagaatgctgttttttagtgcacattttggaaaaaactcacagaaactttaggaaaacttttgattttattcggatggaatttacctgtgtctgttatgctgagatcaattcagagaaaataaacggaagggagaaaaaagatgaaagtattgatcacaacagactggtacaagccgaccatcaacggagttgttacttcggtatgcaatctacgggaggaattacagcaaagaggacatgaagtgaagatcctgaccttgtcccgtacagctcgttcctacgaagaagagggtgtgatctatatgggttccgtgaatgccggatatatttatccgggagcaagatttcgggtgtccccgggacgcgaactgtatcgcgggattatagagtggaatccggatattgtacattcccagtgtgaattttctacctttttcatggcaaaaaagatcgcagaggaatgtaagatccctctggtgcatacttaccatactgtatacgaagattatacccactatttttccccttacaagaaatggggcagggatatggtacagttcctgacgcgacagatctccgagaaggtggacagtatgatcgctcccagcacaaaaatagagacattactaaaagactatggcattcattgtccggtatcagtgatcccatcggggattgatctgagtaaatatgacgcgcagacccggacggattcccgggagagaatccgaagaaaatataaaatggaccggaagaccacagtgcttttatatgtaggtcgtctggcaaaagagaagaatgtggaagaattgctggagtaccagcagaaaattcaggagagcggcacaatactgatgattgtaggcggcggtccttatttggagactttacggaaaaaggcagcagaactgggtgtgacggaaagcgttatttttaccggaatggtatcacccgttgaagtagcatcttattatccggcaggagatctgttcgtcagcgcttccaccagtgagacccaggggcttacctatgcggaagcactggcagcaggattaccgttattatgcagaagggatcaatgcctgcgggcggttgtggaagagggaaaaaacggctggcagtaccggaccgaagaggaattcttgaaagacctgaagaactggaaggagaaagaagacgatgaacgcagaggaatgtgcagttatgcaaaacagtccgcagaaatattttcccaaaaaagatttgcgggaagcatggaacaactataccagcgacagatcgaagaaaaacaggtcgaaagagaaaaacgcttggcaaagagccgtcaatattgcatcctgggttagtctgatcctctgtggaatactggcagtctggagctatcagagcggcattttccaatcggtggagactatgcagcagtttgtgaaccgtttcggaatgatcggtgcactgatcttcgtgctgatccagatcgttcaggtggtgtttcccatcataccgggtggcatcagctgtctggcaggagtgctgctctttggagcggtgccgggatttttctataattatataggaatctgtgtgggttcctgtattgcttttggaatagcaagaagtctgggaagaccggtgctgtacaagatgtttcccgggaaaatgattgaaaaatacctgacatggacggagctaaaggggagatttttgaaattatttacactggcaatctttctgccggtggcaccggatgattttctttgttatctcgccggaacgacgaacatgacatggaagcagtttgtggcagtcatctttctggggaagccattttccattgcactgtacagcctgggacttacgacactgttccaggtgattttccatctggcataggagtatcttcatatgaaagtatatatttataaaggcggacagtcactggtggcaaaaagcggtgtcggcagtgccatccgtcatcaggaaaaaatgctgcaggcggcgggagtgattgtgacggatatctggaaagaggcggatatcgttcagatcaataccgtactgcctgattcgcctctggtggcgcagcgagcaaggcggcaggggaaaaaggtcgtctattacgggcattccaccatggaagattttaagaattcttttatcggttccaatctggtggctcctttattcaaaaaatggatccgctattgttatagacagggagatgtggttatcacaccaacggaatactcccgggaattgttaatgaaatatgatctgcatcgggagatttacgcactgaccaatggtgtggacactgaatttttccacaaaacagagcaggcaggtggacgattccggaaattttttcatcttcctgtggataaaaaggtcgtgatatccgccgggcatctgattcacagaaaaggaatcgaggattttctggaaatggcaaaaaggatgccagacattatttttctatggtttgggggcgggaacaatgcattgattccggcagagatcaaaaaggctgtggcagagaagccggaaaatgtgatctttgccggtttccaaccgtccgggatcctgcgggatgcgtactgtggtgcggatgcatttgcttttttcagttatgaagagacggaaggaatcgtggtattggaggcattatcctgtgagattcctgtgatcgtgagagacattccagtgtatgaagggtggcttaccgacggcgagcaggtgcgcaaagccagcaatccggattcctacgagcaggcagtccgagacatcttgtatgaagaaccgcgggaaaaagtaagacgcagaatccgggcaggcagggcactggcggaggaacacagcatgcgggcgacaggtgagaaactgtatcagatagagcagaagcttttgtagacatccctcttgcaaattcagagtctttatcataaaatgagagtaccttacaaaggaggtgcttacgatgaaccttgtaattactatcagccgaagattcggaacaggagccagtctgatcgcacaggagctgtctgagaagctggaggtgccggtatatgataaggcgtacatagagcatgaactggatggtgacagttatgctacggaagcggaggttattaaggaattggcggaacatccctgtattattctgggacgttgtgcatccgagatcctgaaggatcagccgaatgtatttaacgtgtatgtgtgcgcggataaggaagatcgtattgaacgtatcatgaagaaggaaagtcttccccacgatgaggcaaaagaaatgcttgagaaaaatgatgcggagcgcgccgactattattatgaaaataccggtaaagtgtggggtgatgtgaacaattatcatatgatcctcgataccaccaaactgggaatcgaaaattgtgcggatatcctgatccggtattttgaaagagtggaaattatttgacagcccggaatgcgaatgggcgttacgatttcgagagtatacagtacgaagaaatcgtttaggatataaatagagaatagattataaacagatgcccgacacggacatctgtttttttgtgaaaaacattttaaacatagtaataaaattaatcaattataaaacattataaaattaaaagtatggttttaaatataacaaaaaatgatatatacaattgaaaattttaatcaaataataaaaaggaataatcactgaataaaatagcctttttcttgaatttataggtatatgacaaaaatgtcacattaaaatacatcaattaacaagataagaatatatcttgcttacagaaattatgagtgttaagataatgcaatcagataagtgaaaatagtaaaaacagcaggttttgaaaataaaaagtaatcatacagcaggaggatttccatgaacagcgcagacattgcagcaaaatatcagaaaacttattttatgccccccgaggtgacttacgactgggtaaaaaaggacagtattaccaagccccctatctggtgcagcgttgacttaagagacggcaaccaggcattgatcgatcccatgagtctggaagataagctggaattcttcaagatgttggtaaagatcggtttcaaagagatcgaggttggttttcccgcttcctccgatacggagtacaattttatccgtgcattgatcgagcgcgacatgatcccggaggatgtgactattcaggtattgacgcaggcgagagagcatatcatccgcaagaccttcgaagcagtcaagggagcgccccacgcagtgatccatctgtataattctacttccgtagagcagagagaacaggtatttaagaaggacaaggaagctattaagaagctggcggtagacggtgcccggatgttaaagaatctggcagatgagaccgaaggtaacttcacctttgagtacagcccggagagcttttcccagacggaggtggattatgcattggaagtctgcaatgcagtactggaggtatggaagcccactgctgactgtaaggcaatcatcaatctgcccaccaccgtacaggtggcaatgccccatgtatttgcctgtcaggtagaatatatgcacaagcatttgaaatatcgtgataatgtagtacttagcgtacatccccataacgacagaggctgcggtatcagcgatgcggagttcggcgtactggccggagcagatcgtgtggaaggtactttgttcggcaatggcgaacgtaccggtaatgtggatttggtaaccgttgcacttaatatgatgtgtcacggtgtggacagcggactggatttctctcatattatggagatccgtgaagcttatgagaatttcaccggtatgaaggtgcatgagagagttccttatgcgggagatctggtatttaccgcattttcaggttcccatcaggatgccatcagtaaaggtatggcatggcagaaggaaggcaggaccggcaagcgctgggatattccttacctgcctatcgatcctgcagatgtgggaagagagtacgaatccgatgttatccgtatcaacagcgtatccggtaagggcggcgtagcattcgtattgaagcagcagtttggattctcactgcctgcagctatgaaggaagaagtcggctacctggtaaagggtatctccgacaggcgtcatcaggaattacttcccaaggagatctacgcgatctttgaggaaaattatatttatccccgcagcatcttcaatgttccggagttccacttcaagcaggagaacggcattcaggcagaggtgaccatcgagcagggcggcgcttccagaaccattaccaccatgggtaatggacgtctcgacgcagtcagcaatgctattaagacatacttcggtattacctatgaactgtctgtttacgaagaacatgcgatttccagaggttccaactctaaggcagctacttatgtaggcatcgtccatgacggtaagttctactggggtgtcggcgtggatgaagatatcatcaagagttccatcgcagcattggtatccgctgtgaacaagctggcagcagagcagcatatcacttccggcagagaggagcggatcgtggagatcatcagtttcatccagaagaactacgtggatgtaacactggatatgctggtagataccttccatctctccaaaccgtatttgtccaaatacattaaggaaaaggccggcatgaccttccaggaggttgtaagggaagaacgtatgaagaaagcgagaatgcttttgaaagagaccaaccagacggtggagaccatagcagccaatgtcggttacgagaatgtggagcacttcaaccgcctgttcaaaaaggcttatgatatgactccggtacagtatcggaaacagagtgcggaataaaattgccatgcgcattcgtagacgcgttgcgtctacttcatgtacggctgtcgccgtataaaagcaaaaacaaagatacatccttgtgagcaggagccaaggaattgcgccatgcgcattcgcaggcgctaaagcacctgcttcatgtacggctgtcgccgtataaaagcaaaaacaaagatacatccttgtgagcaggagccaaggaattgcgccatgcgcattcgcaggcgctaaagcacctgcttcatgtacggctgtcgccgtataaatccaaaaagaaagatacacctttgtgagcaagctcccacggtgtatctttctttttgtctttgcatggcttgtagcttttaacataatgacaggtcttaagaacaaaaataagtagaaatatttgtttttttcgattatgatgaaaacatagagaaagagaattcgtatcgcggcatcggccggagcgacaagagtaagaacatataaatggacggggcttacacagtaagcagataggagcagaaaatggaaatgaaagagacgattctgaagactttcgcagaagtatttggagatgcagagggtgccaaggcttattttgcaccgggacgtgtgaatctgatcggtgaacataccgactataacggcggacatgtattcccctgtgcactgaccattggtacttacggtgtggcaagaaaaagaaacgacaataaactgcgtttctattccatgaatttcgaacatctgggtgtgatcgagtcttctctggacgacctggtacccagcaaggaagcgaattggaccaattatcccaagggagtgatctgggctttcggtgagaagggcatgaaagtgacttctggtatggatctgctgttgaacggtaatatccccaacggttccggactttcttcttccgcttccgtagaagtgctgaccggctacatcctgagggatttcttcggctttgatgtgaccaatcaggatctggcgctgatcggacagttctccgagaacaaatacaacaaggtaaactgcggtatcatggatcagtttgccattgccatgggtaaaaaagagaacgctattttcctggatacagcgacattggaatatgagtatgcaccgatccatctggagaatgcgaagatcgtgatcgcgtgcagtaacaaaaagagaggcttgggagattccaagtacaatgagcgccgcagtgagtgtgagactgcactggcagagctgcagcaggtagtgaagatcaagacgctgggtgatctggatgaggagacctttgagaagttcaaggctattatcaagagtgatgtccgcagaaagcgtgcaaaacatgcagtatacgagaatcagagaacgatccgtgcggtagaagcgctgaagaacaatgatgtgaagctgtttggtgagctgatgaatgcgtcccacgtatccctgcgggatgattatgaagtaactggtatcgagttggatactctggtagaggaagcatggaaggtagatggtgtcattggatcccgtatgaccggtgccggctttggcggatgtaccgtaagcattgtgaaggatgaagctattgatacctttatcgagcaggtaggcaaggcatacaaagaaaagatcggctatgcggctgatttctatgtagtagagatcggtgacggtcctcagaccctgtaagaaaagtaaggttcctacgcaaacagaaagtgagtgccgcggaagctgtccgaatggtccggcggcagaatggagaaaaaatggatattcaggtattaattcgtaaattagtatcctacggagtacagacaggactggttccggaggaagatgtgatctataccaccaaccgtctgttggagctgtttgaactggatgagctggaagaccgtgacaatgtgaccatgcgcgaggatgaattggaagaggttctgaagggcatgctggattacgcttatgaaaaaggcattctcaaggagaacagtgtggtataccgcgatctgttcgatacgaagatcatgggactgctgatgcccagacccagtgaagtgatccgtcatttccatgagctgtacgagcaggtatctcctgaggcagctaccgactattattataaattaagcagagattccgactatatccgtcgttatcgtatctgcaaggatatgaaatgggtggctcccaccaaatatggcgatctggatattactatcaacctgtccaagcccgagaaggatcctaaagctatcgccgcagcaaagctggcaaagcagtccggttatccgaaatgcctgttgtgccgtgaaaatgagggttatgcaggccgtgtgaaccatcctgcccgtcagaaccaccgtatcattccggtgaccattaacggcagccagtggggattccagtattctccgtatgtatattataatgagcactgcatcgtatttaactctcagcatgtgcctatgaaaatcgagcatgcgaccttctgtaagctgtttgatttcgtaaagcagttccctcattattttgtaggttccaatgcggatctgcccatcgtaggcggctccatcttaagccacgatcatttccagggtgggcattacgagtttgccatggcgaaagctccggtagagagaaccttctctgtagccggtttcgaggatgtggatgccggtatcgtggcatggcccatgtctgtcatccgtctcagcggtacggatactgaccgtatcattgcactggcagatgtaatcctgaacaagtggagagaatatacggatgaagaggcatttatctatgcctacaccgataacgagcctcataacaccatcactcccattgcaagaaagagaggagacaagttcgaactggatctggtgctgcgtaacaatatcaccacagaggagcatccgctgggagtctatcatccccatgcaaagctgcatcatatcaaaaaagagaatatcggcctgatcgaggttatgggtctggcagtactgcctgcccgcctgaagggcgagatggcgcatctgaaggaagcaatcctcgccggtaaagacttaagagctgatgaggaactggcaaagcatgcagactgggtagacgagttccgtccgaaatacgatgccatcactgtagagaacatcgacggtatcgtagagaaggagatcggtctggtattcatgcaggtattggaagatgccggtgtctacaagagaacggaggaaggtcagaaggcgttcgaccgttttgttaaaagcttataatcatatttttgttgaatgtttgttgtacatttgttgcgaggaaaaggaattgtggtgacacaattcttttttcttagtataataatctcatgaaattcttattaacagctattaatgcaaaattcatacattccaatcctgctatttacagcctgcgggccggtgtgggagaaaagttacagccttatgtggaactggcggaattcaccatcaatgaatccctggaaagtattctggaggggatctggaagcgtcagccaaaggtaataggattttcctgttatatctggaattggaagctgatccgggaaattctgacggaactgccgaagatcctgccggatacggagatctggctgggaggaccggaggtgacttatgatggaccgggacttttaagagagttccctcagattaccggaatcatggtgggagaaggagaagtcaccttccgagaggtactggaccactatgtgcgggaaacagaaacggccggacagtccgaacagcaacccgaacccgacagcatagaacagcaggcagcagatcgaacgggaacggttgcaggaaagtctgtggcagagcgctttggacagatctccggcctgtgtcttgcctccggttatacggcacctagagaactgacggatttgaccacacttccttttctctatgaggatatggagccttttacgaatcgtatcatctattatgagaccagcagaggatgcccttaccggtgcagctattgcctgtcctccatagataaaaaagtgagactacgtgacatagatgtcgtaaaaagagaactgcagtttttcctggatcaaaacgtaaaacaggtgaagttcattgaccggacgttcaattgtgatcacaaacatgccatggagatatgggagtatatttacaaacatgacaatggcgtcaccaacttccatttcgagatttccgcggacattttgcgcgaagaagagattgtcctgctgaaccgcttccgtccgggactggcacagctggagattggggtacagtctacgaatccggagacgataagagccattcaccgtgtcatggatgtggacaagctggagaaaattgttgcggccattcacagaggacagaatatacatcagcatttggatctgatcgcgggtcttccttatgaagattatgagagcttcggcagatcctttgacagggtgtatgcaatgcagccggagcagttacagttaggcttcctgaaggtattaaagggatccgatatgcatgagcatgcacaggagtatggaattcgctatctggaactgccgccctatgaagtgttgtacacgaactggatcagctatggagagatccggagactgaaacggatcgaagagatggtagagctgtattataacagtggccagttcactcataccctgcctgtattggaaaaagcattttccggtccgtttgccatgtatgaggcactggcggattattatcaggaacagggatattttacgaacagtccggccagagcttaccggtatcagatcttattggagttcgcagcgatgaaagatccggccaaccgtgagatttacagagaacttctgacgtatgatatgtaccttcgggagaacctgaagagcaggcctgcgtttgcggcagagatcacggaagaggaaaaacagaatatccgccgtttttaccagacggaagagcaggagagacattatcttcctgcctatgatcagtatgactggaaacagttaagccgaatgacacacttagaaccgttccgctatccggaacctcattatgttctgtttgattatcaagaacggaatccattaaattatgaggcaaaggtacagatgatcaggaatccgatactataagtacaggagaagatcggttcataaaaattgaggtatgcagtcagaatatatcggaggaaccggctgcaaaatggagatcagtatgtatgacacttatgtcagtatagatttggagaccacgggcctgaatcccaagagagatcggatcatagagatcggagcgatacgtgtggagcagggacagattgtggaagaattttctacgtttgtggatccggggcggaaattggaagaacggatcacagaacttacgggaatccgggatgaagaccttgcggatgcacctcagctggatgaggttttcccaaaattattggaatttatgggagaattaccgttgctgggacacagcattttgtttgattattcttttttgaaaaaagcagcagtggacaggaagattacttttgagagatcggcggtggacactttgcagattgcccggagatatctgccggaactgcctcatcgtaatctggggtatctgtgtcagtattatgagatcccgcatcatgcacaccgggctctggaggatgcgaaagcaacggaccggttgttccgaaagctgatagaactgttttacagggaggaaaccggtggacaggcatcgacagaagctgtcggaaaatcggcaaagaataatttatttgagccgcaaccattacattttcaggtaaaaagagatacgcccgcgacgaaaccgcaaaaagagcggttatatcgtctggcagagcagcataatataactttggaggtcgatgtggaaaagcttacccgcagtgaggcgagcaggcttgcggataagattcttgcaaagtacggacgatagaattacgcaaagcggaacgcagtccttccgcacgttggatcagatcggcaattttgtcatattccttccggccggcatagattttagccagcgcatagtaagtatggctgacgtcggtgccgatggagacggcatacgcgagaatcgtttccgcatcatctgtcagaccggaatccagaagcagatcggcccattgttgcagagtacgtactaatacagtgtaattctgatcgtattgggacagcggtgtaatgttcgcagtgccgtattccagtttcagatctgtgttggtgaagcctgtgagatttacgatcggctgtgtggacagagaagtaaggagactacggtattcttcggctctttcgttgtccggaagagcatccatgggaagcttatccagggggattttcacatagtccagatcatccagaggctttttgcggacggagttggctttccgctctctggcccagaactctttttccctgttttccgcgatgcgctgttggcgtttggtagcatgtgccactacggcaatcagtatgattaaacttgccaaaatctttaaactcatatataatatcctttcagagtaaaagtgatttttgaagcatttatggaggtttttaccatgtttaatatgaataataaaaaagtaaaacagcgaatctccgcagctatcatcgtgctgcttgtgattgctatgattgtacctactataacatctattttttactaattcaactgcggatggaacagtagacgtgcccgaaggaagggcagaggagtattatgaaaaaatatcgtaagggattttacggcattctgttattgactttgacgatgttgttcggaatgacagcgcaggccaagacagatgatactattaagacaggaatttatgccggggatgtggaactgtccggaatgacggcacaggaagcaacagcggttatcgaagaacatatcgaaagtctgaaggatgtggagatcacactgc

SEQ ID NO: 787 - DNA, 41720 bp, unidentified
  source 1..41720: mol_type = unassigned DNA
  misc_difference 22991: note = a, c, g, or t
  misc_difference 22992: note = a, c, g, or t
  misc_difference 22993: note = a, c, g, or t
  misc_difference 22994: note = a, c, g, or t
  misc_difference 22995: note = a, c, g, or t
  misc_difference 22996: note = a, c, g, or t
  misc_difference 22997: note = a, c, g, or t
  misc_difference 22998: note = a, c, g, or t
  misc_difference 22999: note = a, c, g, or t
  misc_difference 23000: note = a, c, g, or t
gtggattccaccatgcttccgtaaaaatattcgctcagtccatcgcaggtatatacatcgaaaaaatcaaacggacgataggaaagtaggcgcacggtatcctcctgcccctgcgctttaaagtaagcgaccgcttcctcgcgcgtccagcgggatttggtaatcggcaaatcctgcgctacgatttcgtgcatgcgcttttcgatgcgccgaacaagtgacgccgtcacatccgcgcccacgacattcatatagatgccgtgaccgatgctatgctcaaagcgcaccttcgcgccgggaacgacgtcacggagtgccaaaagaagaatcaatctcgcgctgcgttcataaacgcggcggtcttcttcgtttctgccattcagtttgttcatgctgctcctccttctttttcagcttttatccgcaggaaagggcgttctttgcagcccttcggttctctttccatgcgccataaccgcaatgcacaaaattcactcgatttttttgtgttctccattatatcatgcttttcttccgcgatgcaaccgttttcaagtgaccgctttcaaaccctcgcgtttgtttcgcgttaaggctttccaatcttcgcttgatgccgatttccttccgtttcgctttaaataattcggtattttgcgtcattagaatttctttcgtctgaaaattgcattttgtattgatttttcggttcaaacaaagtataatacgccacatctccaataaaaactttcaaattcattcaaaaacaggagggattcgatgaaaaagttcttagcgatgctgctttccgctgctctgctctgccctgccatggcgatggcggaggataccataaagattggtatctttgagccgatgaccggcgcgaccgccgccggcggctcgatggaaaaagaaggtttcgatctcgccaatgagctttaccccgatgtgctgggcaagaagatcgagctggtctacggcgacaacaagtccgaccgcgccgaagcgacgctggccgcgcagtccctcgtggataagggcgtagtcgcggtgcttggctcctacggctccggtctgtcgatggcgggcggcgaggtctttgctgagaacgaaattcccgcgctgaccgcaaccgcaaccaacccgaccatcacgctggattgcgaatggtatgcgcgcatctgcttcatcgacccgttccagggcacgatgctcgcgcgctacgccgtcaagaacgaatacaagaaaatcgccatcatgcgcgagaaggacagcgaatactccgtcggtctggtcaagtattttcaggatgagatcgcgacgcatgacggatatgaggtcgttgcgctgtgcgatttcatgaacaaggacgaggacttctccgcgctgctcggtgccgtgctggataagaagccggacgtcatcttcacctccgtctcctacgctgataaggccgcgcagattatgaagcaggcgcacgctttgggctatgaaggcgcattcttcggcggcgatacgctcgacgcgccggagctgttctccatcgcgggcgatgcggctgtcggtgctgtgttcaccacattctatgatgcggcgcagcctgcaaccgaaatgaccagcgaattcctcgacgcttaccgcgcgaagtacggcaaagaacctgccgcgccgaccgtcatggcgtatgacgcctatctgacgatgcgcaacgcgattgaaaccgccggcacgaccgacgcggaagcggtacgcgatgctctgtttgcaacgagcggtttcgtcggtgccgccggttccatcaccctgaacgacacccacgatgcggttcgccctgtcgtcttcaaagaagtacaggcggacggcagcacgagcttcaaggatatgattgagccgtaagaaatccatcatcaatcaaataggggcgttgctcagtgagcaacagccctttttgaattcaaaggaggaacccgcgcatgttcgacgtcacccgcctgctgcaaacactgaccgacgcgctgagcctcggcagcctgtatgcgctgattgccatcggctatacgatggtctacggcgttctgcgcctcatcaattttgcgcatggcgaaatcttcatgatcgcgatgtacatcgtcttttacggcatctcgatgttctctctgccgtggtatgtgacctttatcgtgaccattcttatcacggcactgctgggtacgctcgccgaacgtctggcgtatcgtccgcttcgcaatgcgccgcgcatctccattctgatttccgcaatcggcgtgtcgtactttctccagaatctggcgaccgtgcttttcggcggtcgtccgctgacctttccgcagattccgctgttcacggatgtgctgaaaatcggcgacgtctacttccagcgtctctcgctgattgtgccggtcattgcggcggttcttctcctccttttactggttctcatcaagcacaccaaaacaggcttggcgatgcgcgccgtctcccgtgattacgacgccgccagtctgatgggcattgacctgaaccgaaccatcgccatcaccttcttcatcggttcggctctcgccggcgtcggtgccatcatgtggggcatgaaatacacgcgaatcagtccgaccatcggcgccatgccgggcatcaagtgcttcatcgcggcggttctgggcggaatcggcaatacggcaggtgctgtgctgggcggtctgctcatcggctttatcgaaattgtcacggtcgcgctctttcctgcgctctccggctatcgcgatgcgttcgcattcgtggtgctgattctggtgctgctcgtcaagccgaccggcctgctgggcgaaaaaacgacggagaaggtgtaagctatggcaaaagtaaagaaaagctcggtcatcctgacctgcctgctgctggctctgctctgcggcgtgctgttctatatcgaaggcaatgccagcaaatatatcatccgcatcacaaggctgtgcgccatcaatatcgtcctcgccctgtccatgaatctggtcaacggctttacgggcatcttttccctcggtcatgcgggctttatggcaatcggcgcgtattccgttgcgctgctgaccatccccgtcgccaaaaaggaaaccatcttcatgcttgagccgctcatcgcgccgctcaacacgctgaccctgccgttcggcgttgcgctcatcatcggcggcttgctggcagcggcattggcgtttctcatcggtctgccctgcctgcgtctgcgcggcgactacctcgcgattgcaacgctcggcttttcggagattatccgcatcgtcatcaccaatgcccaatgcctgaccaacggcgcgcagggtctgaaatccatccccgcgacggcgaacatctggtggtgctacggcatcgcgctggcgaccatcatcttcatcgccctgctcatctcttccagctacggacgcgcattcaaagccatccgcgaggacgaaattgcggcggagtccatgggcgtgtcgctcctgcgccataagatgctctcctttatgctcagtgcgtttttggctgctgtcggcggcggtctgttcgccagctatatcggcacgatcggacccgacgtctttcaggtctcccgcacctacgatatcctgatgatcgtcgtcatgggcggcatgggctcgatttccggctccgttctggcggctttcatcgtgaccatcggtcaggagtggctgcgcgtgctggacggcccgcttcctttcctccccttctggcccgagagcggcgtttccggcatgcgcatggtcgtattctccgtgctgctgctgattatcattctgttcttccgcaacggtcttttcggacataaagaagtgacgtggtcctccatcggcaagcggctcgccgccttgagcggacacggaaaaggggtgaagagcgatgaataagcgtgtgcttgaagtcaatcatgccaccatgcgctttggcggtctggttgccgtcagcgacttatccatgcacatcgacagtcaggaaatcatcgcgctcatcggtccgaacggcgcgggcaagacgactgccttcaacatgattaccggcgtctataccccgaccgagggcagcgtcacccttctggggcgcaacatcaccggcatgcgtccggaccgcatcgcgcacgccggcatcgcgcgaaccttccagaatatccgcctctttaaagcactgaccgtgctggataacgtgatgattgcgcagcatctgcggctcacctcctcgtgggtcggtgccgttctccgcttcccccgctatcgccgcgaggagcagcacgcctatgaacgcgccagagagcttctgacctatatgggcttgtgggatgtccgaaacgagatatccagcagccttccttacggcatgcagcgcaagctcgaaattgcgcgcgcgctcgccacacagccctccctgctcctgctggatgagccggcggcaggcatgaatccggctgaatctgccgaactgaccgagctgattcgcggcatccgcgaccgttaccatctgaccgttctgctcatcgagcatcacatggacgtcgtcatggatatctccgaccgcatctatgtgctgaactacggcggcttgattgccgaaggcacgccctctgagattcagcaaaacgacgacgtaatccgcgcatatctgggaggtgatgaagatgaagcttgaaattcgggatttgtgcgtttcctacggcggcatccgcgcgctcaagggcgtcagcctgagcgtcgatgagggacagattgtgacgctcatcggtgccaacggcgcaggcaaatccacgactctccgcgccatatccggcttgcagaaggtacaaagcggctcgattctctacggcggcgaggagctgaccagtctgcctgccaaggaaatcgtccggcgcggcatcatccacgtgccggagggtcggcgcgtctttccggatatgacggtggctgaaaacctgaaaatcggcgcattcctgcggacggataaagccgccatcgcgcaggatatggactatgtctattccctctttccccggctgaaggaacgaagctggcagctggcgggtacgctttccggcggtgaacagcagatgctcgcagtcgggcgcgcgctgatgagccgtccgaaggtgctgatgatggatgagccgtcgctgggtcttgcgccgctgatcgtaaaggatatcttctccatcatccggcgggtgaatcaggacggcatcaccgttttgctcatcgagcagaacgccaacgccgccctgcgcatcgccgactatggctatgtgctggaaaccggaacgattgccctgagcggtacgggtgaagagctgctcaaaaatgaatccgttcgcgaggcgtatctgggaaagaagaaataagctcctttcccgccaaaaagcgaacaattaccgtaaagctgcgtcttctccccgtccctactcgtttaaaaccaaacgcataacacccgcggcatccgtcaaagcagacgaattccgcgggtgtttcttttacactttcccgtatttcgagtataacaaaacgaatgtcgaatttattcttgaaaccgaacattaaaagtgataaaatccatttcattctgaaactaacccgaatctttccgaacattcggttttatcgttcgggttctgtttcgccattctgaaaggagaacaacatccatgaagaaactgcttgctctgcttttcgcgctcgttctgaccgcgactgctgccttcgctctcgctgaagacgcgtcccccatcgccatcaaggcgctcatcctgcccaagttcgaaagcggcgaaatggcaggcgatttcccgggtgaggctcagtattactatgaaggctactgcatgggcggcgaggaatatgatatcgtcggcggctttgagggcaacaagctctatgtcaaggatggcattgcgctgtatgtgaccggcatgggcaaggtcaataccgccctgagccttcaggctgttctgatggacaaccgcttcgatttcagcaacgcctacatcatcagcaccggctgcgccggctccgcaattgagtacggcgtgatgggcgacgtgttcgtcatcaccgcaaccgttgacttcgacctcggtcaccacgctgacccacgtgagcttgccgacgcgaacggcaccacctggtaccatgacgcgagctacgacagcgcctcctacaagatcctgaatcaggagctgtgcgacaaggtttacaacctcgtcaaggacgtcaagatcgagaccaccgaaaaaacccgcgctttcatggcggctgctttcgacaacgccgagtgggcgacccgcgatccgatggttctgcgcggcacgaccgttaccggcgacaactactggaagggcgagcatgaccacatgaatgctctgctcatgaacgagacctatggctgcccggatccgtacgcgctgaccgagatggaagacaacgctctggctgtcgtcctcgaccgtctgggcatgctcgaccgctacatcatcatccgcgactccgtcaacaccgatgcgttcatgaacggcgcttctccggaaagcctgtgggatccgaacttcgtcgattccctcgcttccgatgagagcgttgagtccgctgatatcttcgccaccgctatggagaataacttcaaggtcggcaaggttgtcatcgacgcaatcatcaacggcgaactgtaagccggtttttaagctcataaaatcaagcccgacgggagctgctcctgtcgggctttgatatttatctttatccgctcgtgaaaaagcgagctgtgtccgcaaaacacggaagccttgcgcaattttctatacgtacatacgccgcgtgagcagcacttttcggctttgctcacgcggtttatgtataggcgaaatcgattcgctttaggaaagcagcattctgtcgttcgcgatttcctgccccgccgccttttcaaacagctgcatcagatcttcacgggtcagcttcttcttctcttccccgcgcacatcgaccacaacgcgtcccgcattcatcataatcaggcggttgcccatcgcgatggcatctttcatgttgtgcgtaaccatcatcgcggtgagcttctgctccgcaacgattttctccgtcagctccaaaaccttcgctgccgtcttcgggtcaagcgcggcggtatgctcatcgagcagaaggagcttcggcgtgcgcagcgccgccatcagcagcgtcagcgcctgccgctgtccgccggaaagcaaaccgaccttgctgctcatgcgttcttccagccccagccccagcgtgcgcagctgttcgcgatacatgtcgcgctccatgttggaaatgccccagcggagcgtgcgcttttcgccgcggcgcatcgccagcgccatattctcttcgatgttcatggttgccgccgtgccggtcatgggatcctggaacacgcgtcccagatacttggcgcgtttaaactccggcagtcgggtcacatccacaccgtccacctcgatggttcccttgtccacggtgaatacgcccgccacggcgttgagcgtcgtggacttgcccgcgccgttgccgccgatgatggtgacaaagtcgccttcgttcagcttcagatcgacatccgtcagcgcacgcttttcggtgatcgttccgggattaaacgtcttggcgatatggttgatattcagcatgatgcgctcagccatggttcgcgcctcccttcttttcctttctgaagtacttgttcttccagaaaggcacggcaaggaacatcgcgacgacgagcgactgaagcatcttcaggtcgttggtgttgagtcccagccacagaacgacttggatgacgatataatacagaatcgcgccgatgaccacggcaaagagcttgagcgcgaaattgtggaagatcttggagaacacaacctcgccgatgatgaccgccgccagaccgatgacgatagcaccgcgtcccatgccgacatcgacaaagccctgatactgcgtcagcagcgcaccggcaaaagcaaccagaccattagagagcatcagtcccagcactttatcggcatcagtgttgatgccctgcgcacgcgccatgttcgcgtttgcgcccgtcgcacgaagggagcagccgcgctctgtgccaaagaaccaatacagcagcgcaatcaccgcgattgcaagcacggcaaggatgatgaacgggtttttcatcgaaagtgctcttgcgtttcgggcggaaacgatcaacggatagttgttgacgctgaccgcgagattcgccttgcccccaaggatgcgcaggttgatggagtaaagcgacagctgggtcaaaatgcccgccagaatcgcgggaatgcccataaacgtatgaaagatgcccgtcgccagtccggcaaccatgccgaccagaaacgccgcaatcatcgcgacccatacgttgcagccgccgatgatcagcaccgcagcgacagcgccgccggtcgcgatgctgccgtccaccgtcagatcggcaacatcaagaatgcgataggtgatatatacaccaatcgccataattccccagattacgccctgggacacggcgcttggaagcgcgttcagcaatttggcaatctccacgggattgtcctcctcttttcctcttatatacgtgaagccaaggaagcgttttgccgcttccttggctcatgttcgcttaaatgagcttactcaatcgctacataatctgccggcatcgtcagccccagcgcctcggcgttcaccgcgttgtacttcttggtgaagttcggggcggactcgaccttcatcgtgctgacgtccgcgccgttggcgaggatgtcatacgccatttcgccggtcttgtagcccaggtcatagtagctgatggtcagcgtcgcaacgccgcagcccttgcagatgccttcctcacccgcgacaaccggaaccttcgccggaatcacaacgttggcaatcgtctcggtatacgcagcggcggtgttatccgtcgggatgtaaatcacgtcgctcgcgtccgcagcagtctgggtgacggaagcaacgtcattggaatccgtaaaggcgaactcggtgcaggtataacccatttcctcgagatagcccttaatcgtcgtaatctggtagacggagtttgcttccgcagagcaatagagcaagccgatgttcttcgcctccgggaaaagctcctgaatcatcgacgcctgaccatccagcggagcgaggtcgctcgtgccggacacgttgatgccggtcgtgccgttccattccttcatgcccaatgcggtcgcgtaatcggtgatggacgtacccagaatcgggatatcgcccgtcgcggaaaccgccgcctgaagcggagaggtcgcgttggcgaggatgagatccacgccgtcggcggcaaacttgctggtgatggtcacgcaggtcgccgcgtcgcccgccgcgttctgctcgtcgaacttgacgtccggcattttctcggtcagcgcatccttaaagccctgcgtcgccgcatcgagtgcctcatgctgtacgagctggcagattccgacggtggtcgcgcttgcgcaggccgatgcagccgccatagccaaagtcaaagcgatggttgcgaattttttcatagtcgtatcctccctatccggtgctgccgggcttttgctttttgatgcgctttcgttttcaaaagtgcaacgccattatatagccagatgcaaacatttgtcaagcatattttcgaaatttctcagtatttatttgactttatttcttgatttcgcatttattcgatatgatacgttgacaattcgtcttaaaatttcctgattttttgtcaacaaacatagcgattttccttttaatttaagccctcagccgttctgctggacgcaaaaagccgccgagcgcaaagcccggcggtttggggttcatcagttaaatccgacgaccttctgactgattcgatagcccgtgatggcgacgcggcgtccaaacctgcccggcaggtggagcagccgccccaacaggcggtgatagcgcagattccggtaaagcgcaggctgaacatccttgatatactgccaaagctccttcttcttctccagattctcctgcgtgccgctcttgatgagcaggatagaggaaaccgtggtgatgatttccagataattgcgcatgtatttgcgcttatgctcatcctccacgctttgcagatcgacgcactccaccagcagccggttgaccagcagtgcctgatcgatgcggcgaatcatgacctgctcctgcacggactgatcgtcgcgtccgatgaagtaatggtagaggtcttcatccagatagagcatcgtctgcacatgggtcatcggctgatagacatacaattcgtccacatagaacgtgtgcttcggcagggacaagccgcagtcgcgcagcagctgtgtgcggtagatgaccgagtgcatcagcagatagtgtcccagccccatattcacctcgtcccagccgaatacgcggtcgatgggcagcgaactgcggtactgcatgacatgcttatgcttgacgcccaccttgtcatagacgtaattgcagatgagcatatccacgctctcgtccttttccgtcatcgccttcaggcgggcaagcacgcgcttgaagctctcctcatccacccagtcatcggaatcgacaaccttgaaatagcgccccgtcgcgttggcaagaccagtcattaccgcatcgccgtgaccgccgttctctttgtgaatcgcgcggacgatgccgggatttctgcgttcaaactcatcggcgatttccgccgtcctgtccttggaaccatcgtcaacgatgaggatttcaacgtcgtcgccgccggaaagcagcgtttcaaccgcgtgatgcagataatcctgcgaattgtaactcggaatggcgatagacagcagtttcatttcaagggacgcctcttttcttctttcggcggattagtacagcgtaacatccgccgcatcggatagttcttcgattcgtgcgctgagcttttccttgcagcgcgtgttgtacaggctgtacgcaatctcgtcgtgcagatcatccgtcagctcgtcgatgtccgtttcgccgctcgccttctgccgctcgtattccgcctgaatttcttcttccgtgaccggacaatcctgcgtcagccacgcataatagcgcatcgtcgcgtactgtgtgcggtaaacgtcgatatagtcctgcgccgtcacgcccaaaagctcggcgtattgcagcgcgtacttctggagtgtttcgtcctcgtcctcaagctcaagcgtttcattcagcgtttcggcgacctgagccagcgcgctttcgtaggcggtctgcccctgctcggcgcaccatttttcggtttcttcatcgaaatcatagcagccctgcgccttcatatcctgctcaacaagcagattctgaatagcggcagtcagcgccagatcatccagatacgcagaaacggtctcatcctgaatatcatatcccaaagcagcgtagctggtcaagtagttttctcttaccggctcataatccgagttcatcagcgcttcgccgttgacgagggcaatcaccgaatccgtttcagtccgggcggtttcagcgtcttcggcaaaagcgccgacagtcatcaccagcagggtcagcagcagcgtcagtatgcgtttgatcatggtatacctcttattcgtcatagggttggaatcgaacaaatggaatgctttcttcataaacaaggaaatgcgcccgggctgggcggcgcaaccgaaacggtttacgccattcccctcccgggcgcattatgcttatgggattagtagctcagaccgaagccggagacgtacaggttgccatcggcatccttatacgcatagctgccggacggggacttcgccaggacgtcagcatccatgtactgatccttgtcgtagcccggcacgtcgttcggggacgcgcactcttcgatcacggtgccgtcttcgagggtcttctccgtcagagcgatgacatcctcgcaggcaaccatggtcacggacagcttgccggtcgggttgtagttgccgacgatcacgtcaacctgagcgctgtacgcgttcgccacagaagcagcggacgtggtgtactgagcggtcagagcgtcgcagtacggctcgaggttgtcgagaatccacgggctggtgcagacgatggtgccaacgaccttgccgccgttcgcgtgaaccttgtcagcagccttctggagcttcttgatgccttcaacggtggtcacttcgaccatctcgccggtcttcacctgagagcctgcgccgaacgccgcggagatggagtcggacgcattgcccagctggcgctgcgcaacttcaaagccatcaaccaggctcaggacagcctcagtctcggaagcgcctgccttgttggtcgccttcggctggacgtagaagtaagcaacctcagcgtcgtcagccttttcaacaacctcgaagccctgaccaacgaacagctccgtcagcgccgcaagggtgttctcgtcttcgccggtgccggtgtaggagccgatgaagatcttggtgcccgcgttcttcgtcagcggcagggtgttctcatggttcttcatgaggacggtcgccttcaggtgcagcgcgtaagcctgatcgtgagcggtctcgatgttggtcgcacggacttcgtccgccttctcatagtcgaggtacgggttctcgaagcggccctgcttgaacagcgcggtcgcacggttgatgttcgcacggtcgaggtcagccttgtcgagcagaccgaactcaatagcggtggtgatatattccggagccagctcagcgccgattgcgtcggtgccagccttgatcagcagagcgaaacgctgcacgctggtcatggtctcaacgccgtaggtctgggtggtggtgatgccggagtcagagttcacgaagcccttgaagcccatgatgtcacggagcagggtcgtgatgatctcggagttgtaagcagagcccagctgcttgacctcgatgtcgtgaccgcgatagctctgcggggcagaacgatcgtcagccgcatcgcgggagtagcacggcatgattgcgccgacgcccgcatcgacagcagcctggaagccgaccagctggtacttctccagagagccctcggtcgggtacagacgccactgaccttgggagacgtgggactcgaagccgttctcagccgcgccgtcgcccgggaagtgcttggcggagagaacaacggagttctcgttcacgccttcggtgccatactgatagccgtcaaccagcgcggtgatgatgcccgcggtgacgtcctgacgctcgccgtaggtgccgttgttgcgcggccagcgcgggtcggtcaccaggtcgatctgcgggccatacatgaagatgatgccctgcgcacgccacatctggcgatcgacctcagcgtagtccttgatggcgtcgtagttgccgtcgcccagaacagccgccgccatgcccagagaatccgggaagccggcagaaatcgggttggagatgagggtcaccgggatcgccggggtgcccgccttagcggaatcccactcggcgtaagcggtggtcacgttgttgtacagcgcaacaacggaggcatcgtagttcagaccgccgcgatacacgcccgcacggatcttgccgatggacatcacctgatcgtcaaggctcgcgaaggaggaggaaccctgcttgagcatgttcaggctctcggtggtcgcgccctccggaatcacggtcatgatcttcgccggatcgatggtgccgtcctcgttcttgacctcagccagcgtcttggagaccggctgaaccatcagagcgttgaggacgaagccagcctgctcggtcagggtcatcttggtgaccatgtccgcagcgcgggtctcggcatcctgacgccaatcctcgaaaacatccagctcgtggttgttgttgagatccttgaagtacagaccgtcctgcttgatgacgccaacggtggtcacaccgatggtcgggccgttctcgttctcgtagtaaaccggctccaggtaggtcttggtcggatcgacttcctcagcattgtacggagccggaatgtactcggcgccgccctctgccagagaagcggggacaacgcttgccagcatagccgctgccaagaacgtgctcagaatcctcttcatgcaaattctccttttccatttgttccaaattgccaaaccgccttgcatgagcagttcgcctttgttgaaaatattatagtatatttgtgcagaaaagagaagggggttgtcttgaacgtgcaattgaccgtcgttaaagggatatcattcgtttcacgtcaaattcgcgtcgtgaatggaatagactgccaatcattaccatgttttgcacggcacagcgttcgccgcaggctcttttctccgcttgcggcagctttaaacggcaggctgaacccattctcagcttctccgcagtctgcaaaaagcacggaaacctcgcctacacgggttttttcacaattttccaactattaaaaaagcgggctgcgcccgccttcacttccgccgaagtccgccacacatcaaagtcttgctcacgcgggcgattttatgcaatttcctatacgttaaaaaacagtgccgcaaaaacatgcagcactgcttctaatctcaggtttatttcgcgaactcggtgcagcgggtctcgcggatgacattgaccttaatctgtcccggatattccagctcattctcgatgcgcttggcaatctcgcgggcgagtacgtaagtaccctcgtcggaaatgtcctccggcttgaccatgatgcgaacctcacgtccggactggatggcgaacgacttctcgacgcccgggaagctgttggagatttcctccagcttttccagtctgcggatgtagttctcgatgctctcgcggcgtgcgcccggacgagccgcggaaatcgcgtccgccgcctgaatcaacacagcctcgacggtctgcggctcgatatcgttatgatgcgccgcaatgcagtgaatgacttcgggcgattcgtggtaccgcttcgccatctcgacgcccagctccacatgcgtgccttccagctcgtggtcaacagccttgccgatatcgtgcagcaagcccgcacgcttggcaagctgaacatccgcgcccagctccgacgccatcaagcccgccagatggctgacctcgatgctgtgctgaagcacattctgaccgtagctcgtgcggtagcgcatacggccgagcagcttcaccagctcgtggtggatgccgtgcatgttggtttcaaagatcgcctgctcgcccgcttctcgaatctggttgtccacctcgcgtctggctttttcaaccatttcctcgatgcgcgccggatggatgcgtccgtcggcgatgagcttttcaagcgcgattcgcgccacttcgcggcggatgggatcaaacgcggaaacgatgaccgcttccggcgtatcgtcgatgatgaggtcaacgcccgtcgccgtttccagcgtgcggatattgcggccctcgcgtccgatgatgcgtcccttcatgtcttcgttgggcagggaaaccacggaaacggtcgtttccgcaacatggtcgctcgcgcagcgctgaatcgccatcgccacgatgttgcgtgcctttttctccgcctcgtccttcgcgttctgctcgatctcgcgaaccatgacgcccgcgtcgtgatacgcttccttctggatgcgctgcacgatcatatcgcgtgcctcgtcctgcgtcatcttcgcgacgcgctccagctccgcctggctcttctcttccagatccttcgcggtcttttccgcttcctccgcggcggtcttctggcgggcgctgtactcctgcgcttctgcggtcaggcggtccagctcgttctgcttgcgctcgagggtcgtttcgcgtgcgtcgagattgtccgccttcttgtcgagggtttcctctctctgggtcacacggcgctcgctgcgctgaacctcggcgcggcggtcgcggatctcgcgatccagttcattcttcaggcgaatgacttcttctttcgcctcaaggatgctttccttcttcttctcttccgcacgacgctgcgcgtcttccagcagatttcgggcatattcttccgtacgcccgatattcttttcctgaacatttttccgatacatgtagcctgccgcaccgcccgctgcaagcgcggcgatgatggccagcagggtcaacaaaaacgccaatctgcctcacactccttctttgccaaattctcaatttcatttcaaatacagatgggcaaagccaaaaagtatgcagattgacgcctgataatctggcgataaaacaacacaaattaggcacagaaaacaataccgttcagacatgcacccttacggtttctccgcctatcaagttttgatgtatcaaacgcacggaaacagcggtttaaacgcaccccgtgtcccgcgcgcaatatccagcacagccttacctgcacacgatttcactttgactgactctattttaacgttgaaattcgttcatgtcaagcgaatttgtcaattcggtgaaatttcgctgatgaatttaagcagattctatagaaaaagacggacatttctgcccgtctcaccttccggcaaaaggctctttttccaaaaatcagggatatttctttccgtaaatgaaagaatatctgaattttccgtggacatgcgttactttccggcatgctcgaagaaatcgttcttctcctcgtccggtccgacattcgtaaacgccagaccgaatttggaattatcatactcgccgaaatcctcgacatggtagcgcgtcgtctgctgggaaatatggcaggcaaacgcctcctccgcgatatcaaacgctgtcttgccgccgaaggcttccagcggctgacgccaatccatcctgatgggattccggtcatacagatgcagatacagcttgctgatctgccacggctcggtctgctccagcttttcgtgctgataattcgggtcagccgccagcgtgaccgccgcctgcgccgcgtccgccgccgcccgatgcgcgccgtggccatattcgccgttcacgtcctgcgtcaccacaacatccggtctgcatgtgcggtatacgccgacgacatagcgcagaacggcttcccggctccaccccttctgcgcgtacattttagaaagatgtccctgatactgatccgggaaattgccgatgatggggtagtttttcacgccgcagagccaaagcccgtcgagcagttccagcctgcgataaggcattgtcggcacgagataggcgacctgcaccttcatcttcttttcgcccgcgtaatacgggatcgtgccgcccagaaacagaatttcatcgtccggatgcgcggcaagtgccaataaatccgccttctcaagcgtcggctcccatttctgtacccaatccggcgcatctccttcggcaaagacatgcagctcgatgatgaacagacgtccctgcgcatccttcgggcgaatgcggatcttttcatagcccgcctccagcggcacatactgcgctaaaaagcccgtttcataggttgaaatcgtctgccagtttcccgcttcgtccggagtctgcacatcaaacggcgccgcgttttcaaaaaactgaatgtatacgctgcccatcttctgcccctgcggtgcttcaatatccagataggcgtttcgattggtggaggacgaccagtacgacttataccgcccgtccgtcatgttgttcagcgtctttttgccgacgctcgacagcgtgcaatcctttgtcatctcctgcgcggtctgtgccgacgcagcggcagtccacatgaaaagtgccgccaaaatcagcggcaggatgattttcttcatgctttttgtttcctcgatttaaaattttttaccatcataccacattcttcccataaaataaagacgtttcctctttcgcccttgttcccgtcaataaacgatgatataatagaaatgttgccatgcgcagcatcggaagggacttcaacacatattgaaagggagatttcacttcatgggtatcaatgcgattatcggtcaaagcggcggacctacttctgttatcaacgccagtctcgcaggcgtattcagcgcatgtcgggcgcacggcgtgccgacagtctatggcatgcgtttcggcgtacagggactcttgcaggataagctgatcaacctgaccgatgcgctcagcgctccgggcgcgctggatttgctgcgccatacgcccgcctcctatctgggaagctgccgcttcaagctgccgcccgtcggcgagggcgaagacatctaccgcgcgttgttcgatgttctgcaccgctatgatatcggctatttcttttatgtcggcggtaacgacagcatggataccattctcaagctgagcgactatgccgccaaaatcggaagcgatatccgcttcatgggcgttcccaaaaccatcgacaatgacctgatggtcaccgaccatacgcccggctacggttccgcggcgaaatatatcggcatgaccatcaaggagcttgtccgcgattcgaccatctacgacctgaaatccgtgaccgtcgtagaaatcatgggcagaaacgcaggctggctgaccgccgccgccgcgctcgccgaggatgaggactgcgaaggcgcggcgatgatctgtctgccggagattccgtttgatccggatcattttctctcgcgcgtcgcagagcttcagaagaaaacgccgtcgctggtcatcgcggtttccgagggcattcgggcggcggacggacgctacgtctgcgaactggcagacagcaatctggtcgtcgatcccttcggtcacaagtatctgggcggaacggcgcgttacctcgccagtctgattggcgcaaagctgggctgcaaaacccgcgccgttgagctttccacgctccaacgctgtgccgcgcatgccgcgagcatgaccgacgtttccgaatcgttcgccgtcggcgaagctgccgcactcgccgcgctcgccggcaagacaggcatgatggctgcgctcaagcgcgtcagcgatgcgccctatctctgcacgacggagcttcacgatattcacgacatcgccaatcttgaaaaaaccgtgccgctctcctatatcgacgcggagaactatcgtctgcgcgaaccgttctttgcttacgcgcgtccgctcatcgagtcggaggtcgagccggagtatatccgcggtctgccgcgccacctgacgctgccgagataaggaatatccggtcctgccgcaaatgcggtctgaagggatatgaagatgattttcaaaatttgtctgaagcggcttcgctattcggtctatgcgctgtttgcgctgacgctctgttatcgctttgccgagcgatgggacagcggcgcgctgtattcgctctttttattcattctgcttccgctttttgtcctcgcgctggtttgggcagtttatacgtcgattcgcgataccgcccgctataagcgcagcggcgttctgccgaacgacccgccgacgctggcagagcgcatcgtctggttcatacaggacgaattcagcctcgtcaagtcgctgaccgatcgcaaaaaagcacgctttttcgcctttcggcttctgggctttgcgctgattgccgcgggatgtgcgctcatggtttccgagcgcatcatttgggcaacgcttgccttcatcgcaggcgtcgcgctgatttacagtgcggcggactgagtccgctctcacttccgccaaagtccgcaaaaacattgcagattttgctcacgcgggcgattttacgcaattttctatacattaaaaaaggcagactgagtccgctccggcttgttggcataagcaaactgggcttaaatagcaaaatcaagaaattcagctattctttcatttgtgaaaagggctattctcccccttcggggggaaaatagctttttgtctacattctgaggcggactgagtccgcacccacttccgccgaagttcgtaaatcatgcagactctgaattcagcccataaacacaaatcggcttactccatcgtccttgatggaataagccgatttttttaagagggaaatccaagaacctcaggttcttggtggggtttggggcaaagccccaagcgttatcctgtccgtaaccccctgcctccgctgcgcgattccttcgtgtcagttcagcaaacggtttcggcatgaaagcagcatgcccctcaagctgcaatccattccttattctttacccaaaagcgccgcgccgatgatgcccgcgtccgcgcccaaacgcgcaagctgaatgctcggatacggcagcgtcttgaagaaaaccaacggcttgaccgcgtcgcgcaccgccttgagcagatactcgcccgccatcgacacaccgccgcccagcacgatgacttccggatccagcacgttgaaaatgctgacgatgccgtgcgccagtgccttgacatattcgtcaaagacccgcttagcagtcgcatcgccttccttggcgcagtcgataacgattttagcgttaattttctccggatctccgccgcagcgttccatgatgaggctcttcgggtcttccgctaccgcgcgctttgcatcgcggataatcgccgtcgcagacgcataacgctcaaagcagccgcggttgccgcaggtgcaaagctcgccgtccatcttgataatcatatgtccgatttccgagccgatgccgtgtacgccggaatacggcttgccatgaatcacgatgccgccgcccacgcccgtgcccagcgtgatgaatacgctcgaatccgtacccttgctcacgcccgcaacagactctgcatagcccgcgaccgtcgcatcattatccacgataatcggcaggttgaaatacttgcgcatttcggatacgaacggcacctcgcgccagcccaggttggtgcagaaaggaataatgcctgtcttggcatcacagatgcccggcacacccacgccgattgccgcaacatcgtccatcgtgatgcccgcctgctgtgcaacatccttgcaaagcatggcaatgtcatgaatgatgtcctgatacggacgctccttcatcgtcggggtcgagcctttggaaagaatctcgccctgctcattgacaacgcccgccttgatgccggttccgcccagatctacgccaatatacatcatatatatgcctccccattcggttgattgactctgtccttgtccctgcttcgcagaagcagggacggaataacgtttttccggtttactcgttcatccgtccgtaatgctgcgccagcctgcggtcaagctcgactacagcgtcatatccttcagccttgagccgccagttccgcgccgcaatctccacaatggtcgaaaggcttctgcccgggcggacaggcacttcgatcagcggcagcggcacgcccagaatatccatggtcctttctcggttgcccaaccggtcataatccttcccctcatgccaggtttccagattgatgaccaaatcaattctgattcgccggacgattgcgccgatgccgaatatctccttgacatcgacaataccgatgccgcgcagttcaatgaaatcgcgcaccatctccggtgattcgccatagagcgtgcgcccgacacgcgagatatcgaccacgtcgtccgtgacaagctgatgcccgtgcttaatcagctccagcgcacattcgctcttgcccacgccgctttcgcccgtaatcatcaagcccacaccgtatacatccatcaatacgccgtgacaggtctgccgcggcgcaagcgcttcgctcaggaatgtgatggctttcgcagaaaaaatgctcgtttcctcgtctgcgccatagaccggcacatcgttctcctgcgcccgttccagcagtgccggaggacactgcatgctgcgggcgataatgatgcagggaatatgataggaaaaatagcgcgtcagccgttcatccagcacattgggcggcagactgcccaaatacgccatctccgttttaccgatgacctgcggcctttcgaaagcgaatacatcgaaatagccggcgaattgcagtcccggacggcaaagatccgcctgatcaatgctctccgccgtctccttgcccgccgtgctgatggttctcagccccaatgccgcggcgagcttatgcggggatatgcccattctcgttcctcccattgcgatctttttttcattataacccatccgcgccgtcaagaccataggcaggagcatttttccgacaaaaatgacgtttattccgcatccggccaaaaccgcttcatcacaaacgccgccgaaggtttccccacggcggcgcatgatgtatatttccttaccgaatgcccaaaatctcttccgcacgggcaacctgctcgccgctcggcgtcggcacgccctccagcggataggcaatccccagcttttgccacttggacagccccagtgtatgatacggcagaatctccacgcgctcgacgtttttcagcgttccgatgaacgccgccatctcgcgcaggtcgtcctccccatccgtcagccccggaaccagcacatggcgaatccacatcggcttgcccatgtcgctgagcctgcgcgccatcgcgaggatgttcgcgttgcccatgcccgtcacgcgccgatgaagctgttcatccatcgccttgagatcgagcatcaccagatcggtcgccgccatcagccggtcaaactccttctgatacggctcccccccnnnnnnnnnncgtcctcgcggtagggctggcccgccgtgtccagcacggtatgcacgcccttttgatgcgccaattcaaacagctccgtgacaaatgccatttgcagcatcggctcgccgccgctgacggtgattccgccccttttgccgtccctgccccaatacctttgatatcgaagcgccttatccagcagctcctgcgcggtcatggtctgtgcggcttcgcccgcccatgtatccggattgtggcaaaactgacacctgagcgcacagccctgcaaaaaaatcacatagcgcacgccgggtccatcgaccaagccgaagctctcgagcgaatgcacccgacccatgagcttacatgtggtcatggcaggtgcgggcgatgacgtcgagctgctgctcgcgggtgaggtcgatgaacttgacggcgtaaccggaaacgcggatggtgaagttggcatattcctccttctccggatgctccatcgcgtcgatgagcttctcggttccgaaaacgttgacgttgaggtgatgcgcgccctgatcgaagtagccgtccatcacctgcacgaggttgttcgcgcgctcgtcatcgttgtgtcccagtgcgcccgggttgatggtctgcgtgttggaaatgccgtccagcgcccagtgatacggcagctttgccgtagaattcagggacgccagcagaccgttcttctccgcgccatagctcgggttcgcgcccggggagagcggctcgcccgccttgcgtccgtccggcatgctgcccgtcgccttgccgtaaacgacgttggaggtgatggtcagaatggaagtcgtcggctcggaattacggtaggtgtgacgcttcttgattttctccaggaacgtgccgagcagccaaaccgcgatatcgtcggcgcggtcatcgtcgttgccgtagcgcgggaaatcgccctcggtctcaaaatcgacgatgaagccggtctcgtcgcgaatcgtctttaccttcgcgtacttgatggcgctcaggctgtccaccacgtgagagaagcccgcaatgccggtcgcgaacgtgcggcgcacatcggtgtcgatcagcgccatctcttccgcttcataatagtacttgtcgtgcatgtactggatgaggttcagcgtgttgacgtacagaccggcaagccaatccatcatgcggtcatacgcggcgatgacttcatcataatcgaggatctcgctggtgaccgggcgatatgccgggccgacctgctcgcgggtcttcatatccacgccgccgttgagcgcgtagagcaggcacttggcaaggttcgcgcgtgcgccgaagaactgcatctccttgccggtctgtgtcgcggaaacacagcagcagatcgagtaatcgtcgccccagaccggcttcatgacatcgtcgttttcatactgcacagagctggtcagcacggagattctggcggcatacttcttgaagctctccggcagagaggacgaatacagcaccgtcatgttcggttccggcgagggacccatattttccagcgtatgcaggaaacggtagtcgttcttggtgaccatgctgcggccgtccacgccgatacccgcgacctccagcgtcgcccacaccggatcgccggagaacagcgcgttgtagctcggaacgcgggcaaacttgaccatgcggaacttcatgaccatgtggtcaatcagctcctgcgccttttcttcggtgatgacgccgcgctccaaatcgcgctcgatatagatatccagaaacgtggagatgcgtccgacggacatcgccgcgccgttctgcgtcttgatggcggcgagatagccgaagtacagccactggcaggcttccttcgcgttggcggcgggcttgctgatgtcaaagccgtaggcagccgccatcgccttcatgcccttgagcgccttaatctgcttggagatctcctcgcgcagacgaatcacgtcgtcggtcatcgtgccgtcgccgcagttgctcaaatccttgttcttctcctcgatgaggaagtcgatgccgtaaagggcaacgcggcgatagtcgccgacgatgcggccacggccgtaggtatccggcagaccggtgataatcttgttatggcgtgcatgcttcatttcaggggtatacgccatgaaaacgccctgattgtgggtcggcgcatattcggtaaagattttgtgcagctccggatccggctcatagccgtaattccggcaggcttcctccgccatcttgattccgccgaacggcatgaaggcgcgcttgagcggcttatcggtctgcaagccgacaatctgctccagctccttgtccgcttcgctgatatagcccgcgccgtaagcggtcagaccggaaacaacatgcgtttccatatccagcacgccgcccttggcgcgttcctccttctgaagcccctgaaggatgccccagagcttattggtcgcctcggtcggagccgcaaggaaggactcgtcgcccgcatacggcttgtaattcttctgaatgaaatcgcgcacattgatttcttcgcgccaaatgcgcccttcaaagccttcccactgctcaaaatgaaccatgcaaactctcctttattccgtttaccgtagaggactctctgaaacgttttttattctaacatagcgtccattcgccgacaactgacgaggtcaccaaggaaaagccccgcgttttgttatcgccccatggatttccaaacccgctttgttctttgctccgcgccgatttttctgcgcggcatggcttttccgattcttccgccgcagaccagcccgcaaagcatcagccgttgcagagcatcgtcctcctatactctgcatattcaagcgggcgtatgtaagttagtatcaactaacatcctgtattctatccgatatccgcgcagttgtcaagccccgcgcatcgcctttaaaatcatctcggatgatttttcacggcttctttacggttcaaaaaagcgggctgagcccgccttcacttccgccgaagtccgccacacatcaaagtcttgctcacgcgggcgattttatgcaatttcctatacgtcaaaaaatgcagggattgaatccttcgactcatctccctgcatgaatccattcacttgatatccttcggtttaaaccagattcttgacaaaccgctcgatgcgatccacgcccttgtcaatgttttccatcgacgtcgcgtaggagatgcggcagaagccctctgcgcagaacgcgctgcccggcgtcagagccacatccgcgttttcaagaagcatgcttgcgaaatccatcgagccggtgatctcgcagtcgcccagatgcttgccaatcagcgcactcatatcgaccatgacatagaacgcgcccttcggcatcacgcatttcagcccgtcaatcgcgttgagacgcgccacaatgtgctgtctgcgctcgtcatacgccttgcgcatccgctcaatttccgccgcacccttcggggaacggagtgcttcctccgcggcatactgcgcgatggagttgctgccgctggcaacctggctttgcaggctgctcatcgccttgatcacgttcaggggacccgccgtgtagccgatgcgccatccagtcatcgcgtaggatttggatacgccgttgatcacgatggtctggttatagatttccttgcccagagacgcaatggagacatgctcctcgccgtcatagatgagcttttcgtaaatctcatcggaaacaacgtagaatcccttctcgactgccagcttcgcgatagcctccagctgctcacgcttccagacacagccgttcgggttgttcggcgaattgaggatgagggccttggtcttttcggtcacatacggcgcaatttcttcggcatcgacgacgaaaccgcgctccgccttgccctcgatcagcaccggcacaccgccgacaatgcgcacgatttccggataggacacccagcacggcgtcggaataatcacctcgtcgcccgggttgacaatcgccgccagcgacgcataaatcgaaaacttcgcgccgttggaaacgacaatctgctcaggggtgtacgcaagtccgttatcccgcatcagcttttcgcagattgccttgcgcagcccaattgtgcccggcgcgggggtgtatttggtcagccccatatccagagcctcatgcgccgccgtgcggatatactgcggcgtaacgaaatccggctcgccgacgctgaaggaaaccacgtcgcgcccgttcaggcgcatttccttcgccttggcgtcgattgccagcgtcggagaaggtgcgatagcggtacacatgcgtgaaagctctaaggacaagaaaaacgcccccttaaaccggacaggcacagattgagcctgtctgaaatgaattctaaaattattatacgcccattttatccgtttttcaaccgtaaattcgcctgttttattcgattttctctatatggtttgcacatttgaatttcgattcctgcaaatcgtccgtttgcccatctcttttcctttcgccttgctttccttctgatatcttacgcggtttctcataatttgttacggaagctgagttttttattaaaaatgcttgccatattcccaattttgctgtattatgtcatttggttcagttctgtttgaggaaagcatggttttgcttttttcattcagactcgaggcatcttgtgaaacatttttggaggtgttactttgcatcgcatgaccaaatgggttctcgctgccgcgatggcttgtgttttgggcacgggcgctgtggctgtcgccgaggattcctactacctcgaactgcccaccaagggaattactgcttcacgaaagattacggtcaacgtgccggacgagaatccggcgcaggatggcattaacccgctgaccggtgagagctggtacggcaattattatccgattctcgtcaatattgacgcgcaccccgaagctctgccgcactggggtgtgtcctccgccgacatttcctatgaaatgccgattcagtccgacggctctacccgttccgccatgctctttatgggtacgatcccttccggcgcgggtcctgtgcgttccggccgtgtgccgatgggcagcctgcgcgaaatgtggggcggcgcatgggtgttctacggctggcagacctggccgaacaagaccaacaccaccgttgacgttgtggactgggcactctccctgcacaaggatgcgcgcgtaaagggccgctgggtgttcccgttcgtcgagggcatggagcagaattacaacaagctctttgagcgcgtcagcgacggcaaccacgtcaacccgcacaatgtgcaggtcaacctgcccgcagtcgcttccctctttaccgaggagccgaccatgcatccgttcaagttcacggagaccggtctggaccgcggcacggatgtgtccgccatcaccatcaattacaagaccaccaatccggcgtatgtcaccgagtatcagtataacgagatgaccggtctgtacgagcgttaccgcaacggcgagccgtactacgacgcgctcaacggcgcgcagaccgaatacgctaacgtcatcgtcctgcgcacggatgtcagctggttcaacggtgcgccgcagcgtccggtcattcagctggtcggtcagggcgttgccgaaatcttccagaacggcaagtacatccgcggcacatgggttcgcacgcacgacggcaagaccggcgacgacgtgaagtccctcaccagccgtatgatcttcctcgatgagaacggtgaggagctggagatgaaggtcggcaagacgttcatccagattgtgaacaacgaccagccggttcttgtcagctcgagcgccgccatcgccggtgcttccgcacaggcgactccggaaccgaccgcgaccccgaagccgacccgcacgccgaagcccacccgtactccgaaggcttccgccaatgcgacgccggttcccgttgagggtggcgcagaagctgagcaggataataccttcggcggctaaaaacgcatcaggctgcatattttaaagggagctgcaaaacgcagttccctttttttctgtgataacgcaagcaccccgccgcaaaccatgcggcggggtgctgctgcttcaagccttatcttaggtttttatgaacgctcatcagtcattcggatgctccgcgcggtatttggtgagcagcttctcgattctgttccacggattgagcaggtagctcagggactgatcgtggttgagcgtcgcaatgacaaacgccatatacttgctcatatccgcctggctgaaccacgggcgatccagcacttccttgggcgtataggtcaggttcgtagcgaatacatggtcgatgatgccctcgctgtacgccttgtcgaacgcttccaatccgctggtgaagaacgcgaacgtcgcgcccgcaaagacacgcttcgccttgcgcctcttgaggttgtacgccaaatcgaggatggagtcaccggaagcgatgatatcgtccgcgacgaaaacatccttgccctccacgctgtcgcccagatactcatgcgcgacaatcgggttgcgtccgttgacgacgcgggtgtaatcgcggcgcttatagaacatgcccatgtccacgcccatcgcagagctgtaatagatgttgcggttgagcgcgccctcatccggagagatgaccatcatgtgatgcttatcaatgcgcagatcatcgtaagtatggcacatcgccttgagcatctgataggtcggcatgatgctctcaaatccgctcagcgggatggcgttctgcacgcgcgggtcgtgcgcgtcaaaggtgatgatattggatacgcccatgttgaccagttcctgaagcatcacggcgcagtccatggattcacgggcggtgcggcgatgctgacggccttcgtagagcatcggcatgatgacgttgatgcggtacgccttgccgctgacagccgcgataatgcgcttcaggtcggcataatgctcgtccggcgtcatcgggatttcgcgtccatagagcttataggtgcactgatacgcgcccacatcgcagatgataaacaggtcatagccgcgaacggaatccgcgatcatacccttgccttcgcctgtaccgaaacgcgggcagtgcgcttccagcaggaagccgttcttatccgagccgtagaagctgtggagcttctggtcagaggaggaatccacctgccagttcatcaggtactcgttgacgcggcgtcccatttcctcgcagccgttcatggcaatgacgcccaacggcgcgaccggccgcatcgggaatttctgggacgattcgttgctgatgttctcgttcattcttgaaaaccccttcactgtgtcgatgagctatccagttgcagaaacaaacagcttcattatagcacaaactgtgccggaaatccttcacattttgcccaaaacacaaaattcgtccgcttatgacaattttcattctgctttacggcaatgctatacgacataaacgtttttttaacgttcttccgtgcgtccgtgcgcttgaccccccgcttttcgcttggtataataaggcgaaatcaaggtcaaggaggtcctttgcgtgaagcgcatcgtccttaccggcggcggaacagccggacatgtttccccgaatcaggcactcattccccatctccttaaggagggatgggacatccactacatcggaaccaaaaacggcatcgaacgcacgctcatcgagcctatgcagggtgtgacctatcacgcggtcagttccggaaaactgcgccgttatttcgacttaaagaatttcaccgatcccttccgcgtcatcgcgggagcattccagagcatcggcatcatcggcaggctcaagccggacattgtcttttctaagggcggatttgtcagtgtgccggtcgtgttcggcgcggcgatttgcggcgttccggtcgtgatgcacgagagcgatatcacgccagggttggcgaacaagctctgtaagccgttcgccaagtccatctgcacgaccttccccgagtgcgccaagctgctcgcgcccaagggcgtacagaccggcacgccccttcgtgcgcagattttttccggcgaccgcgcccgcggcttgaagctcgccggctttgacggcagcaagcccgtgctgatgatgatcggcggttcgctgggcgcgcagagcgtgaacgccgttctgcgccagtcgctccccgcgctgacgaagaagtttgacgtgctgcatgtctgcggcaagggcaatctggatgaatccctgctgcaaacagcgggctataaacagtttgaatacctttccgacgagcttccggatgccttcgcgtgtgcggatctcctgctctcccgcgcaggcagcaactcgctctccgagctgatagcgctgcacaagcccgcgctgctcattccctatcacagcggacgcggcgatcaggtgctcaatgcaaattcgctcaaggaacgcggcttggcgcatgtgatgctgcaagccgacctgacggcggaatccctgccgcccgccattgatgcgctctgggaagaccgtgcgctgctcactcagcgtctttccgctctccccgacgcggacggcacacagctcgttcttgaccagattcacaagtatcagaagaaatgagaaaaggacgatcggggctttgccccgaaccccacaagggaactgagttcccttgacccttcactacgctatcgctttgcgatagctgaggatatcatttgttcaaaccaccgcaaagcgaaggaaggatgcagggaacaagattccctgccggaagtttgaaggcggtgcctcatcgtcttcatattagcgaaagaaggcgaaacccttgagcgaagaaattttagatatggcggggcgtgtcaacgcgctcgtcaagctgatgcacggcaaacagaccgatgaacagattcaaatcgcgctctccgacgcacacgaacgcgatatcgccgccgcgcttgagcagctcgatgcccatcagcgcgcacgtctgtatcgtctgctgggcgtcgggcgcgtcggcgatgtattttcctttgtcggcgatgccggaaaatacctgcgcgagcttccgcaggatgacgccgcgtctatcgtcgaagcgatggatgccgacgacgccgttgacgcgctggaaaccgtatcgcccgaattgcgaagcgcgctgattgaaaagctcgatccggagtcccagcacgatatcctgctcatctgctcctatcagccggatgaaatcggcagtgccatgacgaccaatttcatctccatcaaccgccacctcagcgtcaagcaggccatgcgcgctctgattgcgcaggcagaggagaacgataacatcaccaccctctttgtcagcgacgacgacggctccttctacggcgcgattgacctgaaggatttgattgtcgcccgcgatacgattgagctggatacgctcgtcagccgaaactttcctaccgtttccgcgcacgcgaaaattgaggactgtctggaacggctgcgcagttactccgaggcgtacatccccgttctgggtgaaaagcggcgggttatcggcgtcatcacgacggacgatatcgttgaagccgtggatcacgcgatgggcgacgattacgccaagctgggtggtctgtccggcgaggaggatcttcacgagccactgaaaaccagcctgaaaaagcgcatgccgtggctgattatcctgctgtttctgggcatgggcgtttccagcgtggtcggcttattcgagtcggtcgtttcgcagattgcgctgattgtctgcttccagtctctgattctggatatggcgggcaacgtcggcacgcagtcgctggctgtgacgattcgcgtcctgatggacgaaaatctgaaaccaaaacagaagtttgagctgattctcaaggaaatgcgcatcggtttttccggcggcattctgcttggcttgcttgctttcgtgttcatcgggctgtacgtctggctgctcaaggggaagacgctctcctatgcgctctgcatctccggctgcgcgggcgtcgcgctgttggtttcgatgatgctctccagtcttgtcggcactgccattccgatgattttcaaaaaaatccacgttgaccctgcggtcgcttccggtccgctgattacgacggtcaacgacctcgtcgcggtcatcgcctactacggtctggcatacatcctcttcttccagattttacacattgcgtagagggtgaacgcttggggctttgccccaacccccacaagggaactgagttcccttgaccttccacttccttatcgctttgcgataagggcaaaaaacgatataaacgcaacaaaaccagcttgctgaaaataacaagctggttttatcctttaaaattctcgtttattcgcaaccgaaggtttccaaagggcgatgcgccaaacgggcgccgtaaacgctcggaaagccctttagtggggcgatggggcaaagctccatatccacaaatgcttagatatttgtttcttaaaatattcggtttaagcctgacagctcctttttatatacagaaatgcttttcccgtccctgattgcaacgcgatcagcgaagcggaaggttcggttttcttgaaaagtgtgaggcaaagtcccgctcgtctctcttacgaaaccttgaagccgccctcgcgcagcgcatggatgaccctctgcgcatgttcgcgatcctgcgtttccatcgtgatttccaaaatagcgtcgcggatatccaaatcgacgtccgttcggtcgtgatgcaccaccatcacgttcgcgccttccgccgcaatgatgcggctcgccagttccagctgacccggtctgtcctgcatcagaatgcgcagcttcgtcacgcgtcccgcacgcagcaagcccttttcaatgatgcgcgaaatcattgtcacgtcgatattgccgcccgaaatgaccgccacaaccttgccgcttacgtcaaatttatggttcatgatggcggcgaccggagcggcacccgcgccctcggcgaccatcttgccccgctccatcaggaaaagaatcgcctgcgcaatctcatcgtcatcgaccgtcacgatctcatccacatacttgctgcaaagctcgaacgtcaattctcccggctttttgaccgcaatgccgtccgcaatggtcttcgccgcgtccagcgcaacgacgtgtcccgcatccatggacgccttcatgcccgccgcaccggatgcctgcacgccgataaccttcacattcggatgcagcattttgaccgccgccgcaacgccggaagccaatccgccgccgccaatcggcacgacaatggcgtctacatccggcaaatcatccatgatttccaagccgattgttccctgtcccgcgatgaccatcgggtcgtcaaacggatggataaacgtcgcgccggtttcctgctgaatgcggcacgcctcggcatacgcatcgtcatatacgctgccgtgaagcacgacgttcgcccccagctcgcgcgtcgccttcaccttggaaagcggtgcgcccgccggcatgacgatggtcgccggcacgccgaacgcctttgccgccagcgcaacgccctgcgcatggttgcctgccgaggacgcgatgacgccgcaggcgcgttcttcctcggtcaggctggcgattttgatatatgcgccgcgcaccttgaaggagcctgtgttctgcaagtcttccgttttcaaataaatctggcttttttcatcggacaatgccttgaactgcaccagacccgtgcgctgtgcgacgcccttgagccgctcccgcgcctccaaaatcatgccaagcgtaaacgccatactctctccctcttttttcctgcaaacgaatcaggctcgcctgggatgctgtcccggtttctgcccaaaaccctgtgttctcggatttcccgcttattctcgtgtcgtgtttcagcccttcagtcctctggactggcgatccatatcttcaacgacgatgtcgtagatttcgccgagcgacgcgcagtattccagcaccttccacggctcgttggtatgatagtgaattttaatcatatcttcgtcgccgacggcaatcaggcagtcgccctcaaagtgatccacaaagtaatcgtaaaccttgtcctcatcaagatcgtgtccgtcgatgagcagctgcgtgtcatagcgatattccaacatggttttgctcctttcagacttcccttgccatttcgtaaatcatgatgcccgccgccacagccgcgttgagcgattccgccccgccgcgcatcggcaaagccagatgatgtgtcgccgcgtttcggacggcttgagaaatcccctgtccttcgcttccgatgaccagaacggcattttctctcggacagtgcgcgtagaaatcctgcccgcccagctccgtcgccgcaacagcatagccgcgctttttcatttcttccagcgtgcccggcaaatcatccgtcatcatcaccggaacgcggaaaacgctgcccatcgtcgcccgaagcgtctttgcgccgtacaaatccgcgcatcccgcgccgagaatcgcgccgtcaaagcccgccgcgtcagcggttcgcagaatcgttccgacatttccgggatcctgcacgccgtcgagcgcgacgatgcgccgcccgctcagcgtcttgggcggcttaggaatcgccaccgtgcagaggatgccctgcggcgttttcgccgtgcttgccgcctgcatcacagccggggaaaacagcagcgtttcgcatcccgcctgttccgctttttcaatcagcgcagcatattcttcctcacgcccgctttcaatcgccagcatgcggcaaagcccaagctctacggcttcccgcaccatttttgcgctttccgcaacaaaaacgccattttccttgcgtgctttcggcttttgcagcgcacgcaggagctgcacgaccgaattatggacacttgtaatttctttcaatttcgtacctcccagcggacgtataatcgcattgtacagcaaaacccgccgcaatgcaagaaacagcaaacggagatatttttccgcctgcacacgtctttttctgtatttttgcgttgtaattaggaaaatttaggaaaacataggaaatcgtgtattgatttttgaatccgtttcacgcataatagcctcaaggttgatgaatttcaagaaaatcccgcccatgaagttctgatgccctctgcatgcaggctgcttacaaacccacaaggaggaaaacgccatgccgcttcaaaagctctattccgttgaggaaatcgctcaaatgacctccgtcacgacccgcaccatccgtaactatctccgaaacggtattctgaaagggagaaaaatcggcgggcaatggcgtttcagtctggaggatattgaaaccatgatcaatcagacaaacggcgcattccaggaaaacagccgccgcatcgtcagggattttatcgacagcgtttatacgccgttcccgcagtccatttccgtctgcacgattgccgacgttccctgtacccaagaaaaagccgcacaaatcagcaaaacgctctgcgccctgtggaatcagccggtttcgcgcggcacatttcgctatgactaccttgaggatgcgcagaccgcccgctatacgctcatcgcgccgattgaacttgtgcagacagcactcgctcttcttcagaaggaagccgaagcgtgattgagtttgtccgaaagctcatagaaaagtcatcggcatccatccgaccgatttgaaccgcaaacagcttcaaaacgcagtcacggcacaaagaatcttcttcatgccatgactgcgttctttgcttctccggaaaatacgtcttagaaaaatatttcctttctccgacagtccttcccgcttcaatcggattatctgatttttgcggtgctgccgcccgttcgctctttcgtaacctcgatgcgatggggtatccttcccttgacttcctcaacatgggaaataatgccgatcagccgatgaccattttccgccgtatcaatccattcgttcatcgccagctcaaggaagctgccgctcaatgaaccgaagccctcgtctacaaacatggtatccagccgtaccgccgaagccgcgctcgcctgcaccaggtcggacattcccagtgacagagaaagagacgccaaaaagctctcgccgccggaaagcgtagcgacctcgcgtatgctgccgttgtaatggtcgattacgtccaaatcaagcccgacctctcccctagtgccctgctccggaagctgtctgcgctttagctcatactgcccgcgggacatatgaagcagccgcagattggcatagcggataatgcggtcaaaatactccagctgcacataggtttcgagcgatattttgggctttctgttcacccgaccttttgcaggttctgcatgacatcccgccaaaatcgtcaggaacgcttgttcccatttttaatctatgttataatggggaatcatctcccttatccggttattcaggaggtcagcatgcaggaaggacgcttcgttctcaaatcccccttcaagccgcagggcgaccagccgcaggcgattgacgcgctggttcagggcgtgcagtccggcatgccgtgccaggttctgctgggcgtcacaggctcgggcaaaacctatacgatggcgtccgtcatcgaacgcatccagcgtccgacactcgtcatcgcgcacaacaagacgctcgccgcacagctttgcgcggaattccgcgaattctttccggacagcgcggtcgagtatttcgtttcctattatgactactatcagccggaagcctatatcgcctcgaccgatacctatattgaaaaggactccgccgtcaacgaggaaatcgaacgcctgcgccacagcgcaacggcggctctgcgcgaacgtcgggacgtcatcgtcgtcgcgtctgtttcctgcatctattcgatgggcgatccgtccgagtacgaaggcatgatgatctccctgcgccccggcatggcgatggagcgtgacgagctggtgcgtcagcttgtcgaaatccagtacgaccgcagcgacatcgagtttgagcgcggcacattccgcgtgcgtggcgatgtggtcgaaatcttccccgccggatacgacaagagcgccatccgcgtggaattcttcggcgacgaaatcgaccgcatcagcgccatcgacgtcgtcagcgggcatacgctgatggttctggaacacatttccgtctatcccgcgacgcattacgcgacaccacgcgacgccatcgaccgcgccatcggcaacatcgagcatgaccttgacatgcgcattcgggaattcaaggaaaagggcgatttgattgaagctcagcgcatcgcccagcgcacgcaatatgatatcgagatgctccgcgagttgggctactgcacgggcatcgaaaactactcccgctacttcgacggcagaaagcccggcgacgcgccgtataccctgctggattatttccccaaggactacatcgtctttgtcgatgagagccacgtcacccttccgcagattcgcgccatgtacaacggcgaccgcgcacgcaaggaagcactcgtttcctacggcttccgtctgccgagcgcctttgacaaccgccccctgcgctttgaggaattcgagcagcgcatcggtcagctcatctgcgtcagcgcgacgcccgcgccgtatgaaatggagcatgcctgtcaggttgtcgagcagattatccgcccgaccggtctgctcgatccccaaatcgacgtccgtcccgcaaccggtcaggttgacgacctctacgccgaaatcgtcaagaccacgggcgagggctaccgcgtgctggtcaccacgctgaccaagaagatggcggaaagcctgacgacctatctgggcgaaatgaacgttaaggttcgctatctccactccgacgtgcagacgatggagcggcaggaaatcatccgcgatctgcgtctgggcgtattcgatgtattggtcggcatcaaccttctgcgcgagggtcttgacctgccggaggtcgcgctcgtcgccatcctcgacgcggacaaagaaggcttcctgcgcagcgaggtcagcatgattcagaccatcggacgcgctgcgcgaaacgcaaacggtcgggtcatcatgtatgccgatgtgatgaccgaaagcatgaataaagccatctttgaaacccagcgccgccgccagcttcagcaggcgtataatcaggcgcacggcatcgttccgcagaccgtcatgaaatccgtccgcgacgtgctgcaaatcgggcacgcggcggacgatggcagcagcaaacgcgccgtcaagcgtgtcaaggagctgagcgaggacgagctgcatctgctcatctgctcgaccgaggaaaagatgctgcaagccgccgccaatctggactttgagcttgcagcgaaactgcgcgacaagctctttgaattgcagggcaagaagcccgaagagcttccggaggaaaccgtcaccctgccccagagaaagcgcagaagacagagaaagccccgacacgatttaaaggcataaggagtccgtcatgcaggaaaatatcgtcatccgcggcgtccgtcaaaacaacctcaagggctttgacctgaccctgccgcgcaataaactcatcgtcttcaccggtctgtccggatgcggcaaatcctcgcttgcgttcgatacgctctacgccgagggacagcgccgctatgtcgaatccctctcttcctatgcccgccagtttttggggcagatggaaaaaccggatgtcgattccatcgatgggctttcccccgccatctccatcgaccagaaaaccaccagcaaaaacccgcgttccaccgtcggcacggtcacggagattcacgattacctgcgcctgctctatgcccgcgtcggcatcgctcactgccccaaatgcgggcgggaaatctccaagcagaccgtcgatcagatggtcgatcagatgcttgccctgcccgaacgcacgcgcatgcagctgctcgcgccggtcgtccgcggcaagaagggcgaacacgtcaagattctggaaaacatcgtcaagcagggctttgtccgcgtgcgcgtggatggagaaacctatgacgccgccgaggttccgacgctgtccaaacagaaaaagcacaatatcgaggtcgtcgtagaccgcctgattctgcgcgaagatatccgcacccgcctgaccgactcgctggaaaccgcgctctcgctttccggcggcatcgtcatcgcggatatcggtcccggcgaacgggagatgctcttctcccaaaacctcgcctgtccggaatgcggcatttcgatggaagagcttgcaccacgttccttctccttcaacagtccgttcggcgcatgcccgacgtgcgccggcttgggcgtgctgcaaaaaattgatccggatctcatcgttccggattggaataaatcgctcgccgaaaacccgttcaacgtgatgggctggagcagccttgaacccggcacgcaggcgggcatgttctttgaagcgctgagtcagaaatacggcttctcgatgaatgagccgctgaatcagctgcccaaggatgtgctggatatcatcctctacggcagtaagggcgaaccgctgaagattcaatatacccgtcccaacggcgattcgcataccttcaccgcgccgtttgagggcattatcccaacaaccgaacgacgcgccgcggaaacgcagagcgattccaccaaggcgtattacgacgggctgatgagccagaccccctgcccggattgtcagggcaagcgtctgcgtccggagattctcgcggtcacggtcggcggaaaatccatcgccgacgcctccgacctgtccgtgaccgacgcgcaggcgttcttctcctccctctccttcggacagaaggacaacatgattgccgcgcccattctcaaagagattctggcgcgtctgcgctttttgagcgacgtcggactgggctatctgacgctttcccgtgcggcaggcacgctctccggcggcgaagcccagcgcatccgactggcgacgcagatcggttccagtctggtcggcgtgctgtatatcctcgatgaaccgagcatcggtctgcatcagcgcgataacgcccgcctgattgatacgctcaaacgcctgcgcgatttgggcaatacactgatcgtcgtcgagcatgatgaagataccatgttcgccgcagaccagattgtcgatatcggtcccggcgcgggcgagcatggcggtcagctcatcgcgcagggaacggcgcaggagattatggcttgccccgaatccatcaccggcgcatacctctccggtcggcgcggcattcccgttcccacacgccgtaaaatgccgtccggttacctgaccgtccgcggcgcacgcgctcataacctcaaaaatatcgacgtcaaaatcccgctgggcgtgatggcggtcgtcaccggcgtttccggaagcggtaaatccacgctggtcaatgaaatcatctataagacactccagcgtgacct

SEQ ID NO: 788 - DNA, 40946 bp, unidentified
  source 1..40946: mol_type = unassigned DNA
aatttttgctgcgcagacagcgaagctatgaaaaattaaaaactgcgatggaagaaaatggttttgaccagaagctgtatctggcagcggaagtttactattttcaaggaatcggaagtgccggaatgatcccgaagctttgtgtggaaggaacacagacacttcttctggaaatgccgtttgcccagtgggattctgccatttatgcagatgtggagaaactggtacggcaccagaaactgaaagttgtccttgcccatattgagcgttattacgaattccagaagaaaaaagaaatctgggatgccgtcatggaacttccgttatacaggcagatgaatgcaggcgtatttctgaactggaaaaagaggcataaagcgtttcagcttgcaaaagaagccacaaccattattcttggcagtgattgtcacaacatggatacccggcatccaaatcttgccgagggacgcattgtgcttgtaaagaaatttggagaagcgttcctccagaaaacggatcgcctgaccagggaggtactgcagtgagcgaaaaaaagaaaaccatgcgtgcagttatagaaattatcattgccgtacttgtaatcattgctgtatattttatcatccgtgggatggatcggcacgacgtgcgtatccagcaggcagccacagaaaatgaaacgcagcgtgtctggaaggaatttcaggaaaaaaccgtctcgatcaagctacataaaaagacctggaaatttgcgcatccggttcagacgtatctctttatcggaaccgacaaaagcggaaacgaagatgccgaaggagaagaatatcatggctcgatggcagatgcactgatgcttgttgttgtggacaaagaagaaaaaacatatggaattttgcagctgaaccgggacaccatcaccgaagtgccaatgcttctgcaagacggaagcgctaatgctagtgcacagatgcagctttgcacggcacactggtatggaaaggacaaggctgcaagctgtgacaatacggttgagaccgtatccaaaatgcttggggggctgcctattgatggatactatgcattgaaaatggatgcaatgccacttctgaatcatgaggtggggggagtaaccgttacactggaagatgatatgaccaagctggatccggctatgaagaaaggtgcaacgcttactttgacagaccggcaggcagaattgctcatgcagtcccggtatgccatggatgacgatcgcaatacgcagcgtatgcgccgccagcagatctttttaaacgcattcatgaaaaagataaaaaaacagaatgcgggggatgtcaatgcgaccgtgaaattatatgaccggctgcgcccatatgcgacgacagatattaagatgaatgatctgactgccctgttaaaggatatgcagggatatacagacaaaggaattatcacaatcgacggtacatccaaaattggagaaaagctgcacgatggaaaaaaacactgggagttttatatggatgaagattcattggagacatccatgaaacaactgtatccactggtgcaagagaaaggaaagtaacgaatgaaccaggaaaaccaattgacagagcagaacagcgaagaaaccgaaattgatctgcttgaaattttttatctgctgcgggcaaagctggtatggctgattctcgcatttgtgatcgggggagtgattgcaggctccatcacacattttctgatcacaccaaaatatacggcaactgcaaaaatgtatatgatttccgcatccagtggaagtgtgcttgatctgtcggatttcaatatcggaacatccctttcccaggactataccgaattgatcaaaatccgtcccgtgttcaatgaagtgattgataacctgaatctggatatggaatatgaagatcttttgaagaaagtaagcatctcggttgttggagattcacggttacttgctgtgtcggtggaggacaatgatccaaaacttgcacagtcgatggtcaatgaacttgtagatacagcggtaacctacattccgaaagttatgaatgcatcggagaatgcacagccgaccattgcggaatatgcagtggttccagatgaaccgagttcgccgaaccttgccaaaaatattattctcggagcggttgttgcaatgcttcttgtagccgtgatcttcgtggtacgtatgcttatggacgacagcttaaatacggcagaggatgtcgaaaaagaatttggtatcatgccgtttaccgttattccggagggggatatcgaagaaatttctgatgaggtagaaaaagcgatcagtaaagagaaaaagaaaagaaggaagaaaaagtaatggaatttacaccgaaaaaccgtgcgaccgtccagaatatgccgaaacttccgtatgcggtagaggaagcactgaaccgtctgcgcgtcaatgtgagctttcttggaagcaaagtgaaaaaaatcatggtgatatccagcgctccggatgagggaaaaagttttattgccatgcagctgtggcgtcagatggcagaagccggcagcaagagcattcttgtggacatggatctgcgcaagagtgttatggttgacaaatatcagattgtccgggaagacaatggaaaaattctgggaacttccgattatctggcaagtgacgatacgctggacaaatatgtgttgcgtaccaatatcggagcgggagatctccttccgaataaagaaaatattattaacccgtccatgcttctcgaaggacagaaactggcaagtacatttgaggaactggatgaaaattatcgttatacgtttattgatgctccaccattgaatctggtatcggatggggagaagatcggctcgctgtgtgatggcgcactgctggttgtccgcgcaggagaaacgccaaaggcaatggttcgtaattcgatccgccagttggagcgtgccgggtgtccggttgtcggcattgcactcagccgtgccaaaggcgctgcaaatggatattatcacaaatatggcaactactatggcaagagttattatggaaaaggctatggctactatggaaaacatggatattatggctatggcacagagcagaagtaggtgattccccgaaagggttttcacataaatcaatcatcagggaaggaggattatatcccaatgaacaaattaatcaagaaggtgctggtaggtattaccgctgctactatgatgtttggatctgtttgtactgcttatgctgcaacagattctgcaaccgtagctccagctccggaaaaacagacaaacgtcaaggctgataatggcgcaaaggtaagtaccgcagcaaacggtacagcaaccgtaaaggctttaccaaagacaacaaagaagagtgttacagtagcttctaaggttgttgtagatggagtctcttacaaggttacagcaattggagcaaaggcttttgcaaatgctacaaaagctacaactgttacacttccagccagcatcaagaccattggcgctcaggcatttacaggtgcaaagtctgtaaagacaatcgtcatcaagtctgcttccgtaaaggttgccaagactgcatttaagggtgtaaacaccaaaaagatgactatcaaggtttccggtatgtctgcaaagcagctgaaagcattcaaggctcagctgaagaaagccggattcaaaggaaccgtaaagaaagtttctaaataatcccgggtttctgaaaggggcgcacagagctgattctgctgtgccctttcttatagataaaattgaaaacaaacaaaagtaataagaatgataaaaatgatagaggggaagcatcatgtatcagaaagcaaaaaacagctggatcaaacacattgattttgtgatactggatattctgtgtctgcaggtttcttttttcctggcatatctcgtcagacaccggaatctgaatttatattccaattccgtgtatggaaacctttccatcgtgttgatcctgatcgatgtatgcatgatgttctttttaaatacatgtaagaacgttctgaaacgtggactgctcatagaactggcggcaaccatgcgtcaggtcagcctggtgatactgtttgccgtgttttatctgttctttgtgaaagatgcgggtgatttttctcgtattacaatgtttctgaccgctatattttatgctataatcagttatgggacaagaattctctggaaacggcatgtattgcggaatctgcggcttggaagaaagaattctatcgtgatattgaccgactgggccaatcttccacaggtgcgggaagatgtcgaaaatcacagctatgaactgtttcaggttcgaggaatcgctgtgatcgatgtcaatgaaaagaaaacacttcccgaaaaactgggggacatcccatttgtggcagagggagaatctgttatggattacttgtgccatgcatgggtggatgaagtatttatcgatctgcagcctgatgatccgcgggtagacagatggatcgatcagctggcggagatgggcgtaacggtacatctgaagcttgccaaccggatggatctggcggcgaacaaacagtttgtggaaaaactgggacgatacacggtgctgaccacaagcatccgcaccgtgagtatctgggaactgtttctcaaacggctgatggatattctcggaggcatcgtcggctgcatcctcactggaattctgtttctgatccttgcaccgatgatctatcatgaatcgcccggtccgatcttcttcggacagaccaggatcggaaagaatggcaagaaatttacgtgctataaatttcgcagtatgtatctggatgcggaggagcgcaaagcagcacttgccgcagaaaaccgtgtatcggacggaatgatgtttaaactggattttgacccgcgcatcatcggcagcaggcgtctgccggacggaacgataaaaaaggggcttggaaataagatccgcgactggtccatcgatgagtttccacagttctggaacgtgctcaaaggggatatgtctctggtaggtacacgaccaccgacagaagatgagtgggtgaaatatgagctgcaccatagaagccgcctggcaatcaaaccggggatcaccgggatgtggcaggtaagcgggcgcagtgagattacggattttgaacaggtggtagcactcgaccgcagttatattgcaaactggagcctgggacttgatgtaaaaatattgtgcaaaacagtgggagtcgtgctgagacatgaaggtgcgatgtgagcggtaaatgaatattacgatatctgattgaggagtatgataagtatcgaaatgtgtaaaaaggaattgaagtcatgagtgaatattcagttaaagttattatagcaactcataaaaaatttgattcctacggggcgccaaaacatatttacaaaaacagtgctagcaggagctgccgttaatgttattatgaatgctatgttaattccgattttcaaagcaaatggagcggcagtggcttctgtagttgcggaaacaacaatagcagtaattcagttagttttagtaagaaatgaattagacggaattcaagttttgaaattattgccgaagtatttgatttcagggggagtaatgcttgcaagtttgttatggttaaatcaatatttaaagaaaaacgtattagatacaatattaatgattgtattaggagcaagtgtttatttaattatattatttttcttgaaagataaatttttgatagaaaatgcgaaattagctttaaataaagtcatacgaaggagaaaagaacaatgaaatatgattatttagcggtaggttcaggactgtacggtgcaatttttgcacatgaagcaaaaaaatatggaaaaactgtgttagtggtggaaaaacgctcaaatattgcaggaaatatctatacagaaaatatgacattggggtcagaccctttgaaatactactcccgcatcacattttatttaatgattccgttttatatcgtgattgactatggaattagatgcctgtggaagtatagaattagaagaaaaggagttcgtgaaaatgcacgaaccattattatagtagctccgggaaagaggctcggaggctgcgtcaaggaagtcgtgaacctcgatacgaagtatattgataactggagtatcgggcaggatttgaggattatgttgaagacggtcaagagtattttgataaatgaaggggcaatgtagaggataggatagatgattattacagagacaccgtttcgcatgtctttttttggcggcggaaccgatatggaggatttttttagagaatatggtggagcagtattatctacgacatttgataaatattgttatgtgaatgttcgacatttaccaagattctttgattattcaacagagctatcgtactcgaagacagagcgtgtgacagatgtggaacaaattcagcatccggcgattcgaaatgcaatgaagatgctggacatgcatgaattgcgcttgacgtatgaagcagaccttccggctcgttccggacttggcacatctagttcgtttgcggttggaatgttgaatgcattctatgcgttaaaaggaaaatatgcggataaaaagaaactggcggatgaagcgatttatctggaaagagaactttgtcaggaagccggaggatggcaggatcagattgctgcagcttatggaggattaaatcgcattaattttaatgcagatggatatgaagtctgcccggttattatatcaccggagaggaagaaaaggctcaataataatctgttaatgttctttaccggctttactagattctcatccgatgttcagaaacagaatgcaattggtaaggcggacaaggttatgcagttaaaagaaatgttatcacttgttgatgatgcagagcgtcttcttgcagatagagattctgatttggacgaatttggtcgattgttggatcatacctggaaattaaagcgacagacaggatcggcagtgtcgacatccaatattgataacttgtatgaaaaaggaatgaaagccggagcgctcggaggaaaacttcttggagcgggtggcggtggatttcttgtattttatgtgcagcctgaaaagcaggagagtgtaaaactcgcgatggaagatttgatgtatattccgtttgagtttgaagatagtggcaccagagtgattcattatacaccggaaatttatattccgaaggagtaatcggttatgaaagttgtaattatggcagggggaaagggaactcgaatcgcatccgtagcaagtgatatccctaaaccaatgattcagatacagggaagaccgattcttgaacatgaaattgtttgtcttagagagcagggatttacagatattctgatcacagtaagtcatcttggaaatatgattatggaatatttcggagatggttcaaaattgggcgttcatattgaatactattttgaaaaagagccacttggcaatgcaggagcactatttaggatcaaagatcgacttacagatgacttcctcttattaaatgcggatgcaatgtttgatattgatttcaatcggtttgtccaatatcacagagaacatgcagcggttgcaacgctgtttacgcatccaaacagtcatccatatgatagcgggttgattatagcggatgagcagatggcagtgcaaagctggctggcaaaggaagatgatcgcccccaatattataagaatcgtgtgaatgccggacttcatgttttaaataaatcaattttaaatcagacaattgagggtgcgaaagttgatcttgatcggcaattgttaaaaccatttgcaggcagtggaaaaatgtattgttacgacagtcccgaatatgtaaaagatatggggacacctgagcgctattatgcggtatgtaaggactttgaaaatggtatcgttcatgcgagaaatttgagacataagcagaaagcaatatttatagatcgggatggaactattaatgagtatgtaggttttcttacagatatcaatgattttcatttgattgatggtgtggtgcaagcaattcgtaagattaatcaagccggatatcttgcgattgtggtaacaaatcaaccggtaattgccagaggggaagttactatttctgagttgcagcagattcataacaagatggaaactctcctgggtgagaatggggcttatgtagatgccatatatttttgtccgcatcatccggataaaggatttgggggagaacgtattgaatacaaagtagattgttcgtgcagaaaaccgaaaccgggaatgttgttgaaagctgcagaagatttcaatattgacttatccaactcatggatgataggtgatggaaaaaatgatgtgcaagctggaaataatgccggatgccatacggcattgattggaagagacgattatggacaagacaaaacagtatcgtcgctgttggattttgttggtaccataggagaataaaaatgcttgaaaagaatatacagagacatattgatacattgactcaacgatatcctgcattagaagtaaattccaaagatattgcagaggcgtatttgatattagaagagtcatatcaaaatggcggcaagttactgattgcgggaaatggtggttcagcagcggatgcagagcatattgttggtgagcttatgaaaggattcaaatcatctagaaaaatagaaaagaagtttgaacaagcattgctcaatgaaaatcaagagttgggaaatgttctggcagaaaatttgcaaggtgcacttccggcgatagcgttggacggacatttagcattatctacagcatatatgaatgactgtgagccgttactatgctttgcacagcaggttaatggatatggacggcaaggagatgtattcctcggaatttctacgagtggaaatagcaaaaatgtattatatgctgcggtaacagcacatgcaaagggaatgaaagtgattggattgactggtgcaaaagacagtgcactgtgtcggatgagtgatgtttgcatttgtgcgccacagacagaaacttatatgattcaggaattacatttgccaatttatcattgtttgtgtctgatgttggaagaaaagttttttggagaataattacatggaatgcttacaaaaacagccactactgaatacttctgtgaataacgtaagtatgaatgcgacgatacaggcgatagatacatttattcaacaaaagaaaaaatcttatattgttgcaatcaatgctgatgttgttatgaaaattgagaaagacacatatctcaaagaaattacagatcaagcggatatggttttagtagatggtaaacccttgatttggatttcaaagatacataaaagaccggtaaaagctaagatttccggctctgacctggttcctcaattgtgtgagaaagcagcaaaaagtggatacaccatatttattattggtggaaaagacggaattgcagaacaagcaaagctgcgtttggaaaaacaaatgcaggacataagaattgtaggaacatatgcaccaccgcttggttttgaaaaggatcagcaggaattggataaaatcaatcggatgatttctgatgttcatcctgatttactgattgcctgtttcgggtgtcccaagcaggaaaagtggatctacgagaattatcaaaagtatgacgctacggtatcggtatgtgccggggcaactgtggatttcttagctggaaatgtaaagagagctccgaagtggatgagtgaccatgggttagagtggttttatcgatttttgcaggaaccgaagagaatgtttaaaagatattttgtagatgatgtaaagattttgggtttggttatgaaatatgggagaaataaaaggaatgaatgaaaaagtatcggtgattatgccaatatataacgttgaaaagtatttaagagagtcaattgaatcggtattgcatcaaacatatgggaactttgaattatttttagttgatgatggttcaccagataattgtccccaaattatagatgagtacgcccaaatggataaaagaataattgctattcatcaagataatgccggtgtggatgcggctagaaataatgcaatagatcgggcgaacggaaaatatattgcatttattgatagtgatgatgcatatgaaaaaaagtatttagaattattggtaaatgcaattgaaaaaaattcttgcgatatgtcagtatgtagctttattccatttggaattgagaatcctccaaaatttaaaacaatttctgaacagacggtggatagaaattcagcagtggaattattgttgggatataacagcgtgaatggatatgtttggaataagttgtttaaaagacagttaatagatgagcataatcttagatttcaggatgggtattgggcctgtgatgatgttttatttgctggaagctacatgtattactgtaaaaacgtagctataatagaaaaaccattatacagatatagacaagttgcttctggtgcaaatcgtgttcgatattctggggtagcgtttgatcaaagatggatgagttctttcaatgtcacagcttattttaaaaatctttatagagacaaaatggtggaagatgcatgtgatctgcatgaagcacgtgaagcaagtattgtattgagagcaattgctgctagtaactatagtggacccgaatatgccagacttctcgaaattgtaaaaaaaaatgtatggaaatttattaagagtaaaaagtcaagttatttccaaaaagtatctgttttattaacatgcatatctccaaaattggaattgtatgtatggaaaaaaatcaatgggataaaaaatgataattgaaaatgagagaatactaatgtttgagaagtcgatgaatcttggaggatcttctcaaattgttatacaaatgtgtgaagcgttaaggtgtagagctcaaaaagtaattgtttgttcaatggggggcattaataaaaaaaaattagaagaaattgcagttaaacattatgatatacgagatatttcggataaaaaaaattttttttggaattatcaaaagctaaaagaaattataagaaatgaaaaaatcactgtgatacatactcatcatagaatggctgcgatgtatgctcaaatacttagaattcattttaagtgtaaagttttttgctctatacatggtgaattttacgataaaaagtggttcacaaaaattgcctacagaaattgcaaactgattgcttgcggtaatgcagtaaaaaacaatttgattaatgaatttggtattgatggcaaaaatatttttgttttacaaaatgcaatagagcgcgatcaaaaatatgaagtgattgatgaaatagagcaactgcgaagccaatccaatgagactttttttgctggatatttaggacgtctttctgctgaaaagggggtagatgtttttataaagtcgttaaaagaagtattgaaaaaaaataaacaaatttattatgttattgtaggggagggttatcagcgagaagaattaacgcaacttgcctatgatcttggagttgatagtcatattatttttcttggatatcgaaaagatccgcagaatgttatacagcaattagatgtagttgttttaagttcatatacggaagggttaccgcttacgcctattgaggcatttgcacatggaaagcctgttgttgcaacttcggttggaggaactagtgaaattgttgttaatggatataatggcattttagttgaagctggaaatatacaaatgattgaaaatgctattattaaaatttctaaaaataggaaactttataataaacttgcaacaaatgcgataaacacttatgattgcaagttttcatattcaatttttgaaggcagttttataaaaatttatgaaatgctctatgattaagtggttttacaagattaaataacgtaatgttagaataatattaacatgaggtgctgggagagacaagtgagaaaaatgaaagctggtatagtcacaattcatacggattttaactacggggcggtattgcaagctgttgcaacacaaaaatttttagaacttaatggagttaatgctgaaataatcgactatgaaaacaaagagattgcaaagcagttcaagttattctataaacaggggaaaactttattcggatatggtgttacatttgttcgaaatgttttttttggacgttttttttattataaacatgcaattaaaaatttggattcgtataggaaaaaaacaaaaataaagtatataacaatagatgatttgaaaaatgtcgactatgatttgctaattgcaggaagtgatcagatatggaattctgaaataacgggtgaacttgatccggttttcttattagactttggacagaggagtaaaaaaatttctttagcaactagcatgggaagtcacatattaagtgatgaagagaaggaaaaattccgagcggtattaaggcaatattctgcaataagtgttcgtgaaaagtttgcgaagtgccaattggacaaattgacaagtaaaaaagtcaaggttcttcttgatccgacacttcttttaaacaagactgtatggtggcgagagtttgcaagatattcgaaatatgcaaataaaagggaaaaatatattctgacatattttgttggaggagataaatttaaatacagaaaacagatttctgaatactctaataaaatgcatctgccggtatggacaatacaatttagcaattatcaatggaaagagtctgataaaaaaattttaggagcttccataattgattttgtggcattaataagtaatgctgaacttgttataactgatagctttcatggtgtggcattttctgtgaatatggaaagagattttgtagcattaactaatagggaaaatccgattagagtacgtgaatttttagaagcaattgagttggatgatcgtatagatatgagtataactgaatatagcaaaattaattatgataagcctagaattcttttagaagatttacggtgtgactcagaagaatggattaaaagtgtattagaagaggaactagcgaaggattacaataatgaaacatatacaatggattacgtttaatgcatttatagatactgatatatatatagttaaagaattagctgaattttatagcatcaattggcatgtaattagaagtggaaatgataaatttgaatatgcaagtatgattgatgaaatgaaacaaaaggaaaatttgacaattaacttgcatgtttgtggaagaagattgagaaaaatagaaagtgcctttttctttactagacttttacggaaacttaaaatgtccgatgttgatttggtttatacaagtatggctggagcgccatatttcattcctttacttgcaattctgctaaagagaaagaaagttatagtggcaattcacaatgttcatgttcccaaagggggcagtgcatattactttttcaaactatataataaaatgacaattggttgttttaataattttcagactttttctaggtcgcaatatgatgatttaaaggctattgcacctcaaaaaaatgtttattatgcgccttttattttaaaagattatggaaaatctgaaaaaagcagaacatcagagttgattacttttttgacttttggaaacatacgagaatataaacgaatagatattttgattgaggcagcacaacaagcctatgaggttacaagaaaaaaatttagagttatcattgcgggtcaatgtgatgaatggcaaaaatatcaaaagttaatcaaatatgatttcttgtttgatttaagaattggtcgagtagaaaatgcggacattcctgatctctttaatgaaacagattattttgttgcaccttatcaagatattgcacagagtggatcggtaatggttgctatgaattatagcaagccaattattgcatcaaaattaccagcatttaaagaagtggttagaagtggtgaaacggggtatttgattacgcctgcatgcgaggatgaactcgtagaagttatgattgatattttgagaaacgagaatcaaacatatgagcgattgaccaataacatagaaaaaattaaacaacaaaaattcgcaacagaagcaattgtagaaaaatataaggagatttttgaggatgttattgcaaaatgaccaagaaagaccacaattagcttcacatagtgagtgtacagcttgttttgcgtgcgttgatgcttgtggaaagaatgccctaaaagcatatatgggatgtgacgggcatgtatatatagcagtagatgaaaataaatgtattggatgtaaaagttgtgagcggatatgtagggcaagtcaaaaaaattatggaaccaatcaattgaatgaatctcaactgtttgcggcgtggacattaaataaagaggatagaaaaaatgcaacttctggtggggtgttttctgcaattgcaagattagttttagaaaaaggtggggtagtgattggcgcttgtttagaagggcgtgagtgcaagcatattctgatttcggaagttgatgatatagctaaattacagggctcaaaatatgttgtaagttctatgcaaggagtatataaacgtattgaaaaagaattgaagaatcgcattgttcttttttcgggagtaggatgtcaatgcgctggtgttatggcattttttgaaaaaaatccgtatagaaagaatttgatcacggttgatttagtgtgtggaggggctccgagccagattctattgaacaaattttatgagcattttccgaatgtagaacaaatagtatcatttaggagtaaagataagtatgagctaaaagtaattgaagaaggaaaaattaaaagtatatcaggaaaatcattgcctttggatggttttaattgtggaatgacatctagattttgttgttatgattgtagatatgcatatggacatagaaagacagatttgacgattggagatttgtgggattatagtttgtatccttccgagcatcggaaaggaatatctatggtaatagtgcatagtgatagggcaaatgtactattagaaaaaagtcagataactttgcataaaatcccgtggagaggggttttgctgaaaaataagaggatagttattaaacatcaaagaatttttaagccccgactggagttagaactggcatgtaaagggatgacatatgatgattttttaaagttgtattgtatggctatgacaaaaaaggattttaagttgtacatttttaagatatatagatatgttcgattaaagttggatggaattcaaaacaaaatgtacatatatatacttacaagacgaggagaatagttatgaaaatagtggctataacggttacatataatagcagtatatctttagaaaatacaattaaatatctgttaaaacaaactattgaactagatgcaattgtcattgtggataattgtagtgatgaagaaaacaggagtagagtaaaagcatttggtatgcaatcatccaaaattgatattaaatggttaccacaaaatacaggtggagcaggtggtttttgcgaaggaatgaaatatgttgcggaaaaatatgatccagattggtattggttgatggatgatgatgcatatcccgatgcagattgtttggaacaattaataggtgaagctttaaaattacctaatgttggatttgttgcacctcttatatggggaatagataatggtaaatatcaattatatcatgcacgaaatcgaaaaggaattatatataaatttacgcccgtagaagaggattcgaaaaaattacaagaggtaaccctgatagatgttgatgcgtttgttggaccgttaatttcatccagagcggtaaaaaaatgtggttttccaagggctgaatattttatagagggagatgatactgactatacgtttagagtgtctagagaattcaacgggtatttaattaaaaacgcaaaaatgaatcacagggatatcgtattcactgaggatataaatcccaaaggatggtggaaagactattattggtatcgaaacactattttgtttcaactttacaatgtaaaaggtgtatataaaatcttaggtgttctatatgtagtcgcatggagcataaagtcaaaatatttgatgtataaaaatcctaagtattgtgactataaaacttttagatggaaagtaatgaaaagaggggtgtttgatggattgagaagaaggagcggtgcaagattattgcctgcggattataaaagagaactagaaatgtatgaaaaaacttctttgttcaaaaagaaaagaggaaaaggcgttgaaaataactataaagagaataccaccaaaagatagaatattttatttgatctatggtttttatttatttttttcttatataaatgtttcgttattaggcggatatataccaggtatttattatggtatatcaatattgactgttgttgcattgctgactttggaattaacaaatcgtcactcaaatagaatggctattggaataatagttatagctattacattacttatgttgattaattattcgagaggcggagtggcatttgaatctttggcaatattaatcgttatatgtatggctggaagaacaagagatgtagaaacgcttttaactttttcactatttattggggcatgtgctttagccattgttgttttatgtagtcaacttggaattgtaaatgatttcgtatctaattattatggaagagtgcgacattatcttgggtttacatattgtttatacccatctaggataatgtcttctattaccataggactagtatatttaagaggaaagaaattcaaatttgtagagggtattgtattatttttcgtaaattatgttttttacagattaacggattctagaattgcatttattacatcagtgctaattgtggtaatagcgctattcataaatttggtactcgagaaaaggaaaaagcgaaaaagtattattggtactagtttagaaatattttttaaattatttgcagtattgagctattgcatttgttgtgcaattagttttattatggcaattttctttgattcatcaaactattggcagagtgcaattaatacttttttaggaaatcgtattgtgttttctagacaatctttattacaatatggggttaagtggtatgggcaaaatatagcctggaatggcgcgggactaagtaattatggtacggcaagtaatagtatttataattgggtagataatgtatatattaaattatttcaatcatacggatatgtttttgctattataattttggcaattattacatttttgatgtatcgaatagctaaaactgataatattttaatgataataatattaacattaatcgcaataagttgtatgtttgaagatatattaatgcaactttactttaatcccttttggtttttcctaacggcctcaattactaaaggcaaaggaaagtttgatgtatataaagaaaggggaatgaaaagtacatgaaaactcatatttttttaatgcaggtgcacaaagacccccaattactaaatcgaatattgaagagtttaaggaaggaaaatcattattttataattaatgttgatgcaaaatctttatgtgcagtagatatgttgaatgttataaatgctgaaaagaatattgtatgtataacaagagaaaatatcatgcatggagggttttctcaagttctatgtactatgaaacaaatatattgtgcattagattataatattcgatttgactattttcacactatttcaggacaagattacccatgctgttctatggatcagtttgatgacttttttgaaaaaacagataaaagttatatgatgatggattccgttgaggaactagcagaatggagagaaaaaaaatataaacatagattgaatcattggtattttatggacatattcaatagtcctatgatgagtaagtatcatgtggcaggaattttaagaagattattttactttttcccaagaagaaaaattaatatgaaccagatatatgggggatggaattggttttcactaaaacgagatgtgattgaatatgttacggaattttgggaaaataattatgattttataaaaagatttagatatacaactagttctgatgagctaatcttctcatctattctatatcctaaagctgctttgctaaacatcgagaaaagaaattctttacgatatattgtgtggaaaccgaaaagagaatatggtacattgccattaatattggaagaatcagaatatgatgagatactttctagtggagcattgatttgtagaaaagttgatttggagcattcaagtagattattggatcttttggacgagcacaatgagtgttagagtacctgattttaataataaaacaagtcgattgaagattcacaggtctaatatcgtattaggtaaatttagaatgaaagaaaaatctttaaaattaaattttttaatgaacatgatattaacaatgtcatcattcattttcccattaattacatttccatatatttcgcgcattttgttgcctataggaacaggaagagtttcattcgcaacttcaataatatcttatttttcaatgtttgcgcagttgggaattcctgtatatggaattcgtgcgtgtgcaaaagtgagggataatagggaaaaattgacgcaaaccgctcaggaattacttatcataaatttgataacatgtgttatttcgtacagtatgctttttgtggcattgatttcagtgcctagactgagatcggatcgcccgttgctggttattgtaagttttacaattattttaacagcgattggtatggaatggctttacaaagccttggagcaatatacatacataacaattcggtcaattatttttaaatttattgcattaattgcaatgttcttattaattcacgagaaatctgattatgtaatttatggcggaatatctatttttgctgcatctgcatctaacgttcttaattttgttaatgcacataaatatatagattttaaaccaagaggacgttataacataaaacagcatcttaagcctattggaattttttttgctatgtcatgtgccactacgatatatgttaatcttgatagtgtgatgctcggatttatgacaactgatgcggatgttgggtattataatgcagcagtaaaaatcaaaaatatattagtttcaatagttacatcgttaggaacggtattattaccaagggcttctttctatgtagagaataaaatgttagatgagtttgaaaaaatcacaaagaaggcgctagcatttgttgttttattagccgtaccattggtgctttactttactttgtttgctcaagaggggatcttttttctatcaggggagacatataggggggctgttgtacctatgcaaattattatgcctactcttttgtttattggaataactaatatattaggaattcaaattttagtacctttaggaagagagaaggaagttttatattcagaaattattggggcgattgtggatattattgcaaatgcaattctgattccccaatatgcatcaacgggggctgctataggaactttgttggctgagttttcggtgttgctatttcaatgcttgatgttgaaggacaaggtgagaaatttgtttaaaggaatcaattatctgaatgttttggtcgcaagcatgttgggaatgatattatctttggggattcgcgcgtttgacatttctaatttggggaagttggttatttcatctctgatttattttggaacatatggattatttttgcttctaagaagagatcggatagttgtggaaatatggaatacgataataaaaaagatacatgagggtgtgtatgaaaataattaaaataagaagtaactattggttggaaagggagaagtaaactatgtacgactatttaattgttggagccggtctattcggttcggtatttgccagacaggcaacggatgccggcaagaaagtgcttgtaatcgacaagcgcccgaacattgcaggtaatgtttatacggaggatattgagaatatccatgtgcacaaatatggtgcgcacattttccatacaaataataaagaagtgtggaattatgttacgcgttttgtggagttcaatcgttttacgaacagtccggtagcgaattataagggagagttgtattcgctgccttttaatatgtatacgttcaataagatgtggggcgttgtgacgccggaggcggctgcggcgaaaattgaggagcagcgcaacgaagccggcattacggagtcacacaatctggaggaacaggcgatctctttggttggcaaggatatttacgagaagctgatcaagggttatacggagaaacagtggggacgcgattgcaaggatcttccggcttttattattaagcgactgccggttcgactgacgtttgataacaattattttaatgctttgtatcagggggttccggtgggcggctatacgaagatggttgccaatatgctggatggaattgaagtgcgcttggataaggattatttcgagaataagaaaaagctggatgctttggcggataagattgtttatacaggggcgattgatgcttactttgaataccaattgggagctttggagtatcgttctgtacgctttgagacggaagtgctggacaaaccgaattttcagggaaatgcggcggtgaattatacggatcgcgagacgccgtggacgaggatcatcgagcacaagtggtttgagtttggcaaggatgatgccggaaatgatattccgaagacggtgatcagcagagaatacagttcggagtggaaggtcggtgatgagccgtactatccggtgaatgatgaaaagaatggtgcactgtatcaggaatataagaagctggcacacaaggagcagaaggtaatctttggcggacggctgggcgagtataagtattatgatatggatgctgtgattgcttcggcgctggagctggcagagaaggaattggattaggaaaaacaggaaccgccccaggtgaagacatggggcggttcggtgctacatactatttgttttgtgtagcaagtgcagcttccaattcagcgatacgagaggccagttgatcaatggtttgcgtcaactgtgaacagacattggggtcagaccctttgaaatactaataaaatgagtaaatatgttttaaaagttttctaaagaaagtataacataaagaaattacgaatctgtatgtgttaaggatgctcagttaaagcaatatgaacacaataaggagagatatgaacacaacattacttatcatggctgctggtatcggtagctgtttcggaacaggaattaagcagttggagccagtggatgatactggacataccatcatggattattccattcatgatgcaattgaggctggcttcaaccatgtagtatttattatccgtaaggatatcgagaaggaattcaaagaggtcatcggtgatcgtatcgcagctatttgctctgctcataatgtaactgtggattacgcttttcaggacattaacgatattccgggaactctgccggaaggacgtacaaagccgtggggaactggacaggccgtgcttgcagcgaaggaagtaatcgataccccgttcattgtgatcaatgcagatgattactatggcaaagaaggcttcaaggccgtccacgagtatctggtaaatggcggtgagtcttgcatggctggctttgtgctgaagaataccctgtctgataatggcggtgtgactcgtggtatctgcaagatggacgaggataacaacttgactgaggttgtggagaccaagaacatcgtaaagactgcagatggagcagaggtagatggtgtggcagtcgacgtgtattctctggtctccatgaatatgtggggcttgactcctgattttctggatgtactggaggacggattcaaagagtttttccagaaagaagtaccgggtaatcctcagaaagccgagtatctgatccccatcttcatcggtgagctgctggagcagggcaagatgtctgtgaaggttctgaagaccaacgacacctggtacggcatgacctaccatgaggatgtcgcagcagtgaaagacagcttcaagaaaatgttggcgaatggcgtgtataaggccgacctgttcagtgatctataaataacgatgaaagaaacgattgatttactcggcaagatcatcacaaacatcctgactgctctctatgaaccgtttggattctcactccttctttccttcctcgcccccccaaaaagcaaaaataactcagaatagcgaatggcaggaaaaaagtcaagaattttttgaacatgagggataagggtgatagatatggaaaattcattatacatatatcatatggtggtgcctcttcgctactgtacttatgatttgcatagtaagaaaaagactcggaatatgtgatgggattaaagcagtattaaaaacatggtgtcaggaacatcgcattccagtctctacaatgaattactggatgcgcaaactgaaaacattggacgaacaatcggatacagctatgatttttgcaaaaatgccaacagaaaaagaaatttcaaagaatgagactttgaacatcggcccgtctccagtccgcatttttatcacaaacgctattcggattgaagtgatgccggaatgcccaccggaactttttcatgttctcatacagggactgaaagatcatgcttgatctggcaggtggcacaaccgtttaccttgcctgtggagctaccgatctgagaaaaagctatcacggactggctgcaattatcaagctgaaattcaaacttgatccctattcgcgctgcatgtttgcgttctgcaaccgcaggcggacttctattaagattctgcaatgggacggatctggtttctggattctgatgaagaggcttgacagggattcctttcactggccggaaaccccggatgaattacagaaagtgaccatgaaagaaatgcattggctgtgtgatggtctttcacttactccgaagggagcttttgaagaacgtcatccaaagattgttgtataaagaacggatttgtcaattcgcaaaaaatacgaaatactcgtggatatcgatatatattcctacagtaaaacgttgatttttctcgaagtaacaggcttttttatgttatacttgaattatcacttaagagtttggagattgccggatggatccgttttttacagaggaacagctgaataacatgagccgtgaaaacatgatggaagttatgagaatcatgcaaaatcaggttcggaaaaaagagaccggggtacagcttctgaaagacaagcagaaagaactggaatttatgaacgcaatgctttcagaccgtctctttgtatattccgttccaagtgtcaccggaatatacaaattctaaaaaagaacaaagaaagattcttaaactaatgcatgaggtcaagaaggatgaatcaatgatattagtagcaacaggttccctggtaggagaaggtttcgattttccaagactggatacactttttatggcaacacccatatcattccgtgggatagttgaacagtatgcaggacgattgaatcgtgattatgcaggtaaagaaaatgtaataatatatgattatgtggataatcatatcccaatgtttgataatatgtatatgaagcggctgaaggcatataaacagattggctacgagctttctagtggcttgaaagccgataaacagatagttaatgcaatatatggggggagataattatagagaaactttccataaggatctacttgatgccaataaaaatataatcatttccagcccagccatcagcggacaaaaagtttatgaattaatcagcatgctaaaggaaaaacaggaggcaggagttcagattacaatagttacatggatgccggattcatatggatttggtgatgcagcatattggatgcagctacatgaagatatgcgtaaagctggcttttatataaaaacagtagaagaatattgtgaccgttttgctgttattgaccaggaagtagtatggtatgggaatattaatctgctggcgaaggataagatagataatagtattatgagagtcatgagcaaagatatagcaggtgaattgatggagatcacatttggcgataatgatagagaagtaaggtgtaatgtaaatgactgaacaagaatttaaagaaatattacataaagaggaaacagatacagttgaatttaagtcttgggttaatgcaagaaatatgaaggaaattatatcgcttgcggttgatgaattgatagcatttgcaaatagcaagggtggaactgtttattttggagtagaagataatccggttgtggttacaggatgtgatagaaactatgatgggcaacgaattatagaggggatttatgatagaaccattccaccactattcaccgaaatatcagattttgagtatgagggaaagctcgttattgcaatatcagttaaagcagatggaaagacatatacaactacggatggtagatgcctgaaacgattggggagaaattcaaagccagcatatcctgatgaattaagtgctgtatattcttctgttcagaatccggatttttcaggaagaattattggagagagtactctggatgatgtaaataaactggaagtgtacagcttaaaggaaaagctgagagtcagagattctaaatctacattgccggatttggaggatattgagtttttaagagatttacaacttgtaaaatatgatggagatgtagaaagactgacgattgctgggttactgttcgttggaaaagaagcatctattcaaagattgttaccgcaggcggaagttatatacctacattattcagctgataatttggaggaatatgatgcaaggctagatttgaagttgccgttgataagcgttatcgacaagttgacagagcgggtacaggcatacagtaagatagaaaatattcaggtaggattattcagacttgaagttgaggatttccctgaaagagtatttcaggaagcattgcttaatgcgttgtctcatagagactaccagagtaatgctgcggtttatgtaaaacaatacccagatcgaatagttattgaaaatccgggaggatttcttgatggaattacagaggataatattataactcatccatcgattcccaggaataaactaatagcggagacacttcaaaatttgaagtatgtccagaggacaggtcagggagtagatattatttataaggacatggtttcaatgggcaagccatatccaagatatagatcatttaatgatgcagtttcgcttacaatatttagtgcaatagataatactgaatttgttaagtttattacagaagtacaagataaaaatagtaaaattatgtctttggctgagatgatgatattaagagatcttttagataacagaagggaacagttatcagagttgtcgagaaaagtccaaaaatctctggatgaaacgaaaaaatcatgtaatgaactgattagtagtggattaatagagattgttggaaaggaatacatgctgacagctaaggtttatgaagcattaaagtcagatgtggaatatacaagagataaaacagtccagtatatcaaggctaaaaatatgattttagagtatttacagacgaatgaccagataacatctgctaaaatacaggaaatgtgtggatttactaaacaacaggcaagaagtgttattgacaagatgagaagtgagaagttaattaacttaaatggcaaaggaccggcggctagatatgttatatttgatggattgagtgataattgagtttggggtaaaataaaactcaatagaaaactcaattacgtttaatggcaagtactggagtaatgaatacgatgaaaatatgattgagtggagtctttttaaaaactcaattaaaactcgttgatgtgcgaaaaaatcacattggcgggagtattggaaatccatgtagaaccggaacatgtgaaagtatatacagtttatcggaatgataaaattaatcatactgcaaatccgataaaacttcactatggaatgaatgcaagggagcacaacgtagaacctatggagaagacagaatggaatgcaaaacaagtagagatttcttttgtgaatacaattcagtggtcgggatggaggtccgatattatctacagggttataaaggtacgctgattaccgatggctaccagataagttctcaattgtgagtaccacaacataagatccaatgatttatcgtatcctgaaaaatccaagtgactatacagagtttttattaaacagtaatattaattttgacaggtgcatggtataggaaaaaaggatgagataaaaccagcgtctaagcccgacacataaagaaaggagaacgaaaacgatgaaagcattaaaaaaacaacaaattgcggtcattttggtactgtctgtcatactcagcacattcgcagctgttacacctgtaagtgcggcatcgctgtctgcacagcagtatttggaaaagatggatatagcggtgcgaaacttaaaatcatatgattttacgcagacaaccgatcagaagatgacaatggaagggcagatcattcaaaataagacggtggtaaagcaaagcgtatacaacagtcctctgaaggtaaaaagcgtaacagatacaaccacagtacttgcaggaatgagttctaagaaccaggcggttgcctatctgacaaaagatgcggatggattgctgtgggagtacatttcttccaatggttccggatatcagaaaacagggattttaaactataccaatcagatcaaaggtatggatatttccatgtattcggatgcaaaaattgtgaaaaagaaaataaaagtcaaccggatcaataccgttcagatttcggcgcaggtaaagggctccgatgtggtgaaatttttggaccagatgggaatgagcaaagagatcaatgcggcagctgctgtggattactatacgttgccggcaatcaaagtgacctgttggatcgataaaaaaacctgtcgtccagtcagaaccacggcggatatgaaagcgtttatgaacgggtatatgtcggcgctgtatcagaagctgggacaggatctgaaacttgtttattcgcaggcaaaagcaacggtaacctataaaaattttaataaggctgcaacatttacaataccgaaggaatgcagataaagataccacattttcaaagatgacaacaacagttactacggatacaaataaaataatatatacggcaaaggttccgaaagacgctacatctgcacggtaagtattcggttggaacatacacctatcaaaaataaatgtttctgagaagagagaatagctgtttgcgaaaacggctattctttttttatctaaaatggcatatttcttgtcagaagcaattgaaattatgattcaaatatgataggataaagtaggctgtctagtgtagaaaagacacataaggcagagtgggggatatatgtaatgtcagagaatgatagttactacatataaaattataaaactacggaggaagaaacatgaagaacaaagattatttaacagtaagacaggaagaattaatgaattttctgtggaaggtcaatgagccgctgactgccaacgagatggcagagcgcctggcagaagacggatggaacaatgttacattgtttaagaccgttcagtctctgacaacggatggctatctggaagttgtaggacttgagaaaactgtcaagacttatgcgcgtaaactcgctccgtctatgtcaaaggacgattattatgcatctgtattgattaagcgtggaattgacagcagttctattgcgaacattacagctgctctgatcggagcaaaagataagcaggcaaaagaaaaaaatgcagaggttattgcaaagttagaggagattattgatactctgaaaaatgatgaggaataagaatgcaaataacgatattttcggtttggatgacgttcgtttggtgtaacatttttattgtactgtgctacattctcagaaaacgatcggttctgctgaatttatccagtatgacaggaatcatcattttatatttgttttgtctgatcaggcttgccgtcccggtggaattgccatggacgaaagtggtatccggaggcagcctgtataatttcctgtatcagatattcgggtgtgaaataacctgtgtggcagggcacgaaatctatgtctatcatatatttgtggtggcatggggagtggtcatggcagttcttttgacgcggtatctgatacagtatcacagagttgtgtcgtatttttcagagatggaaaaaacggaagatacagaattaaataatattttagatgaaatttgtacggataaagaaaagcggaacattaagatcgtacagacagccgcggtagaaataccgtgttgtatagggatttttgagaaacggatattgattccggacaaaaaatattcgcgtgaagaattgcattatattattctacatgaatatacacatttggataataaggatatactgacgatacagctgatcaacattctgtgtatcgtgttctggtggaacccgtttgtgtatattttaaaaggagatatgtatcagagtattgagatccgttgtgaccagacggttacaaagaaactcaaatcggcagagcggggtaactatctgacggtgatattaaaagagtataaggcaagtgtgcaggaaaaagaatttcgaaaacctgcaggagccatgccgttgtttgaagatcattcggatcatctgatcgaacgatttcgtctggtcgcggagggaaagcaaagcagttcgcgtattggaagaattcttgttccggtgattgcggttgcgctgttggtgctttcgtattcacttatccttcagccgaggtatgaggaaccggagaacgcatatgatatggagaacagcatttggaacatagatcaaaaggatgcatatttgtatgaagtagatggaaaatattatgtttatagtgagcataaaacgcttccaatagatcgcaaaggtgcagagtttatgaaaaagagtggatttaaatttaaaaaaggaggaaattaatatgaaaaaaaaatttttaatagtaacagcaatgtgtgcattattagttggtgttgctccgatcgcgagtgtgagtgcagcggaagtagagcaggatgtgcaggaacagaccattcagagtgatattgggattgcaccgtgtgcggatgagattgtgacaaagtttcgtattaataaagataaggtacagtatcgtcgttggaatcagaccagaggatactgggtggataagaagtggattgatttatagattaatcaaagatttttgccggtgcagctgcaccggcattttttttataaatgattctttcgcaaattataattcttccggcagttcccacacctgtgcctgttgttcatattccgaagcacgggagagaagatccccggcagagcatggattacagaggtcattttctgccagcgtgtggtaacattccgccagtcgcagcaatgcttttttccctgaaatttcaatatccaaaacaggctgtgtctcaaatgcagcattataaaaccacagagaagcttcctggggattctgccgttctcggtagtattgtccgatctcataacagatttcggagcaggaagaactgcacatatctttcagacagatcgaaaagaaatcatccacagaattttggatacgcgcagcgtgcgccagaatacacgcggattctgcatcagcgtgcgcttcatagtgtatcgaaaaataatctgcggcgcgtagaaaatcttcctcatccccacatttataaagttctcttgcatacatgcgcgtgattttctccgagaggacatgattttcacgaaatgctttttcaaacatggcaaaatcccgtttggcatgcatgacatgtgggcggtgcagaatatcaatatcactgtcatagataacgggatcggtgcggatcgtttcgtgaaccggatcaacccatgaaaacgtgcgcaggcgtttaaaaagttttggccgtggttctttcttacagttctgcacggtgttgaaatccggtggggtgatatagttcatctgaacaatttcaatttccggaagaagagcaccttttaaccggagaaaacgtctttgattttccagatcaaggtattcgtccgcatccggacagtagatgtaatccatggttgcaagcgaaaacgcataatttcttgcggcggagaaatcatcacaccaggtaaaatcatagatccggttggtgtattgtgcggcgatttctttggtgcgatctgtggagccggtatcaacgatgatgatttcgtccatcatggaagcaacggaatccaggcatcttgccagaaccggttcttcatttttgacaatcatacataaacttattgtgatcataataacagatggtccttccgaggtttttcttttatattacactatcctgcaacagttttacatagaaataaagaaatatacttgtatcttttttgaaccatggctataataaaatttatgtggtgtgaaattataaaacaaattttggcagatatgcggcagccacttcaatatgtgccatgggcactggttattgtggtacttgggctggttgtaacaattgtactttctgaaaaaaaggatggaaaaaaagcatccgtccggttttttcgtatactttttgcgatttatatacttgtggtgatacagattacttttttttccagagaacccggttccagaaatgggtgcatgaatctggaactgttttccacgtggggatacagcgtggttacccatgcattttttattgaaaatattcttatgacagtgcctttcggaattctggcaccgctttgttttcgccggctgcggccgatgtggaaatgtgttgtactcggaggtgtctgttcggttctgacggaactgagccagtacgtgacgaaacgcgggtattgtgaagtagatgatatgctgaccaacaccataggtgttttatgtggttgcattttgttatggctgattgaactgataataaaacaaaggagaaagaaatgaagtatgattatctggtggtaggagcaggattatatggctccgtatttgctcacgaggcagcaacaagggggaaaagagttctggttgtcgataaacgtccgaatattgccggaaatgtttatacggaggacattgagggaatccatgtgcacaagtatggtgcacatattttccataccaacaataaaaaggtgtgggattacattacaaaatttgcggaatttaaccgctttacgaattcaccggtagcaaattacaaaggggaactatactcgcttccgtttaatatgtacacctttaataagatgtggggtgttgtgacaccggaggaagcagcggcgaaaattgaggagcagaaaaaagccgcaggcattacagaaccgaaaaatctcgaggaacaggcgatcagtcttgtgggaaccgatatttacgagaaactgatcaaaggatatacacagaaacagtgggggcgtaagtgtacggatctgcctgcttttattatcaagcgccttccggtgcgcctgacgtttgataacaattattttaatgcgctgtatcagggaattccgatgggtggttacacaaagatggttgagcatctgctggagggaatcgaagtccggcttgggattgattatctggagcagaaagagaaactgaaggctctggctgagaaaacggtatatacgggagcgatagatgcgtattttgattattcgctcggcgcgttggaatatcgttccgtgcggtttgaaacagaacttctggatactccgaatttccagggaaatgcagcagtcaattatacggatgcccagacgccgtggacacgtatcattgaacacaaatggtttgaattcggcaaggatgatgagggacatgatttaccgaagactgtaatttcgagggagtacagttcggagtggaaaccgggggatgaaccgtactatccggtaaacgatgaaaagaacggagctctttatcagaaatataaagaacttgcgggaaaggaaaaaaatgtaattttcgggggaagactcggagagtataagtattatgatatggacgctgtgatcgcttctgcactggaaatgtgcgaaaaagaactgggataggcttctagaaagatacaaaaaagagcattcgctgtatggttacagctggaatgctctttttgttatacatatttatccagcatcattccggagtagatggatgtgatgtatggggttgcaaagttgtgaccgggatttttataggccacgactattttgttgacatagttcatcggattgatggagatattttccgcttcttttccgatggaatcccgaaattgggataaagtttcaaatgtattctgatcgcgttccggaacaaccgcttcacggagagcttccttgtcaatagagatagagccattctcgttcgtgaccagaccgatgtcctgtaaagaactccggctcgaaccggatatggaaagaatctctgtctgaagtttgtttccagcactggcattggtgtctgcatacacggctgcggtggaaagtatggaattataggcatccaccagagactggatattgtccgcaattgcatccgcatctgttttaaatccaatgtttactttctcaccatcggttggctgatttaaggtcagttcaaatacctgattgatggaaaatgtgttggtcagggaagagtggcttgtgccattcagtgtaaaggcggaactctgtgcaggggaagtgatgcggtcaattcccagctgatccatgatttccgtggaacccgtgctggcatccggtgcaatggaaaaaagttcggtttcgttatctgccagaccggtctgtatggaagtcagtttcagcgcactcgaaccgtttccatcggacagtatttcggcggtaattccaagactggaggagttgacaagcctgaccagcttgtccagcacatccagattggtttcgtcggaattgatattatattgaaattcatatgcagcaccgggcgtattcagatcaaaagaatatgcgccgggacgcatcgacagtgtattgtcttttaaaaaacgtccctgattgatctggggtgtggcaagccgctgcacttcaatgtcaaagttattggttttactttcttcacttccgtcgccgatataggtcacactgactttttcgtcatcggaagacatggcaactttcttcttaaaagaatcctcaaatgaaccgtactggtcggaaagagatgccacaacattctgaatggagcgcgcattttccttgatgtctatggcatattttttcgcatcggtgagattcggaattttataaagaggcgaatctttatttattttgacaatttcattataaactttgcgcagttcacttttcttgtgtgaatcataacgtgaaaccgttttcttggcatacgtcgagatataataagcgtaagcattatcaatccttgccattgagattcccctcctttcttccctgaattgaggattgagagcaggacagtaacagacctgttctcctgtgaggtacatatcctttgcaccaaaaagattctacttgaatagtatatcggcatcataccgcattttccatacccttgtatatggtaaaattttactaaaaattcacaatttggcgtaaaagctgcaaaaaatcataaaaaccattgtaaaagatgttgacggacatggaaaatcatgatatagtatgaaagcttggaagtaggtcttttttttatgcctttttttaggcgagacaaaacacgaaaattaaaacggaggtggaagttgtgcgtacaaagattacattagcctgcacagaatgtcagcgtcgtaattacaacatgacaaaggacaagaagactcatccggacagaatggaaaccaagaagtactgtagattctgcaagactcatacagttcataaggaaaccaaatagtccgtacagagcaaaggagttatgaaatgggacagacagaaaacgttgaaaaggctccaaagacaagctggtttgacggtgtaaaggcagagttcaaaaaaattatctggccggaacagaaatcagttgtcagacagaccattgcagtgattgttacatccgttgtagtcggtcttattattgcactgctggattgggcaattcagcacggtgtgaatttccttgttggtttgaaattttaacggaggcatagtgatttatggcagaggcgaactggtatgtagttcatacctattcaggttatgagaacaaagtcaaagcgaatattgacaagacaattgagaacagacatctggaagaccagattttggaggtccgtgttcctcttgaggaagtgacagaagttaaaaacggagtgaaaaaacaggtttccaagaaaatgttcccgggctatgtgctgattcatatgattatgaatgacgatacatggtatgttgtccgcaatacccgtggtgtgacagggttcgttggaccgggaagcaaaccggtgccactcacagatgctgaaatgagaccgctcggaatcaaggctgaaaacgttgtggtggatttcgcggaaggcgacatgattgttgttatcggcggtgtctggaaagatacctgcggtgtgattacagcgatgaaccataacaaacagacggttacgatcaatgtggatctgttcggtcgcgaaacaccggtagaagtaagtttcgcagatgtaaagaagatgaattaaggaggcaattccaatggcaaagaaagttgaaggatacattaagctgcagattcctgctggaaaggcaacacctgctcctccagtcggaccggcacttggacagcacggtgtaaacatcgttgagtttacaaagcagtttaatgcaaagacagccgatcagggcgacttaattatccctgtagttattacagtatatgcagacagaagctttagctttattactaaaactcctcctgcaccagtactgatcaagaaagcctgcaagatcaagtctggttccggtgaaccaaacaagacaaaggttgcaaagattacaaaggcacaggttcaggaaatcgctgagctaaagatgcctgacttaaacgctgcaaatatcgaagctgccatgagcatgatcgctggtacagcaagatctatgggtgttgaagtagtagactaatctaagtttaagaagaaatgtgggagggtaattgatttcccacccgatattaccaccaggaggtttatatttcatgaaaagaggaaagaaatatcaggacgctgtaaaggcatacgatagaagtgctcagtacgatgttgctgaagcaatcgacctcgtaaagaagaatgccacagcgaaatttgatgagacaatcgaacttcatcttagaacgggctgtgatggacgtcacgcagagcagcagatccgtggtgcggttgtactgccacacggaacaggtaagaccgttaaggtattggttttcgcaaagggaaccaaggtagacgaggcacaggcagcaggagctgacttcgttggaggagaggaattgattccgaagatccagaacgagggatggttagacttcgatgttgtagttgctacaccggatatgatgggtgttgtaggacgtctgggacgtgtccttggaccgaagggcttaatgccaaacccaaaagctggtacagttaccatggatgttaccaaagctgttaatgacatcaaagccggtaagattgagtatcgtttggacaagacaaatattatccacgtgccagttggaaaagcttcatttacaagtgagcagttgaacgacaacttccagtctcttatgggcgcaatcaacaaggctaagccttcaagcttaaagggtcagtacattaagagtgctgtattaacttctacaatgggacctggcgtaaagcttaacgttgtaaagattgctcagtaatagaaaaatcagaagtcgggaaccggaaacggttcctgatgaaatgataaaatgtatgatcagacttacacaagcaaaatgcggaaaacacttgacatccgcataagaacatattataatagcaaagcatattgccgaagacagtaaggtgctatcgcatattgcgacagcgtaaagggaaatccacctaccgagggaatttttgatgataatcgtcataaagaatgatacccctctgctgtaaggcggagggtttttattatacctcacgctatatgcaagaaataaaataaggaggtaaatgaatcgtggcaaaggtagaattaaagcagccgatcgttcaggagatttctgaaacaattaaggacgcacagtcacttgtagtagttgactaccgtggacttacagttgctgaggatacacagcttcgtaaaaatttaagagaagctggcgtaacttacaaagtatacaaaaatactttagtaaaccgcgcaatcgagggaacagagttcgagagcttaaaggatgtcctggaaggacctaacgcatttgcagtatctacagaagatgctacagctccagccagagttctggcagagttcgcaaagaaggctccaagccttgagatcaaggccggcgttgtagaaggaacatactatgacgcagagggaatgaagcagatcgcaagtgtaccaagcagagaagtacttctttccaaattacttggaagcttacagtcacctatcacaaatcttgctcgcgttcttaatcagatcgcagagaagggtggcgcagcagatgcagcagcagacgcagcaccggctgaggaagcaccagcagcagaataattattaaaaataaaattataacggaggaaataatcatggcaaagttaacaacagcagagtttatcgatgctatcaaagagttaagtgtattagagttaaatgaccttgtaaaggcatgtgaagaagagtttggcgtatctgcagcagcaggcgttgtagtagcagcagcaggcggagacgcagcagcagctgaagagaagactgagttcgacgtagagttaacagaagttggaccgaacaaggttaaggttatcaaggttgttcgtgagatcacaggtcttggactgaaggaagctaaggacgctgttgatggcgcacctaaggtaatcaaggagcaggctgacaaggcatctgctgaagacgctaaggctaaacttgaggctgaaggagcaaaggttacattaaagtagtctgtgcgtaagcgacgagaaaccaataataacccggcagagatgcttgcatttctgttgggttattttatttagctgtatcccctctctctatctgaaaaaagttcttaaaaataattcttgcattccccttgattttgttgtatagtataagttgcactattgtggtgcactaggcatttccatgctcttttttaggaaaaactagattgaaataaaaacgagaggtgaaacgtcaatggagaaaaacagaatacgtccagtcaaggctggaaaaggcttgcgtatgagttactcaagacagaaagaggttttgcagatgccaaacctgatcgaagtccagaagaattcttatcagtggttcctggatgaaggtttaaaagaagcatttgcagatatctccccgatcacggattacagtggtcatctgagtctggatttcgtcgattttacactgtgcgaagacgatgtgaaatatacaatcccggaatgcaaagagagagatgcgacatatgcagcacctttgaaagtcaaggttagacttcataacaaagagacagatgagattaacgaacatgaaattttcatgggtgatcttcctcttatgacagagacaggtacgttcgttatcaacggtgcagaacgtgtaatcgtcagccagttggttcgttcccctggtatctattacggaattgctcatgataaagtgggtaaaactctttattcatgtactgttatcccgaaccgtggtgcatggctcgagtatgagactgactccaatgacgttttcagtgtaagagtagatagaacccgtaaagtgccgattaccgtattgcttcgtgcacttggtgtaggtaccaaccagcagatcattgacatgttcggcgaggagccaaagattctggcatccctgcagaaggacccggcgatcacagagcgtgagccacagggaagctttgaggctggtttattagagttatataaaaagatccgtccgggtgagccgctttccgtagaaagtgcggagagtctgatcactgccatgttcttcgatccgagaagatatgacctggcaaaagtaggacgttacaaatttaataagaagcttgctttaaagaaccgtatcaacggacaggttctggcagaggatgtactggatccttctaccggagaagtaattgcagaggcaggcacaactgttgaccgtgatctggcagatcagattcagaatgctgcagttccggcgctctggattcagacagagacacgtaacgtaaaagttctttcttctatgatggtagatatcagaagctggattcctgaaattgaggacccgaaggctattggtgttacagaactggtatattatccggctctgcagcagattatggaagaaaacgagacattggaagagcgtatcgctgcaattaagagagatattgcagacctgattccaaagcatattacaaaagaggatatcttcgcatccatcaactataatatgcatctggagtggggcatcggaacagatgacgatattgaccacttaggaaaccgtcgtatccgtgctgtcggtgaattgttacagaaccagtatcgtatcggtctttcccgtctggaaagagtggttcgtgagcgtatgacaactcaggatcttgagggaatttccccacagagtctgatcaacatcaaaccggttacggctgcggtaaaagagttcttcggatcttcccagctgtcacagtttatggatcagaacaacccactgggtgagctgacacataagagacgtctttctgcattgggacctggcggtttgtccagagaccgtgccggattcgaagtacgagatgtccattattcccattatggacgtatgtgcccgattgagacgcctgaaggaccaaacatcggtctgatcaactctctggcatgctacgcaagaattaacgagtacggatttgttgaggctccgtaccgtaagattgataaatcagataaagacaatcctcgtgttacagacgaagttgtatacatgactgcggatgaggaagataattaccatgtagcgcaggcgaacgaaaaactggatgaggatggatattttgttcgtaattccgtatccggtcgttaccgtgaagaaacgcaggagtacgataagactgcattcgattacatggacgtatctccaaagatggtgttctccgttgctacagcactgattccgttcctgcagaacgatgatgcaaaccgagcgctgatgggatctaacatgcagcgtcaggcagtgccgcttcttaccaccgaggcacctgtagtaggaaccggtatggagacaaagacagcggtcgattccggtgtctgtgtacttgcaaaagaagcaggtatcgtggagagttctgagtctaatcgtatcgtagtacgtgaggaggacggaaatcgcagagaatatattctgacaaagtttgcacgaagcaaccagtccaactgctacaaccagagaccaatcgtgttcaagggacagaaagtagcaaagggtgaggtgatcgctgatggaccatctacatccaatggtgagctggcacttggaaagaacccgctgatcggcttcatgacatgggaaggttataactacgaggatgccgttcttttgagtgagcgtctggtagagtatgatgtatatacttctgtccatattgaggaatacgaagtagagtctcgtgatacaaagctcggaccggaagagatcacaagagatgtaccaggtgtcggtgatgatgcattaaaggatcttgacgagcgcggaatcatccgtgttggtgccgaagtccgtgccggagacattctggtaggaaaggttacaccaaagggagagacagagcttaccgcagaagagagactgcttcgcgcaatcttcggtgaaaaagcgcgtgaggttcgtgacacttccctgaaagtgccgcacggtgcatatggtattgttgtagatgccaaagtatttaccagagaagatggcgatgagttatctcctggtgtaaatgagtctgttcgtatttacattgcccagaaacgtaagatttctgttggtgataagatggccggacgtcatggtaacaagggtgtcgtttcccgtgtatt

SEQ ID NO: 789 - DNA, 28573 bp, unidentified
  source 1..28573: mol_type = unassigned DNA
tatggtctacctgaagctgatcgataattataccatttctatctatactgcaaaggagctgtataattacaaactccacgaggcagcagacaaagaaagtacatcaaaacaaaagaagcaggaactgactgccaagctggacagtatcctggcaggtcataaggaaaaaggggaagagcttaacgagaaatttgaagtcgtatccggtggcaaggtagtaaccaaggtcagaaaatattccaaggaagagatagacctggcggtacgcagagtatctcgtatcgttaagatcggaatgttcatgaaccgttatcccgcagaactgtccggtggacagcagcagagagttgctattgccagaacactggcaccggaaccccaggtactgttcatggatgagccgctgtctaacctggatgcgaaactccgtctggaaatgagatatgaactgcagcgtctgcatgtagagaccggaagcaccttcgtatatgtaacccatgaccagatggaagctatgacactggcaacgaagatctgtctgatcaacaacggtgtattgcagcagtatgaagcaccgctgactgtgtacagcagacccaacaacctgtttgtggctgatttcgtaggaaatccttccattaattttatcgaagctaagggtgtgcagaatgaaaacggcagcctggatgtgacgatcttagacggtagaaaggcaaagtttgttccgaaagaacatctggatctgctaagatggtttgcagagagagataagaacgaagctgatgaggcagcccgtcacaaagagaaaatgcaggataagaaagctgtggagaaatccaacaaggatgaagtcttccagtatcatattgccagagtgaacgaggatgattatgcactgcaggaagctcccgtgatcaccaacgaggattttgtcatcggtgtacgtcccgaagccctgcaattacacgatggcgcaggactggacggcgtgatctacggtgccatgcccacgggtatggaatccacgattaagcttcgtatcggtgatttcctgttgaccggcgtggtcttcggcaataccgcctacaagatcggccaggaagtgaagttcgagatcggtggagaagatattctgttatttgacagaaaatccggaaaactcattacagccggcagactgcaggtatagtcataaacacaggtgattcagcatcttaaaaaaacgtatcggaaaacgagaccgaatgtctcactaccgatacgtttttgttgtaatcgaacaaagattcgtatataatgaatatgtctgcaaaacgagaacatcaaagatgcagttttgcgaatgaggttctgcatcgttacaatcttttgcaacaggtgctacagggttaatgcgggaggcagcaatatgaaaatcatccattgtgcggatatccatctggattccaaaatgagtgcaaatctgaccaaagaaaaagcgagagaacgtaagacggaattgttgaccacctttcagaatatggttgcatacggggcagaacagggcgtgtcggcgatcataatcgcaggagatctgttcgatacgaaaaacgtatccgctaccgcccggaatgtggtaaaagacttaattcagggacatccccaaatagctttttattatttacaggggaatcatgacgaaggaagctttacgtccagtctttcggaacttccggagaatcttcatctattcgggaacaactggacaagctatgaactttcagggacggagaatacctcaggtaagggagttgcagttaccggggtggaactgacaccggaaaacagcggaagcatatataatacgctgtcactggatgtggatcaatgcaacattgtagttctgcatgggcaggaatcggaatacagtgcgagagataaggcggagatcattcatctgacggcattgaaaaataagggaattgattatcttgccctgggacacatccacagctataaaaaagagcgtctggatgcgagaggcgtctattgctatcccggctgtctggagggcagagggtttgacgaatgcggagaacatggttttgtgatgcttgacattgatgagctgacaggtacaattgacagtacttttattcctttcgcatcccggaagctctataccattccggtggatattaccggttgtgaatccacgacggaaatcctggaacggatgagagatgagacagccgggaaaggttacccggagaaaagtctgatcaagtatgaactggtcgggaaaatagatgtggaaagtgaaaaggatattgattttctgctacatcagttcagccaccttttttattttgtgaagattaaggacaactctgcgtatctggtggattatgctgcttttgcaaaggataagtccttaaagggagagtttatccgtactgtcatgggcagagcggatctgccggaagaggacaaggcgacagtgatacattacggattgcaggcactggccggagaggagatcctggacgcatgaaactgatcaaatgtcacattgagaatttcggaaaactaagtgactttacatatgattttacagatggctgcaacaccgtctgtgaggaaaacggctggggaaaaagcacactggctgcattcttacgcgttatgctgtttggattccggaatgaagggaagagagatccactggaaaatgagaggaagagatacagtccctggcaaaagggcgtctacggcggagaactgcaatttgaaagtgaaggaaagcaatattctgtccgcagaaccttcggaagtaaaagcgcagaagatgaatttcagctgacagatacgaaaacaaatctgccatgcagagatttcacacaaaatctgggagaagagttgttccggatcgacgcaggatcctttgaacgaacgattttcatctcacagaatgactgcgagacctttgttacggacggcatcaatgccaagattgggaatctggcggagaatacggacgatatcaataattttgagacagcggacaagcggttgaacgatctgttaaacagcatgtcaccctctcgtaagaccggattgctccgtcagagcaaggaccgcattacggaactgaagacgcagatccgtaacgggcaggagatacagaatacgatggaaagtattgatacccggaaaaaggcggcgatcgaggagagagaaaagctttctgcggaactgacagaactgcaggagagacaaaagaaactgggaatttataaggaccagcaggcgaaaaaagagaagtacctggatctgcgtgcaaaaatggcacagagacagcagactttaaaagaagcggaaagctattttaacggcgtgataccaaaaggggaagaattacgtgaaaaaacggccgtttgcaatcaggggatttctgtccgcaaagcaatggaaatctattgcctgacagaggaagaacaggcgcagtgtaaagacaattttcccatggtggacaatgcccggctggaagaaaaatatgctgaggcacaagaacttgagagcctggaaagcgcgacaagaaaaaatgccctgtcagtggaagagagcagacggttagaggagctttccggatattttgcggaaggaatgccgcaggaggcggagatcgacagtgtaaaaaatgcctggacgaaccgcaatgaaggaaaaagtcttctgcaggcgaaagaaatacagaggaaaaccctgcaatccatacaggcacaggaagatgccagatgcttacgggagcaggaagaagcaggtaaaaggaaaaaaatgctattgctttttggcattcttttagcgcttggcggttttgctgtgatcctgttgggacagggagtgatcggaggagtcctgatcgtactgggaattgcagctgtggcagcggcactgttgtttacagcaggcagatccaaagtccaaacgggagaaaatacagagctttcctatttggaacaggaaatggaagaacttgaggcacaggtccgcatagcggaaggacagattgaggatttctgcactcgctggggacttcgggaaggactggaactgacctcatggcttgtggaactgcagaataagagaaaggattacgaggcacttttggagcggcagaagcaggacggatcggatgaaaagactgcgagaattgccgtattgcagaaagatttgcagcagttttttgcagaatacggagaagtaccggaaacacaaaattatcttgcggcattgcatgaactggcgggaaagtgcagacagagacagcttttactggaaaaacaaaagaaatatttacagcaaaaacagaaatacgaagcgctggaagaacaggtaaaagactattttgtgtcgttgcagctgattccggaggagcatccggaagaacagttggccgaactggaaagtcatagaaaggattatgagaaggagttacaggaatatcggagaatcgagcaggagataaaagcgtttgaagcgaaagaggacattccgtcacttctggcactgaaggtcccggagggagaggaatccctggaaagtctggcagatgaaatgcaggtcctttcggagcgtatggaagaacgttttcagaccattgacagctatcagaaacaactttccgacttacaggaatcctgggataatgtggaaaatatgcaggaagagctggaagcgttgcaggagaagacagaggaaggaatcaaacaatatgaattgcttggaatgacaaaaaatctgttggaacaggcaaagagttcgttcactgcgaaatatacagaacctgtcatgcaggggttccggaaatattacagaattctcacgggaacggaatgcgaaaattatcagatggatgccaataccagattgcaggtcgttgaaggcaatatgccccgagacatcggatatctgagtttgggcaaccgtgacctgatcggtatctgtatgagacttgctttggtggaagccatgtatgaggaacagaagccgtttttgattctggatgatccttttgtgaatctggatgagaaccggaccaagggagcaatgcggttccttacagagatcgcaaaagagtatcaggtgatttattttacctgccatggcagcagggaataaagtcaaccctgaaaaaattgtttgactttttgaaaaaataaaaatataatgcaataaaaagtgtgtagcttatcagcgtaagtccagcttatgcggtgagcacacactttttttgtgcaaaaaaacaaaacaaggaggatgaaatgaagatggcagaaagtaacaagatgaaggagatgccggtaaataagctcatggtgaagatgggaataccgatgatattatctatggcattgcaggcagtttacaacattgtggactgcgcctttgttggaaatatgagatcgggaagtgagtctgcgcttaatgcacttacgctggtgttcccggtccagatgcttatggtagcagttgcaatcggaaccggagtagggacaaatgcgctgcttgcgagaacacttggacagggaaatgggaaaaaagcatcgaaagttgcaggcaatagcttatttctcggagtactcatttatgtaatatgtctgctgtttggaatatttggggtaaaagcttatatttcatcacagacagttgatccggaagtaatttccatgggaacagactacttaagaatatgctgcgtgatcgcatttggcattattttcttttcattatttgaaaagctgctgcaggcaacaggacgttccctgtattctacgatcggtcaggtcgtgggagcagtggtcaatattattctggatccgattatgatttatggtatcggtcctattccggaaatgggagtaaagggagctgcctatgccactgtgatcggacaggttgcgtctgcggtactgttgtttgtattccacataaaatgcaataaggaatttgagcatggtgtgaaatatatgaagccggatggtgggatcatcggggaaatctatgcgattgggtttccggccattattgcacaggcacttatgtctatcatggtttatgtgatgaacctgattttaaaattcagtccttcggcgcagacagcatatggattgttctataaggtacagcagtttgtgttatttcttgctttcggacttagagatgcgatcacgccgatcatcgcttttgcttacggaatgcatagtaaacagagaatccgggatggcatcagatatggattgctatatacgattgcgcttatggttataggagtggcgatcacggaaatattcccgggggcttttgctattttatttaatgcaggacagtcaagagagtattttatcggagcaatgagaattatttccatcagctttatttttgcagggatcaatgtggcatatcagggaattttccaggcattggacggaggcttggaatcccttgtgatttcactgctcagacagcttgtcattatattaccgcttgccgggatattctccatttttgtaagaaacggacagacgggagtttctctgatctggtggtcatttctcattacggagtttatagcatgtctggcaggatatgtatttttaaagaaaatcgaaaggaacaaagtagaaagcttaggttaaggaggaagcagctatgacaaaaaggatcattacaatcagcagagagtttggaagcggaggccgttttatcggtgaagaagtggcaaaaaaacttggtattgcttattatgataaggatatcataggacagatcgcagaacagtcgggactttcaccgaaatacattcaggaaaatgcagagttatctcctaagaaaggcatgtttgcctatgcctttacaggacgtgacattaccgggaaatcgattgaggacatagtgtatgaggcacaaagaaaagtgatcctggaaattgctgaaaaggaaagctgtgtgatcataggaagaaatgcggattttatcttaaaaagcagagatgatgtactgaatgttttcatacacggtaatatggaggaaaaggtacagcgcatctgcaaactatacaatgtcagtgaagctgatgcagtaaaaaagataaatgatacagataaaaggcgcagaacaaactacaatttttatacggatcagaaatgggggatggcagataattatacgttgtccctgaacagctctcagatcggatatcctaagtgcgagagcatcataatgcaatgtatatgataccagggtcaaaaggtctaagcccacatgcttagcacggaccgaaacagagcggagaagcgagagtgcgcagcacggaacaattcgtaggcaacaaagtcaggggtttttgcccctgacttcatgaatatagtaaagatgttttaatcttctatggaattatcagatgcttcgcttccggcagcccgtacggcaatgccgttgacctcgatattaccgtccagttcgatgacgaggcactgtctgccgtcgatcagcttcgtgttgacgagatccgtgcgctcgggattgaccttgatgaccacatctggtgtctttacctcaaagctgcggggattgtagacgttggtcatcatgagggaagtagcttcaccggcagtggcatcgaaacactggtcgaagacctccatgcggtcattggctacaccgctgctggcaaaaatggtctttacttcatttttatccaataccacaggttcgggatcttctttatgttcctgggcaatctcattcattttctcgtggatatttttcaccgtctcgatatcacaggtatcgcctaacgtctcctccaccagtgactggaaggtttccttctgaccgcctgcggacagaggaagaggacagcctaacatcagatccacgaagttctcctttaattcctccgcatccttggaatagtacagagtgctgtgcagatcggtactccggtcattgaaggcggggaacaggaaagcagcgtccggcatacctaccacccagtcccggatacggttctggaaggtgttttccactgcgttgtagcttagccccggcttggacagatccacagggcagatgcaggtaaggatatagtcatagacttcatcggaagcatcctccatctcgataccgtctctggtgcgtcccggtacatcgtaggcatcatggatcagcaggatcagataattgcccacatattcataagattcgatgatacggtcgtagaactgctcaagcaatgcatcgtccttcagacggctgtctctgagacgcagcaggaattcctgtgtgccgccctccgtttcactctttaacgggaattccagattcagcagattttttccaatggtgccggacagactcttccgcagaatctcgaaatacttgaacatttcctcctccggcagtgccagaaacgcctgttttaattccgtcttcttatttttctctccatccacatagcatccgcagatccgggtgatggagcagtttttcggggtgaacagctttttgatctcgctgatttcctgttttgtcatgagagtaccttctttcgatttgatgatatcagtatagtataaaaagcgtgatgggacaagtggatctaggttatagaatttttagaaatccttcattttactataattgttttctgacagataaggtgttatcataacattatcaagagaagccaatcaccacaggcgacatacagtgatgatccggagacgattttaccgcccccgcgctggcagaaagaaagaggcgcgtgtttatggaacaacatgatttaagtaagattcagaaattacaggagaaaggaaaatccgacaagatcatcaaatatctgagctcttccgatgacaccgtggtggtagccgcactggaagctctgagccggatcaaggatgaggacagcgtgaacagcattgcccacatgatcgacaatccggatccgaagatccgtgtcgaagcagcaaaagcattaggcagcatcggtaccgaatatgccaagacctatctgctgcacagactgaatgaggaacaggatgagactgtgaagacagccatcaaggaagcccttcacactctggcagagcatcattaatttaatttgctttactcgtagtttttctacttatacattttccctcttattggcgtccgggtcattccgggcgccttttttaacgtttaagcctgcgaaatttggaaaaatcttgcgatgggttctgcttgaagccatgacgcatatctatttataatagaacggtacgtgaaaaaagtagttttgtagtcatggaggtagtttaatggaaaaattaaacattacaactacaaaggataatgaaaaagtatacaaaatcctgggggatctgatgaatgccaacaaggaattccaaattatgatcacggttccttctacgaaaaacgccaaagacagcacagtaaaagcgacagaaaaaaaggagcagacccaggaagtcatccatgacttggaaaaggatgtcacggatatgatccatgagatcggagtcccggcacatatcaaagggtatcagtatctgcgggaagctatcatgatgtcggtggaggatccggcgatgatcagttccatcacgaagatcctgtatccgaccatcgccaagcgttttcagaccacacccagccgcgtagagcgcgctatccgccatgccattgaggttgcctggagcagagggcgcatggagaccctggatgccatgttcggttacacgatcgacacgggcaaaggcaaacctaccaattcggaatttatcgcgttgatcgctgacaggatccgactttcttacagaaactgaggcaaaaccacagactctaaaagatttgtaaattatcgctgccctcttttctatgaatcgtaaacatggtataatcaatctatattttgaaatacaagccgtagcatatgtggagggtttacatgaaaaaaattctttttgccgcatcggaaggagtaccttttatcaagaccggaggacttgcggatgtcgtaggatctttgccgaagtatattgacaaggagtattttgatgtaagagtgtttattccgaagtatacctgtatgaagcaggagatgaaggataaactcaagtatgtgacacatttctacatggatttcaactggcagaatgtgtacgtaggtgttctggaagcggaagaagccggggtgcattattatttcattgataatgagagctattttggtggtttcaagccttatggggatgatcccagatatgagatcgaaaagtatgcatatttctgtaaggcagtgctgtcggcattaccgcttttgaatttccagccggatctgatccattgccatgactggcagacaggcctgatccctgtatacctgaaggagcgtttccatggtggagatttctaccgcaacatgaagtccgttatcaccatacataacctgaagttccagggaaaatgggacgtgaagacggtacagagcattaccggactgccggagtattattttacttctgataagctggaggcttataaggatgcaaatctgttaaagggcggtatcgtattcgcagatgcggtcactacggtaagtgatacctatgctgaggagatcaagacgccgttctacggtgagggtctggacggactgctgcgtgcgagaagtcatgatctgcgcggtatcgtcaatggtatcgactatggagagttcaatccggagacagacaaaaatatcgtaaaagcctataatgcagtgaatttccgcaaggaaaaggtgaagaataagcgtgccctgcaggaagagctgggacttcgcgtagatgataagaagatgatgattggtctggtatcccgactgacagaccagaagggtctggatctgatcgcttatgtcatggatgaactgtgtcaggatgatatccagttcgtggtactgggcaccggtgaggaacgttatgagaatatgttccgtcatttcgactggaagtatggagacaaggtgtctgccaacatttattattcggatgcactgtcccataaaatctatgcggcttgtgatgcttatctgatgccgtctctattcgagccctgcggtctgagtcagttgatcgcgctgcgttacggtaccgtacccatcgtcagagagaccggcggactgaaggatactgtacagccctataatgagtatgagagcaccggtacgggcttcagctttacgaattacaatgcacacgagatgctgaatacgatccgctatgcggagcatatttactatgacaggaagagagagtggaataagatcgtggatcgtgccatggccactgactactcctggaaggtatctgccgggaaatatcaggagatgtatgactggctgatcggataaagaactgaaataaggtaagataacatatggcagataagaacagttccaagaacaattttatcatgcaggcgggaattctggcggcagccggaatcatcagcagaatcatagggctcctttacaggggccctttacagagtgtcatcggaaatctgggacttggctattaccagtcagcgtataactattatacgatcattctgttgatttcctcttatagtattccctcggcaatttccaaagctatcgcacagaagctgggagagaaggaatatcgcaacgcccacagattgttccacggagccatgatctatgtactggtggttggcggtatagccagcctttttctgtttttcggagcgggattattcgtgtccggagcagcagtcacagtactgcgtacctttgcaccgacgatctttgtctatggtatcctgggtgttctgcggggatattttcaggcacataagagcatggcgcagacctccgtatcacagatcctggagcagatcgccaatgcggtagtcagcgtaggcgcggcatatcttctgatccaaatgtttatgggaacgatggaggttccggctgatcaggcagggcaggtgatgagagcaacctacggtgccgtgggaagtgcactgggtaccggcgtcggcgtattagtggcgttgctttttatggcgggagtctatgctctgaatcgtggaatgatcctgcgcagagtgcagcgtgacaggcatgaacatgtggattcctacggacagatattcaggacgatcacactggtggtgaccccatttattttgagtacggctgtatataacttaagcagtacggtcaacaacagtatctacaccaaatggtatccgtcccttcgtaatctggatacggtatctatttatgaaaaatatggtattttctccggacagtccctgacaatgtccaatattcccatagcctttgcatctgctatggcatctgctatgattccttccgtagcacagctgatggcagcccgggatgtgaagggagccagagagaagatcggattggcagtgaagactaccatggtgatctcgattccctgtgctgtgggactttttgtattagcgaagccggtgatcagtctgctgttcacgaacaagacggcagaggaactgaacctggcagcagcccttctgatgacattgtcattgtcggttatcttttatgcattgtcgacattaaacagttccattttacaggggctgggcaaagtcaataccccgatcatcaatgcggggatctcgctagtggtgcagacggtggcagcagtattgcttttgatgttcacgagtctggatctgtacagcattgccatcgccaatacgctgtattccggtatgatgtgtgtgctgaaccagtgggcggtaagaagagcggtaggctatagacaggagatcgtcaagacttttgtcattccggcgttcgcctccgcgtttatgggagcggcagcctgggcaatctacgaaggtctgtatatggtgacgaagtccatgcggatctctgtcattccggcgatcatgatcgctgcggtagtctattttgtcatgctgatattgatgcggggcatcacggagcaggagcttcgcagcttcccaaagggatatctgctggtaaaggtggcgaagaagtgccgcttattgagataaaggatccccgccattcttgaataaggtgatcatctcctgaccgacactgatagtggagggcaggtctggtacatcctctctggagaaccattttgcttcaccgagttcggattcctgaaaagtaatcgtgggatcaccgtccagctttgcaaagaagccgatcatggcggaatcactgaaggaccagggctgggatttgtaatagaccagatcactgacccgtaggccgacctcttccatgatctctctgcgggcagcccctttgaaggtctcgccgacttccacaaagcctgccaccagtgcccagtgacgataggaaccgccggcgtagcgtgtcagcaggatcttgttccgcatggtatccacgatggcgataatgactgcgggagaaatcttgggatattcaatctgtccgcactccgggcagatgcaggcccgctctgtggtgctgtgaattgtgggatgcccgcagcggccgcagaacttccggtccagacggaaacggttgatctgggtggctgtgatcccggcgaacgccagatattccggttcaaaattacggaatacaccggaaggatagaggtcattttccgggagcatgagagcaccggcgtcctccgcggtcttgcgaaagaatgccctgtcatcaatagaaaagagatattcgcaatccaaaaagaaacgttccaggggctgttttacaccaagcaatttatgaacctcctcgaaggtaggaagatatacctgaggatgcttcacaatatctgcattcatggaagcatccgcagcaacagcattctctgcagaggagggcagatataccttctccccatcaaataacagcagataatcggaaggctttggctcctgatttcggaattccggataatatttatgcggttcaatcttgtggatcatcatagggcatttctccttttatggctattttttagaaagtgttcataagaatatagtagtccaccgtgaggggactgtcaaatgcaacagttcgactgaactgttgtggaaattatttgagattccggtatatttgtgttaaaatgttttgtaactgttctgggacgttcattccacgaagaccccgacggacagttatgaaatttatcagaaaatacagcatgagagtgttgtgaggaatggagattcgtatgttacagatgatcttgccggagggaagcagttctctccttgctttttttggaattctttttgcttttagtgctacggtactggcaacggcgaaattaagtccgtatctgcccaaggatgccggaagagaatttgcccatgatggaaaattgtccgcggggaaacccagaggcgccggaattatttttgtcctggcatttgtggcatctgttctactgttttcgcttttaagcgcagagctggtgatctatctgctgctgatcgtggtatgcatgatgacgggatttctggacgatgcttccaagactccatggggtgagtacaaaaaaggtttcttagatctgtgcgtggcggcactggtagccatcacttttctgaaatataattccaacgtggtggaactggcgctgttccatgtaaagttcactctgccgcctgtggtattcgccattctcacggtaattctggtatggacctccgtgaatgtgaccaactgctccgacggtgtggacggactgtccggaaccctgtcgatcattaccatcatgtccatctatattgtagaccgcatgaaggaggtcgacgagacctattccttcctgatcctattatttgccgtatgtattctgggatatctgtggtacaatgcgacacccagtaagctgatgatgggggatgccggttcccgggccatgggattgttcatcagcatcgccattttgaagagcggctgcccgttcctgtttatcccattggcactggtgctgatcctggacggaggactgggacttcttaaggtgtccctgcttcgtttcctgaagatccatattttgaaaaatgtacgtacccccctgcacgatcatgtgcgtaaggtgtgggattggtccaatacacagaccgtattccgttttgcgatcattcagatcattctgtctttggcagtgatctatgcgatgcagctgtagaaagaaggattatagtgtgaaaaatacgcatgatagcttatttttcacacggctatttgtgccgcaggcgtcacaaactagcccttatcgcagaatcaaatttgaaatttgattcgcgattcctccgacgaaaggaatcgtctgcggaatggagattattatgtacgacgaattaacacccactgacattaagaaaatggaagatgagatcgagtaccgcaagctggtggtacgtcccaaggcattggaggacgtgaaggaagccagagcccacggcgatctcagtgagaattttgaatactatgcagccaaaaagtataagaatcagaatgagagccgcatccgttatctggagagaatgatcaagactgcaaaggtcatctccgagaactccgcagcggatgaggtaggtatcaacaacaccgttaccgtggaatttatcgatgacggcacggaagaggattacaagatcgtgaccaccgtccgcggtaattccctggaaggcctgatcagcaacgaatcccctctgggcaaggcgcttcttggtaaaaaagtaggcgatgtggtccatgtgcaggtcaatgctaatgtgggctatgacgtggagatcaaggcattgaaaaacaccgaggatgacggagacaagatccgcagcttctaatcatctgcggaacatataagaatagaaagaaaaaggaattacaagaatgaagaaatatctgctgtttgatctggacggcaccctgacagatcctaaaatcggaattactacctgtgtgcagtatgcactgcactcctttggcatcgaggagccggatctggacaagctagaaccctttatcggaccgcccttacgagacagttttatggaattctacggtttcaccgccgaacaggcagaagaagctgtggcaaaatacagagagcgctttcaggatacgggactttttgaaaatgaggtctatgatggtattccggagatgctgaaaacgcttcagtcgaaggggtatttcctggcagtggcatccagtaagccccaggtatacgtagagcgcatcctggaacattttgatctgaaaaaatatttttctgtagtggtgggtagtgaactggacggcagaagagaaaccaaggatcaggtggtacaggaaactctgcgtcagctctttggagagaatcccgtggatccggcgcaggtctatatgatcggtgacagaaagttcgacgtggaaggagccagggctctcggtgtggagagcgtgggcgtgacctacggctacggaagtaaggaagagttaaaggaagcgaaggcggattacattgtacaatccgtggaagaactggagaaatttttactccgtggcagtgaagaattactgaacggaaatccggacaataaaaagaaaaaccccatgtatcagaggatctggaccatggtgtattcgtttctgatgtttatattggtgcgcaatgcagtgcagtatgcgctgctggcactgttatatcagctggcacagtccggagcctccggtggactggtggatcttttaatcctacgggatgagaccggcgcctataacggctactccggagatgtctccagtatcattgcggctcttggattcatcggcggtgccattgccgtatggtccacagcgaagatgctcattgataaaaataaagaggacatgcacttaagccacttgaaaaaagagggaaagagcaaatatgtcttactgactgtggctaccatcggtgccgtcatcggatgcaatctcctgtttgaactcctgggagtgaccaataagtctgaagcttataccgaagtggcagcccagcaatattccgcacactttatcgtaggaatcctcgtattcggcttcatctcccccatagcagaggaactcctgttccgcggagttatctacggataccttcgcagattcatggatatcaaactcgccatagccctgtccgccctgatcttcggtgtctaccacatgaactacgtccagggcgtatacggcttcctcatcggctgcctgatggcatatgcttacgaatactttggagagttcaaaatggcagtctttgtccatgtggcatccaacgtcctcgcctactgcctgtcctataccgccatcgccgtcaccggctttgtcagctggcctgtatgcgtgattttcctggcagtggcagtagtatccctcgggatgcttcacaaacagaaaaatatattctaagctctaataaagtatattagccatcctctggatattcgataagatatctctggatggttaccataacccagtagccccgacagagggaagaataagcagaccgtaagcagacgtcggcacttagcgtgggtactttccacgcttatgtgccgctacgctctgcgacatgagcgcatcgtgctaaagcgagagcgtgtcgcgtttcttccctctgtcgaggctacggagattttatagaaaaataggagcaacatatgaaattcagcatcatcgtagtctgcttaaacccaggtcctaaactgaatcagactctggacagcatcctgtcccagacctacccgagctttgagatcattgtcaaggacggcggcagccgcgacggctccatagaaaccatgcgcgaggacagacgcatccacctataccaggaatccgaccacagcatctacgaagccatgaaccaggcagtctcccatgtgaccggcgactacattctcttcctaaactgcggtgacctcttctatgacgacgaagttctgacccacaccgtacagttcatggaacagcacccggcgaaacttcagggcatctactacggcgatacctacagcgcgaagacagagacgaagatatcttccccaccacgcatcaccggtttcgtctgctaccgcaacattccctgccatcagtcctgcttttatgctgcagacctgtgcagacagaagccctatgaacccaaatataagatccgtgcagattacgaacatttcctctggtgctattatcgtgccaaagcacccatgcagtatctgggacttaccgtgtcctcctacgagggcggcggctactctgagaccaaggagaacctgaagcgcagcgctgcagaacataaggagatcacagcaaaatacatgaatctcggcgaactgttccgctatcgggcagtaatggcactgacactggcacctcttcgcactgcgctggcagagagtaaacacttttctgcaatgtatcagaaactgatgagcaaggcgtatggccggaaacaggaaaaataggggagaacccccaaaaagttgtgctgaaaatacacttttaaagagaaaattaatacaatttacagataacaggcgtgcaaataatagaattgacaaattatctgacaattcatagaaaaatctatatttacaaatgagaaaaataggtgtatagtacagaaaaggtcgcaatgaggcgctcgaaagagtctcattgcgaccttttttgttactattatggtcttgcgaatgaggtcctgaatagtaacagacagattaagaagagagaaataaaaaacccggaaaggagaactatatgtttgatgtaaaacaggagctgcccaaggcaccgttatatcgggaagaatttgagcatgataactgcggtatcggagcctgtgtcaatattcatggagagaaaagccgcgctactgttgagaatgcgctgaagatcgtagagaatctggagcacagagccggtaaggatgcggaaggtaagaccggtgacggtgtcggtattctgacccagatcccccacaaattttttacaagagtcacaaaggctctgggcatggatatcggcggagagagagaatacggtgtcggcatgttcttcttccctcaggaagagctgcgccgcaaccaggcgaagaagatgttcgagatcattgtggaaaaggaaggaatggaattcctcggctggcgtgaagtgcccactttccccaatgtgctgggacataaggcagtagagtgcatgccctacatcatgcagggtttcgtgaaaaagcccgccgatgtggaaaagggtcttccctttgaccgcagactttatatcgcaagacgtgtatttgagcagtcttccgatgatacctatgtagtctctctttccagcagaacgattgtatataaaggaatgttcctggtaggacagctgcgtacattcttcgccgatttacagagcgaggattacgaatccgctatcgccatggtacactcccgtttctccaccaacaccaaccccagctgggagcgtgcccatccgaaccgcctgatggtacacaacggtgagatcaacaccatccgcggaaatgccgataagatgctggcgcgcgaagagaacatggaatccgagcatctgaaaggacagctgcacaaagtactgcctgccatcagcaagaccggttccgattccgcgatgttagacaacacattagagttcctggtaatgagtggcatggagctgcctctggcagtcatgatcgctatccccgagccctgggcgaacaacaaagcaatgtcccagaccaagagagatttctatcagtattacgctaccatgatggagccctgggacggtcccgcatccatcctgttctccgacggagatatcatgggtgctgtgctggacagaaacggtctgcgtccttcccgttacatgatcacggatgacgataccctgatcctgtcctccgaggtaggtgtgcttcccattgatcccacgaagatcaaagtaaaagaaagacttcgccccggtaagatgcttttggtcgataccgtacagggcagagtcatcgatgacgaggagatcaaagaaaaatatgcttccagacagccttatggagaatggctggacaacaatctgaccgaactgaagagcatccatatcccgaactatcgtgtaccggaatacacctacgaagagcgccagcggatgcagaaggcttttggctacacctacgatgaaatgaagcagagcattctgccgatggcaaagaacggcagcgaagccattgcagccatgggtgtggataccccactgcccgtgctgagcaagacgaatcacccgctgttccattatttcaagcagctgtttgcacaggtgacgaacccgcctattgatgctatccgagaggagatcgtaacctccaccaccgtatacatcggtaccgaaggcaacatcctggaggagactccgaagaactgtaacgttctgaaggtcaacaacccgatcctgaccaacactgatctcttgaagatcaagaacatgaaagtagacggcttcaaggtagaagtcgtacctatcgtatattacaagaacaccagtttagagcgtgccattgaccgactgttcgtggaagtggacagagcttacagagaaggcgtgaacattctgatcctgtccgacagaggcgtggatgagaaccatgtgcccattccttccctgcttgctgtatctgccctgaaccagtatctggtacgaaccaagaagagaaccagagtcgcattgatcctggagtctggcgaacccagagaagtacaccattttgctacgttgctcggttacggtgcctgcgccatcaacccatatctggcacaggataccatcaaggagctgatcgagagcaatatgctggataaggattactatgcagcagtggatgattacaacaatgctgtcctccacggcatcgtcaagatcgcatccaagatgggtatcagtaccatccagtcctatcagggttcccagatcttcgaggctatcggtatcgcgccggaagttatcagtaagtatttctccaacaccgtatgtcgtgtgggaggtattaccttaaaagatattgagcagcaggtagacgacctgcactctcaggcatttgatccgctgggactgaaaaacgatctgaccttaaacagccccggacatcacaagatgcgtagcggcggtgacgagcatctgtataatcccgctaccatccatatgttacaggaatccaccagacgcggtgattaccagatgttcaagcagtacaccgccatggtcaatgacgaagattccatcaagaacctcagaggactgatggactttaactatccgaaaaagggcgtgcccatcgaggaagtagagccggtagaatccatcgtgaccagattcaagaccggtgccatgtcctatggctccatttccaaggaagcccatgagaccatggccatcgccatgaaccatctgcacggcaagagcaattccggtgagggcggtgagaatctggaccgtctgaccgtaggcccggacggcttaaaccgttgttccgccatcaagcaggtagccagcggacgttttggcgtcaccagccgctatctggtgagtgcacaggagatccagatcaagatggcacagggagcaaaacccggcgagggcggacatctgcccggaggaaaggtatatccctggatcgccaagaccagacactccacacccggtgtgtccctgatctctccgccccctcatcacgacatttattccattgaggatctggcgcagctgatctacgatctgaaaaatgccaacacccaggcaagaatctccgtaaagctggtttcggaagccggtgtgggaaccgtagcagccggtgtggccaaggcgggagctcaggtcatcctggtatccggttatgacggcggtaccggtgcggcaccgagaaactccatccacaatgccggacttccctgggaactgggactggcagagacccatcagaccctgatcatgaatggactgcgtaataaagtccgcattgagaccgacggtaagcttatgagcggcagagacgtagccatcgcagcgattttaggtgccgaggagttcggtttcgctactgctccattggtaacgatgggttgtgtcatgatgagagtatgtaatctggatacctgtccggtaggtgtggctacccagaacccggagctgcggaaaaacttccgcggtaagccggaatatgtggaaaactttatgaaatttatcgcacaggagctgcgggaatacatggcagccctgggtgtgcgtaccgtagatgaactggtgggcagaaccgatctgctgaagagaaaagagcatctgaccgagcgccaggaagaagtggatcttacccagatcttaagcaacccttacgagggcagcaagcagaaggtaaccttcgatcccaggcaggtatatgacttccagttagagaagacactggatgagaaggtgctgttaaagcagctgggcaaagccatcgatgcgggacagaagcgcagtatcgaagtggatgtcagcaacacagaccgtgccttcggtacgatcctcggaagtgagatcaccagaaaactgggcgatgacgtggaagaagatacctatcatgtactgtgtaaaggtgccggcggacagtccttcggagcctttatccccaagggcctgaccttggagctggtgggcgacagcaatgactacttcggcaagggcttatccggcggtaagctggtggtatatcccccacagggcagcaagttcaaggcggaagaaaatatcatcatcggtaatgtggcactgtacggtgcaacctccggtaaagcattcatcaacggtgtggcaggcgaacgtttctgcgtacgtaactccggtgccattgcggtagtcgaaggtgtgggtgatcacggttgtgaatacatgaccggcggacgtgtggtagtcttgggtcccaccggtaaaaactttgcagccggtatgagcggaggcatcgcgtatgtactggatgaaggcaacgatctgtataagcgtctgaataaggaaatggtatcttccagcgagatcacatccaaatatgatgtgttggagctgaaatccatgatccaggagcatgtggcactgaccaactctgcaaagggtaaggaagtgctggataactttggagagtatctgcctaagttcaagaagatcatccctcatgactatgagagagtcctgaagactatcgtacagatggaggaaaagggactgagcgcagagcaggcacagatcgaggcattctatgccaacaccagaaagtaaatgggaggtaagtcatgggaaaaccaacgggatttatggaatataaaagggaagtcagcgtggctgaagatcctaagaagagaatacagcattttaacgaattccatgagcatctgccgaaggaaaagcagcgtttacagggtgccagatgtatggaatgcggtgtgccgttctgtcagtcgggcatgatgatctgcggtatgaccagcggatgccccctgcacaatctggtgccggagtggaacgatctggtatataccggcaactggcagcaggcttacaaccgtctgaagaagaccaacaatttccccgagttcacttccagagtgtgtcctgccctgtgtgaggcagcatgtacctgcggactgaacggggatccggtctccaccaaggagaacgaatatgccatcattgaaaacgcctacagcgagggctatgcggcagccaagccccctgtggtacgcaccggtaaaaaggtagcagtcatcggcagcggtccttccggactggcagcagcggatctgctgaaccagagaggacatcaggtaacagtattcgagcgttccgatcgtgtgggaggactgttgatgtacggcatccccaacatgaaactggaaaaacagatcattgaccgcaagatcaatattatgaaggaagagggtgtcacctttgtcacaggaaccgacatcggcaaggacatcaaagcatccaagcttttgcatgattttgaccgcgtcgtactggcatgcggtgcctctaatcccagagacatcaatgctcctggcagagatgccgagggaatctattttgcggtggattttctgaaagccaataccaggagccttctggattcgaattttgaagataaaaaatatgtggagaccaaggggaaaaatgtggttatcatcggcggcggtgataccggtaatgactgcgttggaacctccatccgtcacggagcaaaatctgtgacccagatcgagatgatgcccaaggctccggacaaaagagcagagaataatccctggcccgaatggccgaaggtctgcaagaccgattacggtcaggaagaagccattgcggtctacggacatgacccgaggatatatgagtctacagtcaaggaatttatcaaggataagaacggcaaacttaaagctgtgaagatcgtgaagctgtcctgggaaaaggatccggctaccggacgcatgaagatgcaggagatcgcgggaagcgagcagatcctggatgcagagatcgtgctgatcgccgcaggatttttaggaacccagaaatacattgctgatgctttcggcgtggaattaaatgaacgcaccaatgtaaaaacagctcccggaaaataccagaccagtgtggaaaatgtattcgtcaccggcgatatgcacagaggacagtccctcgtcgtatgggccatccgcgaaggcagagaagctgcacatgctgtggatgagagcctgatgggatactccaacctcgtgattcaataaataaagaatgcccccggctcatcaccgggggcttattgttttatctcttatgccagagggaacttgaagtatctctttgcgttattgtaagaaatatcggttacgatctcggacagagtatcgtaatctgcagggaactcgccgctttctacccagttaccgatcaggttgcacaggatacggcggaaatactcatgtctggtgtaggacaggaagcttctggagtcggtcagcattcctacaaatccggacagattacccaggttagccagggagatcatctgatcctgcatgccggtcttgtgatcattgaaccaccatgcagaaccctgctggatcttggcaacagcggtggaatcctggaaacatccgaggatggtaccgattgcctgattgtcgttaggattcaggctgtagatgacagttctgggaagctcatcacttacgatcagagcgttcaggaagtcagccatctgagcggaaggagcgtagttgttgatgcagtcgtaaccggtatcgggacccagcttctcgaacatcagggtgttgttgtcacgcttacaaccgtagtgcagctgcatagcccagtcgagcttatgatattcgcggcctacgaacagcatgaaggcggtcttgaatttcagttcctcttccttggtcagaaccatcttgttcagtctctttaagaaaatctcttccagctcatcatcggaagcgggatagtacattacatactctaaagcatggtcagatacgttacatcccatggatgcgaaaaatgccatacggttcttcagagcttcctttaagcttgcaaaagagttgatctcggtcatgccggcagcagcagccagcttctccagataatccagataatcgggcttctcgatattcatagccttgtcgggtctccatgcgggcagaacctttacatcgaaagtatcatctgcagccagcttcttgtgccactccagagaatcgataggatcatcggtggtgcagatcagggtaacgttactctgcttgatcaggttacgaacgctcatggaaggctgatggagcttttcattgcacaggttccatacttcgtcagcgctgtttttgttcagaacgccattgtaaccgaaatatctctgcagctccagatggctccagtggaataaggggttgccgatagccttgcccaggcactctgcccatttgcagaacttctcgtaatcggatgcatcaccggtgatgtacttctcgtcaacaccgcaggaacgcatgaaacgccacttgtagtggtcaccgcccagccatacctgggtgatattgtcgaactgacgatcctcagcgatctccctgggattaatatgacaatggtaatccagaatcggtgttttttctgcgtagtcgtggaacagcttcctggctgtctcagtctctaacagaaagtccttgtccataaatgctttcattttaaaatcctccataaatatactaaagggtattttcagctcccctattgctgtcattgctgtaaagaaaaaaattattttgtggtgccgcgttttaccagttctccggagaacacagtctttttcggcatctcgtttccttccaggacacccatcagagttgtgatcagatgctggcagagcgtctctaatttattgtcgatgctggtcagttccggatcacagcagcttaccagcatggaattattataaccgataatggacagatcttccggaatgcgaagtcccatttcccggccgtatttcagagcacccagagctagggaatcgtcagcggcgataacaccgtggaaagagattccttttgcatggagctttttcaactgatcggccatggcgggaatatcctcgtgggatccctgatagagctgcaggaagcttccgttggtgagaagtcctttttcttccatggcggcacggtagcctgccagctttttcttaccactgtaggaagtagaattatagaaatacagaatatcttccacaccggagcggatcatctccatggtagcgtcatacatggaagtaaaatcatccgagacaacactgtatacatttggagcatccatcgctgcatttaacagcattacaggaacctgcgcggaggcatctgtaatgtatttgttgtcttcttccttttcataaataaagttggaacctaccaatataatgccgtccacctttttggtgatcagaaggttcatggagctggctttggtagccagatcataaccggtacagcacaggatactgtcatagccgttggcacgaagcttctgttcgatataatagatcgccttggctaaatacagatcggaactgtcggcacacataataccgatggtcttcatcgtgttgagccctaaccctctggcaaatgcgttgggagtgtactcatactggttgattacgtccagaacttttttcttggttttctcgcttacattattgcttccatttaatacgcgggaaacagtagcaatagagacaccggccttctcagaaatatcgtaaattgtcatctgcggattcctctccgcttctatgtaacagaatttgtaagaaaactgtaagtagttacataaaaagctatatctgaattataacgaaagacttctcttttttcaagatgctttttcaatttttcatatgccaaaaaattatcaaagtgaaatattgctgataaaatcaatggtttgaggaaaaaataagtttctgtttttggtgattgacgaaatagcttttttgaagtagaataatttatgaaagtacttacataaactccgtacaattcagaaacaaaaacaccaacgagcgttgaaaacttaattgctcaaaggcgattgggaaggtaagtgcaggtaacagagtgccgtaagacggtgcagataggatacgctaagcgtagaatggaggacaaaatggatatcttaaacaaggcaaagaccggtaaaaaggagagacctatcaaggtcgtacagttcggtgagggtaatttcttacgtggattcgtagattacatgatcgatatcgctaacgagcagggtaagttcgacggagacatcgttctgatcaaacccatcgagttcggcaatctggatatgttccacaagcaggactgccagtacactgtatctcttcgcggtaatgtgaacggtgaagccaagatcatcaatagaatcgtaaccagcgttgcagacgcagtagacacttataatgaatatgacaagtacatgggacttgccgagatcgataccttacgtttcgtagtatccaacaccactgaggcaggtatcgtatatgatgataccgataagtttgaattagagcctcccaagactttccccggcaagctgaccaagttcttatatcacagatttgagactttcaagggtgacatgagcaaaggcctggtaatgcttcccgtagagctgatcgatgacaacggtattatgttaaagaagtgtgtaatgcagctgatcgagctgtggggattgggcgatgaattcaaaaagtgggtagatgaggcatgcgtattcacctctactctggttgaccgtatcattaccggttatccccgtgccacggaacaggaagagtgggagaagctgggctatgaagatcacatc

SEQ ID NO: 790 - DNA, 21236 bp, unidentified
  source 1..21236: mol_type = unassigned DNA
caatgtggacactgcctttttagggtggcgaagtcccgcgctgacgcgctctgccttcgtcccactgacgcgctctgtgttcggcttccgccgaacgacttctcgttgtaggcgcaagggaaaatcaaatggtcatgctcgtttcacttcgcataaccgcttgttttcccttttgcgcactacaccttttctgttaccttgagcctcgtgagagcacgcgcaagggatgcctcgctctgcttgtattctttcagactctctttctgtctgagtctctcttccgctctgatcttcgcctcattggctctgactctgtcgatatcctccggtttctctgcggaatccacgataaggacaactcggttatttactatctgaacaaagccttcgcccacaacacctatgacctgctcacctttactggtggtgatcctgatctctcctatgctggtagctatgaccatattctcatgatgtgcaagaaccgctttctctccatcttcaagtggaagaactattttctctgcccggccgtcgaagaatatcttattgctggaaataactctcagataaaatgtattcatctatgcacttccttttctgatatctgttgatgtctgctgatatcctctgatatttactggcccttctcggccttttcctttacttcctctatagtacccacattgaagaatgcccactctggatactcatccatctcaccgtcaactatcatcttaaagcccttgatagtatctttaagacttacatactttccaggtatacccgtaaagttctcagctacatggaatggctgtgacaggaatttttgaacctttctggctcttgtaactgtgagcttatcctcatctgacagctcctccataccgaggatcgctatgatatcctgcagctccttgtacttctgaaggatctcctgcacacgtcttgcaacttcgtaatgctcctcgccgactatatcagcctcaaggattcttgagcttgactccagcggatctactgccggataaataccctgctcaacgatctttcttgaaagaactgtatttgcatccagatgtgcaaatgttgtggctggggcaggatctgtaaggtcatcggccggcacatatacggcctgaactgatgtgactgaaccctccttggtagaagcgattcgctcctgaagctcacccatctcatttgcaagtgttggctgataaccaacggctgatggcatacgtccgagaagtgatgaaacctctgaacctgcctgtgtaaatctgaatatattgtcaatgaacaacagcacatcctgatgatttacatcacggaaatactctgccatagtaagtcctgtctctgcaactctcattctggctccaggtggttcattcatctgtccgaacaccagggcggtcttgtctataacgcctgactcgctcatctctgtccacagatcattaccctctcttgaacgctctccaactccggtgaatatggaatatccaccatgtacagatgctatgttctgtataagctcctgaataaggactgtcttaccaactccggcaccaccgaacagaccgatcttaccaccctttgagtaaggtgcaagaagatctataaccttgatacctgtctcaagtatctcgatgaccgggctctgattctcgaatgttggcggctctctgtggattacccagtgttctgtatccgagagatcctccttgccatctattgtctcaccaagcacattgaacagacgtccaagtgtctgatttcctacaggaaccttgattccagatccggttgcaacgacttccatatctcttgaaagtccctcgctggcggacaacatgatacatcttactgtattgttgcctacatgctgtgctacttccataacacattttttcccatgattatctacttcaagagcatccttgatgtatggcagatcgttgtctggaaattctacatctacgacaggtcccatgacctgtactatcttaccatttttcaaaacatcagacctccttcttaatttttctctttgaaggtgtatgcgaaatctttaagcatcactgttcctgaggtatttgtattgccaatccggggtcgctcccgctcatttcggtctgcaacggtccttaggtgccgcataacgcgcgccacctaaggaccggcgacctcaaattcccctgcttggcaacacaaacacctcatccgcactcaagtttacgagtttcgcatccacctatctacatatataaattaacttctatctttttgagctctggcgccaccggcgatctcggtgatctcctgggttatggctgcctgccttgctctgttgtatttgatattgagatcatctagcatctccttggcactctttgtggctgagtccatcgccatcattcggctgttctgctcactgcagaaggactctaccaaagcaccgtatatatatcccatgacgcagtttggcacgattcggtcaagcaccgccttaggtgaaggctccatggtgatctcctcgtggaacacatccgcaggaacgcctgcgaagtcagttctcttcatagggagaagctgtatcatctgtggctccacgaccacactgctcttcatgttggtatatatgatgtatacttcatctatatcgccgttctcatagttttcaagcatcttgtccgctatgactctggctctgtgaagactaggattctgcgctgtatactggaaatgtatatctataggcactcccttcttggcgaagtagtgtcttccaacctggccgactacatacagctcactgttcgggtgggctgcaagctcctgctcagctattttgattacattgtggttgtaagctcctgccatacctttatcggcggtgatcacaagatatccacgtcttctgtcctcttccttgattccctctctactgtcgaagtacaagtgctccatctcaggaacatgtctgagcattctggcaagggcaacctgaagtgtgtagaaatacggctccgtattctcaagatctgtcctggcctttttcagcttggaagatgagatcatatacattgcattggtgatcttctgagtatccttgatactctttattctattctggatttctttggtatttgccaatcaaatcacctctcaacgaatcttctaatttcttctgaaatctatctctcgataaactccttagcagctgcgactatcttgtccttcagctcatcagtaagcacctgcttctcctcgatctcatccacgatatccttgtgggcactgtggaagaactcaagcatctcaagtttcttcttcttgatctccgaaacctctactggaaggaatactttatttgtagctgctaccaggatgataacctcctctgccattgacagcggattgcacagaggctgctttaaaagctccataagtcccttgccgtactgcagctgttccttggtgttctcatccagatctgaactgaactgtgtgaacacctccatctctctgtactgtgccagatcgatacggatacttcctgcggccttcttcatcgctttcgtctgcgctgcaccaccaactcgtgataccgacagaccaacgttgacagcaggtctcatacctgagaagaacagatcgctctcgaggaatatctgtccatctgtgatagatatgacatttgtaggtatataagcagatacatcacctgcctgtgtctcgataataggaagtgctgtgatggaacctccgcccagctcatccttaagcttacttgatctctcaagaagtcttgaatggagatagaatacatctccaggatatgcttcacgtcctggtgaacgtccgagaagcagtgacaatgttctgtaagcaactgcgtgctttgacagatcatcgtacacgatcagcacatccttgcccttatgcatgaaatactccgcgatcgctgtgcctgaataaggcgcgatatactgaagtggtgctgaatcacttgctgtagatgcaacgactatcgtgtagtccatcgcatcgtatttattcaggttgtttacaacctttgctatggttgaagccttctggcctatagccacatatacacagatgacatccttacccttctgattcaaaatggtatctatcgctatggatgtcttacctgtctgtctgtctcctatgatcagctctctctgtcctctacctatagggaacatggcatctattgagaggattcctgtctgaagtggctggttgaccgacttacgatcaactatgcttggtgccggattctcaatagggcgataatcagttgtctctatgctgccctttccatctataggtgctccaagagcatcaactatacgtccgacaaatgcatcgcctacagggatacctgcacgcttgcctgttctgctgacctttgttccttccttgattcctgtatcacgaccgaacagaatacatcctatctctgttcttctgatatcctgaaccatacctttgacgccattctcaaagacgacgatctctccgtacatggcattgtctataccgtatacggttacaattccatcacctacatagatgaccttgccgacttctttgtccctggagtcaaaatcataattctctatctcttctttgagtatagaaataatatcctctgaactaattgaactcaatttatcacctcataaccagtttctgtctaagggatttgtacctgcccagaatgcttctgtcgtactcacggtctcccgttcttatgacaaatccacctatcaattcttttttctccaccatggaaagctgtaccgccttgcttccatactctttcataaggaagtcctcgatacctgctttctgcttatcagttggcggtgtgacataatagagagttgccgaaaggatatcctgctgctctctggcatacttctcatactcgtcaaatatatcatttatcatgtcaaatccatcattgtcacacagagttttcataaaattgacaagttccttactgccaaatctgtcaaatactctgtcaatgactttgcgcttttctgcatgctctaccaccggacttgccagcgcatctgccaactccagattttcatccaccagcgcttttatctcctccaccatgtcctgactgattccaagctgatagaggacaattccgtaattaattgccttctgcgtcacctgaatcacctgctttattcacttcatttaaaaagtcatcatacatggctgaacctgctgatgccgcatcaccttcaccgcccactatcttgccggctgctgccattgcaagctctgcgatctgtgactgcatatcagaaagtgccttgttctgcttgatctctatggtcttctccgcatcctttatcatcttgactgactttgcatcagcctgatctataatacggctatactcattcttggcctccacacgggatttctctcgaagttctctgcactctgcatcaacccctgcaagggtatcctcatactgtgccttgagcttcatcgcttcagccttctgattgttggcatccgatatattgccagcgatcatatcttctctcttcttgatgacatcgttgattggtccaatcaagaacttcttcaaaagaagaaacagaactattaagttgataatggtgaatgctattgtagaaaattctatatcaatcatatagccactcctatctttctgtttctgttatctgcatatacagatgaatctgcatctcttctgcaactccagatttctattagatatttatatcaaaatatccatctgacctaaaatctgattatttaagaagaatgattgcaagaagtccgataacgaaaccgtagatagctgttgcctctgcaagggcacaaccgatgataagaagctttgtgatctttccgtctgcctccggctgtcttgctacagcctcaactgcctttgatgttgcaaggccgattccaagtcctgctccaagtcctactaatgctgctatacctgctccaattgctaataatccgttcatatcattttctccttcttattttcattttaaacttcaaataatctttactccatcgcttcctgcatgtaaagcgtagtcaggaaagtaaatacaaatgcctgcaagaatccatcaaagaaatcaaaatacaggctgagtgggatagggacaatgagtggaactactgcctctatcagtttcataatgacgaatgctccgagaacattaccaaatagtcgcatacacagcgacagcggcttgatgacaagctcaagcacattaagcggtgcaactattgctaccggctctgcaaagctcttgacccagccctttgttccctttcctcttattcctgccacctgcacgagaactatactcatgatggcaagcgaggctgtcacattcaaatcctttgtcggtggtttaaatccaaacacacccatgatgttggccataccaatgtacagaataaccgttatcagatatggaacatacttcattccagcctctccgataacacctttgaacagattgttaaaggtcgttattatggtctccagcacaagctgtttcttgccagggttctcaaccttgagattccttacaagtatgatagataacaacacaagtaccgccataatgatccatgttaccaccacggactctgttaccggtatcccaccaaatattggtattgtaaatactgttttgcattggagttcattggataactcttctgccagatccgtaagacatcacttcctttcgcactgtttattatatgtcatgatgccgttatccatttattatggaaacagcattcctggcatctgcctcagtcaaccccacaagtacattctccgtattgatccaatgagaatcaagaccatgaatctcccagtccatatccatgtcatccaatatgacatatccttccacggaattggcggtcacatactccttgaccgcacatgctctggtataattgccatacttgtttctaagttcatcccctgaaggagttgccccataaacttccaatccagcatcagcaagtctgcctatcagttctcttacatgtgctttactgacatccttatcgatcacctgttttctccagtcactggtcataaccagcttagcctgtgtggcatcaactatcattttaagattcgccacattctttggatttataaactccccttgtttatcacacaggaatttttctgaattcagtacgccgtctacatcaaaaaatactacattcatacggtcataatcccctatttttttatttacgagctctctcgctccttgcttgcgtattttagcaccattcaaaacaaatttaaagtcatttatttgcccttatagtcatattttaatcattttttatatttgtattgttttttataacaaaaacttgtttttgttacagttttcgcaagaaacccgcataaaacctagcgtatcaccagtttatacttttttaataattttaacatttagtttataatcagcaaacttctgtcaattccattcaaaccactctaagcaacagcattaaatctatacgcaactgtgttttgtaacgcaccgtttttctatttcactcagaattcagctttatttactacaatattttccctatacccaatcccaaacaccccctgggataagaagcaaaccgaagtgagggtagtagagcgtgataccacatatatagcagatgattacttgttcccgaaaaatacacagccgtccccagcccacgaaaaaagactatcttcatatcgacgcccaacgctcggtatgtgatagccttgttccctctgccgaaatccgtcacccccattgtgacagatcgttgtagaaaatgacccccttgtcatctctcgatgtaacagatacttctattatacctatttgcaagacaaatggaagagatgtttctacaccagtgcgcaccggcaatatgcgcgctggtgtagttttttacactttgatatggacatttgcatttcttctatatataatagatatatctgtttgtataatttgcatatctcagtgcatttttacaaattttagatttttttatgaggtgggtatatatgggagattattacgatataggatacagactcaaagatgtcatggctgaaaaaggtgtaactatcagccaacttgccgatatgactggcatttctgaggatacgataaaagcaatcaggagcggcaagaccaagagtccgggaatacagcttatgatttctattgcggatgcactaggctgcaccatggacggttttctgcatcgccagagtctgacacacgaagagctctatcttctgagcaaattcaggactctcaacatacatggcaagaacatggtcatgctcatggcggactctgaggaccacatgcagcgccagcttccaggcaggaattccactgccagcacacgaaagataccatgtatctcgtcaactcacacgctggcttccaacaccgactactctacacacgcaacagaattcatagacatgcctgctgattattttccaacagcagattattgcctgcgcctcaccactaacatgcttcatcctatatatatgaaggatgacttacttgcagtggagaaggattttccaagattgggtgacatcgcagtatttctcaacgaggacggcgttgagatgatccgcaagtacaccgagcgcgacggttcaccataccttgaagctgtcagcagatgtgacaaatccatttatctcaccagcgacatcatatgcctcggaactatccttggcataatcagacttcaggacacccggatgccgcctatttcttaaaatatccaacacagtgccagcacattgctgctaacggctgatcacgaataaaaaaaacaaatgccagaaggaactgatctcataagctcttacatatcaatcagtctcttttggcatttgttcttattattatagtttgttactattatatttcgttacagcttctaataatccgtttatttctcagccgcacctgtgataagccaaggtgatggctgtgtcacgaacatattatccttatttgttttggatacggatatctgaattgcctccatattctttatccccagcttgtcaaatataagctttgcctgggcaagtataccaagatcaagagtatatatgacgaactgcatctccggattgatcttcaaaagtctctccatatcagactcaagataatggttggcaactataaacgcaagccttggaacaggtatcgctgccaaggtctcctcgctcatatctgggatgatctggacattatgtacgccaaacttgtccacattctcttccatggaacgtctagagccttcatccggctccactgctatgatattgccctcgctggcaactatggcagcctctatgacaatactctcagcctgaagtgcaaggatcgtatcgtgtgtgtcaacgtcaagcaggctcatgataactgcacgtatctctttgccaacatagtgaaccgtacctgctgagaagaaatcgtttgctattccatatcttacagactctctggtcttttcgttcatgataaatatagctgttggtcctgttatctttttattgagcaccttctctatcttgtcgtgatgtacctcgccgccaggctcaattccctcggcataccacatgtcatactcgccaaatcctttctcccacagtgtgtagagaagatcctcatgactctcatcggcaaatatcagtaccctcttgtgcgtatctatagttggaacaacattcttctgctttccacatatattcagcatctttatcttctcagggctgaccttcatcatatctgcaaaatacccaagccagctgagcatattcttgttctcatacataactgtaaccctcctttttgctgtcctatgcctcaaacttctttacaaggatacttgcgttgtgtccgccaaatcccagtgagttgctgagtgcatatgtaatgtccttatgaacgccctcacccattgtatagttaagatccatttcaccctcagtctcacggagaccaactgttggatggatgtatgaatcctctatggacttcacgcatgtgatgaactcaactgcaccggcagctccaaacagatgtcctatcatagactttgtggaattgatgttcacattgtatgcgtcatcgcccatggcatacttgatagctcttgtctcaaacagatcgttatgatgtgtgcttgttccatgtgcattgatatagtcaacgtcagcaggtgagatccccgcctcttccatggcaagcttcatggcacgacctgcgccgcttccatcctccttaggtgatgtgatgtggtatgcatcacatgttgagccataaccaacgacctctgcaagtatctgcgcacctctagcctgtgcatgctcaagtgactcaagtactaccacgcctgcaccctccgctattacaaatccacatctatccttgtcaaatggtattgatgctctcattggatcctctgcgcttgaaagtgctgtcattgatataaagcctgatacatttgtctcgcatataggtgactctgcgcctccggctaccatgacgtcagcctctcctgcctgtatatatctgtaagcctctccaatagagtttgttcctgtagcacaggctgtaactatgtctgtacatttgccctcaaggccaaactgtattgcaacattgcccgcagccatgttggatatcatcataggaaccatcattacactgaccctgttcgctttgccctctacgaccttcttgtgctccttctctatggttgccacaccgccaagtccgtttcctatacacgttcctatccttgttctgtcctcattctcaaggtcaagacctgcatccttgatagcctcgcctgtagctgctatggcatactggcaaaatggctccatacgtcttgctgcctttggatccatgtactgctttggatcaaagttcttcacctcagcggcgagcttacacttgtaatcgctgacatcaaacttggtgatctctccgattccaactgtattcttctttatattctcccagaactcttctacactgtttcctataggtgtaactgcacccattcctgttacaacaactctcttcatctcatacctcatattttcatatttgcaacacaaaaggactgccggcagcagtccttttgtctatacgccatcgaacattgcccggtggcccgtatgcacttcttagtaccttctgcgtcccagatatataaattttaccacaatgtgatatatataacaaggataaatagtattcaatactatgttcaatactatgttggcgcgctccgagacgatcctccagctactccagaagcccccgctcagccttgagagtgagtatccgccggacgctctcatcgatacggggctctgtgatatcgccattttgaactgctgtcacgatggcattgactgcagctgcaagatccgcgggctgaagcagcatatccattccggcctgaactgccatgactgccgagtccgccacaccataattgtctgcaatggactccatctccatggaatccgttatggctacaccgtcaaattccatatctccgcggagcatttccgtggctatcttatacgacagtgtagacggaagttcatctatatcaggaactataagatgaccgaccatgaccagttctgcccccgcatcgatcccggtcctaaacggctgcatctcatccgccattatctgtgcctttgtcctgttgacatacgcgctgctgtagtgtgaatcctccgcagtgtctccatgtcccggaaaatgcttgagggtgcatatcacgcctccatcttgaaatcccttcaccgcacttccgacaagctctgcagcctgggcatagtcatcactgtatgctcggtctccgatcaccgtgttgtccgggtttgaccacacatcggcaaccggcgcaaagtccaggttgaacccgagtgctgacatatctgatgctatggtttttgcattttcaaatgcagcatcaggtccatcatccttataatcatacatggggcctatatacgtagtccccagtgtatccataatccggtttactctgccgccctcttcatcggtcgcaataaacaaacctatcttactgtaactttgtgtgttggatatcatatccctggtctgatccacattgtcaaagttgttggcaaagtaaattattcccccaacagggtaagcctggagtgcctgttttgtagcgtcaccagccaccatgacatcatctgtacctgtcagtccttcaggtgtgacaaacatcatctgacacaccttgtcgtgaagactcatctccgccatggttttatcgaccagctcagaaacagcatcctctgtggtctctgtcgtatcgactggctttttttcagtatttacactttctttggaacttatttctgtaatcccgtgatctccgccggctgcgtcctgtacctttttagtcgaaacatcatctccttcatcgtttcctaaaagtaatattccagttattccacctattacacacactagcatcgccaatacagcaaatattcttttcatcttctcactctccgttagtctaaaaaaatacaataattatatgatatatcataggctcaacttcatggcaggttccagtgccgtgccagaaaatataaaaaataaaacagggtatcatcgtttttgattataccctgttttattttgtgtcatggccattaaagattacagactcatgccgccatcgacctttatgacctggcctgttatgtatgatgccttgtctgaagccaaaaatgccgctgtctcagcgatatctgaaacctcaccgagtctcttgactgtgatatggtcaagcatagcctcctttgccttgtctgaaagtgcatctgtcatgtctgtcttgataaatcctggtgctatggcatttgctgtgattccacggcttccaagctcctttgctatagacttggtgatgccgatcacgcctgcctttgacgctgcataattcacctgacctgcatttccctctattccgactactgatgacatgttgatgatacgtccatacttctgcttcatcatggttctgtacacatgcttgatacagttgaatgtacccttgagattgatattgataacatcatcgaaatcagcctccttcatgccaagcacaaggttgtctcttgtgattcccgcattgttcacgagaatgtctattcttccatatgtagtgactgcaaacttcatgagagcctcagcctcagcgaaatctgccacatttgccttgaaagccactgcctctccgccttctgccttgatctcctcaaccaggctgtttgcacgctcctctgagccgttgaagtttactactacctttgcgccatatccggcaaatgtctttgctatctcacgtccaatacctcttccggcacctgttaccactgctaccttatccttaagcattcagttcctccaatttcgctaaatcgtctacagttgcaatatttatactctttacctctctgttgatcttcttcatgaagcctgtgagagtcttgcccggaccaacctcgataaatgtgtcaacgccgtcagctatcatgttctctattgtctgctgccatcttactgatgagtacacctgtctcttcaggagctccttaacctttgctgcgtctgtgattttctccgcatctgcgttgcagtagtaaggtgcaaaatcatctgctattttgatatcctgaaggaagtcgtaaagcttctcacctgctgggacaagcatctgtgagtggaatggaccgcttacgttgagtgggataactctcttggctccagcctcagcaagtgctgctgatgcagccttaacagcctctgcctcacctgagataactatctgtccaggacagttgtagtttgctatctgtaccttgccaggtgtgttctcacatatctcagcgatcttgtcagcgtccatagctatgactgctgccattccacccattccaagaggtacttcgttctgcatgaggatacctcttcttctaactgtcttgattccgtcagcgagagtcatcgctcctgctgcaacaagcgcgctgtactctccgagtgagagtcccgcaaatacatcagccttgaggcctgcgttcttcaggtgctcatatatggcaacctccgctgcaaccatagccggctgtgtgtactctgtcttgttgatgtcgtcattctcctcgaaacatgtcttcttgagctctatatccagaacctcatccgcctcgtcaaataccttcttgctgtcctcaaagttgtcataaaaatcctttgccatgcccacatactgtgcgccctggcctgggaatataactgctgtcttacccattctttttaccgcctttattatattttgtaattgttttacattcgtacatcattgtgatctgcctgtactgaattgcaccagtctttttgtcctgacatattcttaatacatgtcagccatcccctattatagaacagggtccggcaaatcgcaagcggatatatcccggcaggattatccgctgattcctgccttagatacggtttatcaagccttgcctacattttgatagcatcccacgaaccgagagacggggacggaggtgcctgtcccctttgccattatggtaaataaatgggcataaaaaaagcacatgtgcatcactgtacacacctgctatattaacaatagtgaaatattatccttaaatcatcccatagccttggatggtcagtcaggacaggcgtcctggctggctaccaaagttatgtcatgtccgatacatgacaactttgaataacaatgtattcaaaacagtccaatctgttcagttagcaatatctccgaatgagaactactcaaaatgtcttagtcgtactattatctactgattactcctcaacacccttgctcttaaggtagttaagtacatcctcaaatgtagctacgtcatcgagctcctcagcagggatctcaacatcgaactcgtcctcaagcttcataacgatctcatacagatcaagtgaatctacaccaagatcatccttgaagtttgtctcaagcttcatctcgtcctgtgaaactcctaactgctcctcgaatattgccttaaccttatcaaacatgttcaaattcctcctaaaatatagtaaatgttaccattgccctcatggacgcttatactataacctacggtcacattaaagtcaacacgaagattatttatcatctgccttgatcgctgcggtctcatatataaactttacagtgctctttgttccatctatagcaccgccaaagctcgtgtattttgcatcatctgagaacagtgcctcaatgtagtctatatcttcctgatagttccctgcaaacagctttgtgatcttcttgataccgtcctcgttgaactgcttcatgccatcgctgagcgtctttgatccggatacaagcttatctgctccactgtcgagtgtctttgaacctgagttgagctggtctgcaccttcactgagtgactttgcgccatcagcaatctgccctgcgctcgtatcaagtgtgctcgcagcagtcttgagttcaccactgcctgtcgcaagtgtcaagcttccctgatagagagtgttcatatttttcgataatgatgccgctccatcgctcaggctctttgaaccattcttcaaggcctttgctccggcagcaagatcaccagttccacttgccaaagccttcactcctgtgtaagccttgtcaacgcctgctgaaagtgttgctgcaccgtcatttgcagacttaagtcctgccgaaagttcacccatcttggtgtcaagtgttgccgctccatcctgcaatgactttatttgggtggctgtcttttcatctgtgattgtagctgtgagagattcccctatctgatctatggcattgagagcaccctttgcctgtgcaagtccattgtactgctctatcagctgcgcgtatgcgccttcctgctgaacatatgcatcatatgccgcctggcccataggaagtgcctgctctatctgtgccattgctgcatctattcctgcctcacttgttatatttccgctaagctggctatatacatttgcttctgcctgagttacaacctgtgtcggcattcctttcatcattgttatcagagtatcaacacctgtcttaatatcagatgcaccctttgcaagagcctgtgatccatcgtatgctgtctttactccagatgcgagtgaacttgcgccctttgacagacctacactgttggaatctccggcaaatccagcctgaagttccttaactcctgagttaagtgtatctgcacctgtctggagtgtaccaatactcgtatccagtgtctttgctccacttgcaagtgtcttcgcaccatcgttcaatgctgctgaacctgtctttatagaagtgatacctgcatccaatgaatccatggccgacgatatctttgaggttccatctgcgagctggcttgtgtaatccttgagtgaagcagcaccatttgccagtgtctccgcaccattcttgagtgaatatgttccatccttgagtgtctcaagtccgtttgtaatctttcctgagccttcctcaagctgatctgctgagcttccgagcttatctgcactggatgagagatcgctgatatcagccttatcttttacctcatctattgcatcctctgcatctgagtcaagcagatcgcttgctgcaactgtcattgtcatggcaagctcaaagtctgttacatctgcggaaacctcaacgtagtcaggaacatctatattgtctatagctgtctgtatcttgctgtcatctattcctttctgcaggcactgcttaaatccaggcaccgcatatccgactacgatctggttgcttccctctgagatgacctttccgttctcaacctgtacatttgagaatttgtctaccggaaggatcattcctgaaagcattacaaatggtgatatgacttcgctgttcttactaccagcctttacagtctgcttagtattgtttgtataatcaaatctgatcgttaccttaccgctcttgccagccagctctgaaggctctatctcctcgccgtcaagtttatatgtgatcttcacatcaacaggaagcttctcacttgactttccctgataatagatgtctgatccatttgccgcccaggtaatagttccatcaccattatctttatagccttcataacccttcacgttctcaatatctgaaagattggtcttgtcgttaagcccttctgagccatcggcgttcttcagccatgtggataccgtgacatcatttgctgtaccatctgcatctgcgaggacgtacactgtctcctccttgtcagcgtcatctgaatcgtctgctgatatctcagctgcaagggcatcctgaagtgtatctgaatcgctctctgttgtagcctctgccttgtctgaagttgtactgtcatttgatgtatctccacatccggtcgtaagtgttgccatcattgctgctgacagcgcaacacacatatatttcttccacttgatcatgttattacctctttccataatatatgtgagaatccatgtagcggattctgcgtactacgttgtttctatattaaccagcttatgcctgaactgtgtccttgccggcatcagcagatggtccatcgatcaggttctttctgtatctgaacatgatgatcttatcgaagagcatcagtgctgatggaagcatcaggataacagcacacatacttatgagtgcacctcgtgccataagtgtacacagtgcactaatcatgtctatgtctgagaaaagacctacgccaaatgttgcagcgaagaacgaaagcgcactgacaactattgactgtactgactcctgacatgcagttgcaaccgcatcaaactttctgtatccgccaagtctatttctcttgtacttggtagtcatcagtatcgcgtaatcgaccgtagcacccagctggatagttccaattactattgacgctatgaatggaagctcggttcctgtaaagcaaggaatacccatgttgataaatatcgcaaactctatgacggcaacaagcactattggaagtgatattgaaccgaatacacagagtatgatgaggaatatagcaccgattgaaactgcacttactgaggcgaaatccttatctgttatcctgataagatcctttgtacaaggtgcctcaccgacaagcatgtttttatcgttgtatgaatctatagtcttctctatctcagtacactggttgttgacctcatccgatgcaacctcatactcagaaccaacaagtatcaactgccactcatcactcttaagtgcctctgtcacctccgaagggatgaagttcgatgggattcctgaaccgatgatgctgtcaagtccaagacagaactttacaccatctatattctcaatatccgacatcatatttcgtgtgtccttatcactctgatcatttgtgacaagtatcatatgtgttgaattcatattgaattccttagccagctctgtgttggcctgcacgctctccaggctgtccggaagcgatgaatccagcttgtaataaacctttgtatgattgtatccatatattgccgggatcaggatgatcacaaacaataccaggaatatcctgtagtgcttagctatgaattttcctactcccttaaactcaggaagtattaccttatgtgttgtcttttctattgccttgtcaaacacaaggatgagagatggcagtatcgttacgcaggcgataactccgaaaacaacaccctttgccatgacgataccaagatcaagtccgagtgtgaagctcatgaaacacagtgccacaaatccagcaactgttgttatggagcttcccacaacagatgatatagtctcagcgatcgcatgcgccatagcttctttcttatccgtatactccttctgctgtgccttgtagctgtgccacaggaagatcgagtaatccattgttacaccgagctgaagtaccgcagccagcgcctttgttatgtaggacacctgacccataaatatatttgaacccaggttgtatgcaatcgccatacctatacttgccagaaacagtaccggtatcatgatcgaatccatggtgatcgcaaggattatactgctgaggatcaccgctatcagaacatatattggggtttccttctcagacagcttctttgtatctacaacaaccgctgacataccagaaagaaagcactgcttatccgatatctttcgtatctcctcaatagcatccatagtgctatcagcagaagttgtatcatcaaatatgatcgccatcatggtggcatccttgtcgtcattgttaaatgcgttatacagtttttcaggaagcatatccttaggaaccgacagatcagcaaagctgtcgtaccagataacctttgacacatggtctacattttcaatctttgatttcagtgcggatacttctttatcctccataccctccacaacgtacagtgaaaaggctcctgtaccaaactggtcaaccagtatatcctgacctaccattgtctcgatatccttaggaagatatgacagaatatcgtagtttaccttggtcttgatatacccgtatgccgctggtatgagaagaatgaagccgaggatcagtatcacgactctcgcacttactatcttttctcctagttttaacatagccataacatctcctttttctattctgtggtggattatacaacctgatttttttttaataaactactcaaaatacgaaaacgtttacattttgttacaaatatggtaatctgtaacaaacgtatgaacacatattcaaaattggaacatttggtcatacatctgataaacagattcacttggaactgtcatatatagactaaaaaggaggtttgggaagtgccaaatctaagcgaagaaaagacagaagacaaaattatcagaagctttaaaaagcttgtaaatgagtattctttcgagaaaattacagttactatgattgctgaggatgtgggtatatcaagacctatcttctatagatatttcaaagacaaatacgaactgatggactatatgctttacaatgaagtgacaaaggagcttgaagtcctgctggaacacaacatgatcctagaagcgatcaagtaccttttcacccacattatcaatgaagcaaagctttacagaaagcttttcgagacaaccggacagaacagctttgagcaggtcatgatcgagcagttcactagcttcttcaaggaacacctgaagatattcgacaccgatcagattccatccaaccctatgctgtctcctctcattatatgtaagtatcttgtcatgggtctcaccgtagccatcaagggttaccttaacagcccggagatcacgaacatcgatgtggatcaagctgtggaagcttactacttcctggtgtcccactccatattcgaactcaccaaggaggacttcaggccaaagctgttccaaccatctgacaggaactacattacgctgccgccgaggaattagttgacggacgcccataggtgctgacggaaggttgtgcccctccgagggaacagaaaaagccgatgcagcagtgtctgaaatcacgcttgacctcttcctgcttcagcattttctatctgcatgcgtctccggcctcgataagggctgtgaggcctgcgacttagcaagaaaatgctgatacagaaaagtctgcgctaccgatttctggcactgctgcatcggctttttattctattccccggaggtaatctactttttcgttaacacctatgggctggtttgttatagcattaaattgcactatatgtcatttattattttcataattaggaatggcaacctttgaaaatctgatttactgattgctgacatctttctacatagcatcaattatccacagattatcctgactgtaatctggcttgata

SEQ ID NO: 791 - DNA, 7069 bp, unidentified
  source 1..7069: mol_type = unassigned DNA
atggacactcaacaaatagatgttatggtagccgacgcctcacatgaggtatacgttgacactattttggaaactatcagaaatgctgccgccgtgcgaggaacgggaatcgcagaacgcacacacgaatacgtagcgacaaagatgaaagaaggtaaagcaatcattgctctctgtggtgacacattcgccggattcacctatatcgaatcatggggaaacaagcaatacgtggctacctccggtctgatcgtacatcccgatttccgtggtttggggctggcaaaacgcatcaaacaggcttccttccaactggcacgcctccgttggccgaaagctaagattttcagcttgacctccggagcagctgttatgaaaatgaacaccgaactgggatacgtccctgtcaccttcaacgaactgacagacgacgaatctttctggaaaggatgcgaaggatgtatcaaccatgacatcctgaaagctaaaaaccgtaagttctgcatctgcacagctatgctgtacgacccgacagatccacggaacattaaaaaagaacaagaaagaaataacatttaaaagatacagcactatggaagaaaagaagaaaaaagtagtggtggcattcagcggcggactggacacatcgttcaccgtcatgtacctcgccaaagaaaaaggttacgaagtatatgcagcttgtgccaatacgggtggtttcagcgaagaacaactgaaaacaaacgaagaaaatgcctataaactgggagcggtaaaatacgtaacgctggacgttactcaggaatactacgaaaagagtctgaaatacatggttttcggaaatgtgctgcgtaacggtacttatcctatttcggtcagctccgaacgtatcttccaggcattggctatcgcacgttatgccaacgaaatcggtgcggatgccattgcccacggttctaccggagcaggtaatgaccagattcgtttcgacatgactttcctcgtactggcgccgaacgtagaaatcatcacactgacccgtgatatggcattgagtcgtcaggaagaaattgactacttgaacaaacatggtttcaacgcggacttcaccaaactgaaatattcatataacgtaggtctgtggggtacctctatttgtggtggtgaaatcctcgactccgcacaagggctgcccgaaacagcttacctgaaacacgtagaaaaggaaggcagcgaacaactccgcctgactttcgaaaaaggagaactgaaagctgtcaacgatgagaaattcgatgacccgatcaaagcgatccagaaggtagaagagatcggcgccgcttacggtatcggccgtgacatgcatgtgggcgacacaattatcggtatcaaaggccgcgtaggtttcgaagccgccgccccgatgctgattatcggtgctcaccgtttccttgagaaatacacattgagcaaatggcagcagtactggaaagaccaggtagccaactggtacggtatgttcctccacgaaagccaatatctggaaccggttatgcgtgatatcgaagcgatgttgcaggaaagccagcgcaacgtaaacggtacagcgattctcgaactccgcccgctttctttctctaccgtaggtgtagaatcggaagacgacctcgtgaaaacgaaattcggagaatatggtgaaatgcaaaaaggttggactgccgaggatgcaaaaggctttatcaaggtaacttccactccgttacgtgtttactataacaaccataaagacgaagagatatgattaaagcaggaatcattggtggcgcaggatatacagcaggcgaattaatccgtctgctgctcaaccatccggaaactgaaatcgtatttatcaacagcagcagtaatgccggaaacagaattaccgacgtacacgaaggcttgtatggagaaacagatctaagattcaccgaccagttacctctggacgaaattgatgttcttttcttctgcacagctcacggtgacacgaagaaattcatggaaagccataacataccggaagacctgaaaatcattgacctttccatggactaccgtatcaagagtgacgaccatgactttatctacggtctgccggaactgaaccgacgagctacctgtacggcaaagcacgtggccaatcccggttgtttcgccacctgtatccaactcggcctgctcccgctagccaaaaacctgatgttgacagacgatatttcggtaaacgccattaccggaagtacgggtgccggcgtgaaaccgggagctaccagtcatttcagttggagaaacaataacatcagtgtgtacaaggcattcgagcatcaacacgttccggaaatcaagcagtcactgcaacaattacagaacagctttgactccgacattgactttatcccgtatcgtggcgatttccctcgcggcattttcgctacccttgtggtaaagaccaaagtagccctcgaagaaatcgtccgtatgtacgaagaatattacgccaaagactcatttgtacatattgtagataagaatatagacctcaaacaggtagtcaacaccaacaaatgcctgatacatcttgagaaacatggcgacaagctattgattatctcctgtatcgacaacttgctgaaaggtgccagtggacaagcggttcataacatgaacctgatgtttaacctggaagaaaccgtaggactacgtttgaagccttcagctttttaaaaacaaaagaattatgaaattattcgacgtatacccattatacaacatcaacatagtcaaagggaaaggctgtaaagtctgggatgaaaacggaaccgaatacttagacctttacggaggtcatgccgtaatctctatcggacacgcacatcctcactatgtggagatgattagcaatcaggtagctaacctcggtttctattcgaactcagtaatcaacaaactccagcaacaggtggccgaacgactgggaaagatttccggttacgaggattacagcctgttcctgataaacagcggagccgaggcgaatgagaacgctctgaaactggcttctttccacaacggacgtaccaaagtggtatcttttagcaaagccttccacggacgtacttcactggcagtagaagcgaccaacaatccgtctatcattgcacctattaacaacaacggtcatgttgtttatcttcctctgaacgacgtcgaagccatgaagcaggaactgtctcggggagatatatgtgccgttatcattgaaggaatacaaggtgtaggagggatcaagataccgactaccgaatttatgcaggaactccgcaaagcttgcacagaaaccggcactatcctgattctggacgaaattcagagcggatacggacgtagcggtaaattcttcgcccaccagtatgctgatatcaagccggacatcatcaccgtagccaaaggaatcggtaacggcttcccaatggcaggcgtattgattagcccgatgtttaaaccggtatacggacaattaggaacgacttttggaggaaaccacctggcatgttcggcagcccttgccgttatggacgtgattgaacaggaaaatctggtagagaatgcagccaaggtaggtaactacttgctggaagaactgaagaaattcccgcaaattaaggaagtacgcggacgcggactcatgataggactcgaatttgaagaaccgatcaaagaattgcgcagccgcctcatctatgacgaacatgtgtttaccggagcaagcggtacgaatgtactccgcctgttaccccctctctgtctcagcatggaggaagccgacgaattccttgcccggttcaagaaagtactctaattgctcattctgattaataaacagccaacaataaaagcagcctttacaagaaaacgatttcttattcaggctgctttttgttttttcgtaattaaccgttacctttgcctgtgacaactcattaaaaacaagcgtatatgaaaatagccattatcggtgcaggaaatatgggcggttcaatcgcccgtggcctggcaaaaggaagtctgatagcagattcggacatcatcgtatccaatcccagtgccgggaaactagagagactgaaaaaggaatttccgagtatctctaccacaaacaataacgcagaagccgccacaggagcagacattgtcattctagccgtcaaaccgtggctgatgcaaccggtcatgcgcgagttgaaactaaaaagcaaacagatacttatctcggtagccgccggtatcagctttgaagaactggctcattacgtcatcgcaccggaaatggcaatgttccgtctgattccgaacacggccatcagcgaactggaaagcatgacactggtcgccgcacgtaatacgaatgacgaacaggaccaatttatcctccgcctattcagcgaaatgggaacagtcatgctgattcccgaagataaaataacagcagccaccgcattggcttcctgcggcattgcctacgtattgaaatatatccaggcagctatgcaagccggcatcgaaatgggactccgccccaaagacgccatgcaaatgatagcgcaatccctgaaaggagctgctgcattgattcaaaacaacgacacccaccccagcgtagaaatcgacaaagtgactacaccgggcggaatcacaatcaaagggatcaacgaactggaacacaacggctttacttccgccattatcaaagcgatgaaagcctccaaataacgccacaaaattattaatcataaaataccaaccacttgtatgaatgaccaaattaaacaaatagcagaacgcctccgcggactacgcgacgtactcgaactgacttctgaggatatcgcccgcgacagtgacatttctgctgaagagtaccgactcgcagaaactggagaatacgatatttctgtcagtatgttgcagaaaatagcccgtacctacaatgtcgccctcgatgccctgatgttcggcgaagaacccaaaatgagcagctactttgtaacccgcgccggcaaggggaccagcatcgaacgtacgaaagcctacaaataccagtctctggcagccggattcatgaaccgtaccgccgacccgttcatcgtcaccgttgaaccgaaaggagatgacgagtcgatccattacaacaagcataacggtcaggagttcaacctcgtactcgaaggacgtatgcttatcaacatcgaaggcaaggaaatcatcctcaaccaaggcgacagcatttattttaactccaaacttccacatggcatgaaagcgctcgacggcaaaacggtacgttttctggcagtaattatgtaataacatcatggtagaaagatttttatcacagacctcctttacctcacaagaggatttcatcaagaacctgaaaataaacgtcccggaaaacttcaacttcggttatgacgtagtagatgcctgggctgccgaacagcccgacaagaacgctttactgtggacaaatgacaaaggtgaaagccgtcagttctcatttgccgacatgaaacgttacacagacatgacggcttcctatttccaaagtctgggcatcggccgtggcgacatggttatgctgatcctgaaacgccgctacgagttctggtatagcacgatcgcccttcacaaactgggagcaaccgtcattccggccactcatctgctgactaaaaaagatatcatctaccgttgcaacgctgctgacatcaagatgatcgtagctgccggcgaaggaatcatcctgcaacatatcaaggacgccctgcccgagtgccctaccgtagaaaagctggtcagcgtcggtcccgagattccggaaggattcgaagacttccacgcagggattgagagtgccgccccgtttgtacgaccccgccatgcaaacaccaacgatgatatctcattaatgtatttcacttccggcaccaccggcgaacctaaaatggtggcacatgactttacctatccactgggccatatcgttaccggcagcttctggcataatctggacgaaaacagccttcaccttactatcgccgatacaggctggggcaaggccgtgtggggaaagctctacggacaatggattgccggagcaaacatctttgtctatgaccacgagaagttcactccgggagacattctggaaaagatacagaattatcatgtaacttccctctgtgcacctcccactatcttccgcttcctaattcacgaagacctgacgaagttcgatctgtcttcactcaaatactgcaccattgccggagaagcattgaatcccgctgtattcgatacattcaagaagttgacaggcatcaaactcatggaaggtttcggtcagaccgaaactactcttaccattgccactatgccttggatgcaaccgaaaccgggtagcatgggattgcccaatccccaatatgatgtggacttgattgaccatgaaggccgttccgtagaagccggagagcagggacaaatcgtaatccgtaccagcaaaggtaagccgctcggtcttttcaaagagtattaccgggatgcggaacgtacccatgaagcttggcacgatggtatttactataccggagacgttgcctggaaagatgaagacggttatctctggtttgtaggtcgtgccgacgacgttatcaagagttccggctaccgcatcggcccgttcgaggtggaaagtgccttgatgacacatcccgcagttgtagaatgtgccattaccggagtgcccgacgagattcgcggacaagtggtgaaagcaacgattgtattgtctaaagaatataagaaccgcgcgggagaagaattaatcaaagaattgcagaatcacgtaaagaaagtgactgcgccctataaatatccgcgtgtaatcgaattcgtagaagaacttccgaaaacaatcagcggtaagattcgtcgtgtagaaatccgcgagaacgatcagaagtaa

SEQ ID NO: 792 - DNA, 17602 bp, unidentified
  source 1..17602: mol_type = unassigned DNA
  misc_difference 15386: note = a, c, g, or t
  misc_difference 15387: note = a, c, g, or t
  misc_difference 15388: note = a, c, g, or t
  misc_difference 15389: note = a, c, g, or t
  misc_difference 15390: note = a, c, g, or t
  misc_difference 15391: note = a, c, g, or t
  misc_difference 15392: note = a, c, g, or t
  misc_difference 15393: note = a, c, g, or t
  misc_difference 15394: note = a, c, g, or t
  misc_difference 15395: note = a, c, g, or t
tcaaccatagatttctttcatcattttgcgcagcaccggcagggaacgctccaccttctctgtatcgatgcaatatgccatgcggaaatatccgggacagccgaacgaatccgccggaacgagcaccagatcgtactgcagcgctttctgacaaaatgccgccgcgtctgcttccggtgctttcgggaagatgtaaaaggttccttccggcttcacaacctcgaagccacagtccgtcaggcattcgtagagcaggttgcggttcttttcatagacggagaaatcggaggtcaggtcgagcaccttcgataccgccagctgcatcagggacgtcgggcagttatggccgattcccctcgaaatctgtccgcacatatttacgatctccgccgcatacggacacgccggattgaccgccagatagccgattctctcgcccggcagcgacagcgccttggaaaaagagtagcagctgatcgtattggcataaaatttcgatacatacggctgctgtttgccgtcaaatacgatttcccgatacggttcatccgaaatcaggaaaatatcatgcccgtattgttctgcttttctcgtcagaacctgcgccagcttcgtcaacgtctccgccgaataaactgcgccggacggattgttcggtgtattcaccaacactgccgcaaccctcggtcccaacatttcttcaaacgcttcgaaattgatctggaagctcttcgtgtccgccggaacaacctttaaaacggctccggtcagatctacatatggatgatattccggaaaaaacggagcaaaggtcagcacttcatcccccggcacagtcactgcacgcagcgcatgcgcgattgccgccgctgctgcggaaaccgggaaaatatgctccggtccgtagttcatgtcaaatctgcagtttaaggactccgcaatcgccgtctttacagacgggataccgagcgtcgggctgtagccgtgcagggtcatcggatcttccttctcaatcaggtccagcagtgcctgcttaaactctgccggtgccggtacggacggatttcccaggctgtaatcgaatacattctctgcaccaattatctgcgcccgcttcgtcgccttctcggacaactgccggatcactgactttgcatccagcatttttcgatattgttctgcaatcatagtattatccttcttttctgcatctttgtgagtttgaaatctgtccatattctatcacactatttttgacagttccactttttcttccacagggcatatgttatactgaaaaaagaatggatataaacgtttttcagctgtcaaaaccacggtgcagttcctgctttccggcaaacgcacctgtaaataggaggattttatggcaacctatatcgggcttgatctcggtggaaccaatatcaaaatttctgttttcgatgatttttttcataagctcggggaaaaacgcacccccaccgaggttcgtttcggctcggagcacgtcctcaatcgcatttatgatgctgttctggcacttctcgatgagctgcacctgacctgtcaggatatcacctgcatgggcatcggcgtccccggcatcctcgatatcaaaaacggtatttcccgtttttccccgaattttccgaaatgggaggaggttccaatcgtcgcctggatggagagccatcttcatatcccgacctatatcgataatgatgcgcgtgtcaatctctatggggaatggaaattcggcgccggcaaaaaccgcaataacgtcctgatgatcaccctcggaaccgggcttggcggcgctgcggtcatcgacggacgcgtgatctacggcgctacaggttccgcaggcgaaatcgggcatatcaatatgttccgtgaaggacgggaatgccgctgcggaagctccggctgccttgggcgctatgtttctgccctcggtattttgcgcaccttccgggagaaagtccaactgggacagcacagcatcatctgtgactgggtaaataatgaccttgataaggccactgcagacatgctttcccgtgcctacgatgacggggatgctgttgctattgagaccatgagagaaaccggagagctgctcggctacggtctgtgcgccgttttcagcctgtacaatccggaaatcatcatcgtcggcggcggcatgtcccgtatgggcgatcgcctgcttcagtacacccgtgaaattctggatacccatgcattgcggattccctatggctgctgtacgatcgtcactgcagttctcggagacgctgccggaatgctgggcgcagcggtctatgcgaaggagcagtttaggctgagcgcggcgaacaacggacaaaactaaaaaaatgaaaggcaggtgcgatacactgcggcaatctgcggtgcaggcacgctctacaacataaacgagccggtacagattaaaacatctgcaccggctcgtaacggtttttaattcatgacaatagaatgctcgcagagcgtgcattctattgtttacagttcccctgcaatatccagtctcgtcgcaatgctggtcagcagtacaacgagcggcatcataatttcacacacctgaacaaagaagcatgcgatatcctctgtaattcctccgaaatgatggaacgccacatagcaatagtacaaaaatgcgagcagtgcaccgaccagacacggaatcgctacctgaatgtcgcacatcagcatgcccactacagagatcacgatataagcgatcataaatgcgatcacaattcctctgcttttgccttttccgacatacagggagcatttgctttcctgcgaatgcgggaagcattcgatcgaaagaccatagagcgctctggaaagtatgaagccatatgcaagaaccggccagctgtccagcggcatttcgctccaaagaccgacgatcaggaagaaatagcagacacagataataattgcgaagtatccgctgtgggaatcccgcagaatttccagcttgacttccctcggctgatgggaactgagcgcatctactgtccggaagaaaccatccagaaacgcgccgcccgataaaaagatcggaagcatcgcacagataaccgcgcccagcagatctttatcgatcagatacgggctgatcacctgccactgttttagaatgaacccgataatcgcgccgactagcggtacgaaaatcaaaatatacttcatatttctacgggtttttttgatctgcctggcaggaaaaatcgaatacatcgaaaaagccagacgaaaacttgcccaaacttctttcatactatcgtgtacctctcagattttcggattacttcagtacaacgtcatccgcatgttcgttccagatcaggcaaacccatgtttttccgcgatttagccggatcgggttaccgtctgcatccacatacagcgccggatcggtatccgaatatcttgaccaggttccttctaccatcttacctccggtaaatacctgaaccttgtaattgttcagatctgcaccaggctcccagccgccgtgcacatcaaatgccatatagcctttggaatcccggaactcgccgtgacaatactggaaaataacgttatcgactgtcagctgttcgccggttgtctcgtcaatatgcttgtcaccgtactgataacggtaatattttccgtcttcatcgttatattcaaaataagcctgcacattggaatagccgtttccaacaccggtcttttcaccgccgggatacatcaggacaacggtatcgttatccggatagtctgccttttcgcccagaggtgcaaaggcaaatttctgcttatgcgtatcgtgataagtcaggctgtattcaaatttctctgccgcttctgccagcgcttcaccggttgtatacacattgtggggtgctttccgcttatccgtccgcatgaacgctttggaagccggacggtcaattcctgcaaccgcgccgctgatgttgtccaccagatcgctgtttaacagatcgccgacataaggggtagcctgtccgaaatgcgcataaatcgcatcgaattccagtgcgctgtatacaaaataatcgcggctgcttctgatatagccgatcgtatccagattctgccagttttcaaacaacggcatcagacgggtcacatccgcgccttccatcggcgcttcataaatcacggatgcctgtccgattcctgcctgcggggttcctgccttaatattgttcagcataactgccatcgggcgctgttcgcgttcctcttcggtgcattccagaccggtcaggtagctggtcggaactgcgtcttctgtaacaacgctttccgtctccgctgctgcattttctgttccggttgtatcgttgctttccgttgctgcaacagctgaatccgtttcaggtacaggggttgtttctgtcgctgcagagccacatgcacataatgctgcagataatcccagcgccagacagaacaaactggtttttttcatatatcattctcctgaatatttttcttttttgaaaaggttaaaccaacctagtttaaatattgtactcccgcaggcggtaaaaatccagcctttttctgcatttattacaattctattacaaatttacggcctaattcttcagcaaatgcaattttaccgcaaatttcacaatcatactgcctccgggaattccgagcagttcttttttcgacatgacgccaagttttaacgccgccgcaaaatacgtcagtccgccgattgccaccgaaagcagcagtgcaaccgcattgccgagatatcctttcagcactgtcagcgtcagcccataataaatacctgcaaccacaagccccatgatcgcagaggataccagcggcaggacaaacgtcttctcgatttcctgatgatagccggtcgcttttttcaccgcgatgccatttaacaggcacatcataaaagaatataccgtaacggcgatcggcaaactgtaaataccaatatctgtaaagatcaggagggctgccgccaccacagtctgcaccgccagcgcaatcaccgcgtttgtaaccggcttcgacgccttgccgactgcctgcagaatcgaattgctcagtgtggaaagggaatagaacacgatgctcgcaccaagcgccgccagaaggcatccgcccagacggatgctgtccgtattcgtattatacaacagccatacgatcggtctggataataccgtcatgccgactgcagacggaatcgcgataaacatgatcgtcttgattgccacgctgattttgtgccggacgtcttttttcttctttgtctcaaagcttcctgcaatgctcggcaggatcgcggaagccatcgcagacgcgattgcaatcggaatattggaaagtccgaccgcttccgtatcgtaaataccgttaataatcgtaatatcatcataagaagcgttgtgtaccgattgcatcagattcagatacagggtctggttgatcagtgcgctcgcattatatgcaaacgtactcagcagaaccggcgttaccataaacagaatgatcttgaaaatctcgccggtttccagcaaatctctggaacgatcccgctctatcctgcggcggattattttccggttcatatggtaaatcatcagcataaacgccaatgctatcagcacgccgacaccggttccgactgcacttccgactgccccccacgcagcacgggtcagctcgtcttccccagcaaatatctgcatcagcccccatgccgccagcatgctgaccgccgcatttaaaatctgctccagaatctgtgaaacggacgtctgcaccatgcttcggtttgcctgaaaatatcctctcaaaacgccgagaagaccggaaaagaaaattgtcggtgcaagcgtccgaagcaccatcgccgcccgtcccggaatcagaaaatctgctccaaaaaacgcaaacagactggcgattccgcccacgacaacaacataaataatcgagcagtgaaaaatccgctgcgcatttttgtactggtgggttgccagtctctgtgaaattactttggataccgccgacggaatgctataggaagagatcagcaaaatcatctgataatagcgatacgccggcgcataatagccgtttcctgtctctccgataattcccgtcagggggcttctgtacaataggccgataattcgacagataatgccggcagcagccaaaatgccggcctgttttacaaaggaactgccttctcccttattttttgttcccatccgttacctttctgctcagtctgtcaggcagaaagaaagcagataatccagccgtctctctaccagctccagaacaaaaacatccggcttttgttcttctaccatagattgcgtaaaaaatccgttccaatgagccatatagcagtctgaaaggctgctcgccaccggtcccgccattcctccggcgaaggaatccctcaccatgaacagctttctcgtatccggcgcatctgaatgatacaccagagccgtcgcatcgtcaatagagactgcctgcaaattgttgccgttgtaaccggtcacgatataattttcttccgcaggcatatttttttcgtagtagctctgcagattcatcattcttgcaagatcatatccggaaaaggtatccggagtaaaggtaatgtcctccacctctggaagctcgtctcccaactcctttaacagcgcttttgccccaatatagccgccagcagcgttccaatgcgtgtcatagtgccagtacagggaatattccttcttatatttcagcatttcctctttcggatatacaatacggatatctgtattcttcttcagataagcgatcagctgatctgtccgcgtttcttccgcctttttataataggaaggaagatgctcttctccgtaaatcgtctccttattcggtgcaatcatcaggacaaattcactgccccggttggaaagccactgctccgatgtcgtaagctgcgatgcgatctgtgcaagctgtccttctgtaaacaggttcgttcccttataatcatcaatgtccgattccatgctgtaaaacagccagttgtccgaaccgatcacaaccttgtcgttgatggatttttcacaaaacagctttaaatttgtcaggctggaaaaggaaatcagctgactccgaaacggaaccgccgcgttaaacgcgctctccaccaatcccggataatctctgtaattgtccttcgtcagcttcggaatctctgttgaaaccgtattttccgtcgcatccgtctggaaacgatcctttgttaccgcccacacagctcccggcatcaaaagcaaaagcgcaaagcaaatcagccatgccgccgccatttttttattcatatgcattctccactcagaaattcagataaattgcagggctgtaggttccgttgaccaaaagcagcatcgacgctgcgatcaggaacatgcagtaaaccagttccaatacgccgccctttaatttctccgctgccgggcagaactttttgatgcctgcctgtatcagccccatgccaaggatgccgatgaccgtcatcacaatgcagcggtttccgaccagctcccgcagcgcataggtgctctgcgtatactgccacggcgtcaacatcctgcggatgtactgcagcgccggctgcagatttgccacccggaaaatcacccagccgaacaacaccacaagccccgtgtatacataacgcaaaaagccgattttgtccagaattttcttaaagccgatccgctccacaatgatgaaaaatccgtgcagcgcgccccatgcgataaacgctgtcgtcgcgccatgccataacccggtcgcaaaaaagacgatcgccagattcaaatatgtccgagcctttcctttccggtttccgccaagcggtatgtagaggtaatccctaaaccagctgctcagggaaatatgccatctgcgccagaactcctgaatcgaaccggacaggtatggataattaaagttttcacaaatatcgaatccgaacattttgcccagaccgatggccatatccgtgaaaccggaaaaatcatagtaaatctgaatcgcatacagaatcgccgcgcaccacaccataacgcccgtaacatttgtaatgtcctgcgcatagatcttatctacacttgcgccgacaatgtttgcgaccagcacctttttaccaagtccataggcaaagcgccggattccctccgctgtcttttccacggtttcctgtctgtttgtcagctgcggggcaaaatcgcgataccgcgcaatcggtccgactgaaatttttggaaaaaaggacagatacagtgccatattgagcggatttttctccgcctcataatgaccgcggtataaatccatcagatacgaaatcgctccgaacgtaaaaaacgaaataccaatcggaagcgggatattgcgcatctcatgctcgcttcccgtcagccggttcacaatccgcaaaaagaagtcaaaatatttataatacccaagaatccccaggtttaccaaaatgcccgccgccagaacggctttcgccgccacgctttcatcccgctgacatccaagcagcagtccgataccgtaatttgccgcaatcgaaacaagtaaaaggacaatataaaccggatcgccccacgcataaaacacaagacttgccaaaagcagcaggatatttttcagcgctgttttgcgcacgcacagcctgtccaacacaaatacaaccggcaaaaaagccgtcagaaaaatcatggaattgatactcattcaaaaactccgatcttattcgctgcccgcagcacccttggaacagcaatctgataatcagtcatcccgcgacggatactgttgtcctgatatcagaggcaaaagagtttttgatcctgatatcttttttattgtagcatacatttccttaaataggtaggggaatctgaggttctctttcctgaagcatctgcaaagttacagttcacacacgccattcgcagaaacgaatctgcgatactttccgctgcttcgcagtcatttttgttcatttgaaactctccaggaatgcttcgcagccctccacgatgtcccggtacgcggtttcgaaatccccggagtaccacggatcgtcaatatcgcgcggatgctttgagtaatccagcagccgatggattttatgctccgggtctccgccaacgattcgaagcatattttgaatattatactgctccgctgccagcagataatcataatattcgtaatcctgcttcgtcatctggcgtgcccgcttcccggacgggtcaatgccatgctcccgcagcttccgcaccgccggcggatagaccggattgccgatttcctcccgacttgtcgcagccgatgcgatttcaaactgatccgctatgccgcgttttgcaaccatgtcccggaggatgaactcggacataggggaacggcagatattgccgtggcaaataaaaagtatttttatcattattttatttctccttgttttgccccggaatgccctgttttgcaagggtttccgggattattgtgatatgctctgaaattacagattgtggcaaaccagagcagaattagacatgttgttactacctgttagtagtaaaattagtagtaacaggtaaattcttactactaaggattatttttcaaaaacaatttgttcatatttgcttgcaagaatattttctattgcatcaacttccatattaggataatcctctaatgcctttattaaatcactatcttccaacggaattacaagacctcgttcatccgcaaaagtatcagcacatcttttaatgaaattttcttctaaaagtttttcttttttctactaacccattttcgaacactattctaccgcacccagatagttgctgcgctattgtcatgatttatctaacgccctcccgatcaccttgggactttccgctataaaaattcctttctccgggtgatttttattcaaaagctgtcttctgtgagccttgcgaaaacctctaactccgatgcctggaaatcttttatttctattatatttaacattctaccgctaccttgatcacgccgttcctcttattttcaaaaagttcataggcttcttcgattctgctaagtgggtaggtgtgtgtgatcagtggttccgtgttgatcttaccttccgcgatcagtctcagcgtttcttcacaatcacaaccgtctactcctcctgttttaaaagtcagattctttccatacatatccggcagaggtaacgtctgggctttatcgtaaagtgccaccaccgtcacgattgcatttggccttgcgcattcccatgcaagacggaaagtagattctgctcctgcaacttcaagaacaacatccgctccaccatgctcagtgtttgcctgaacaaaatcaaaacattcttccggcgaaactgtaagaacttccggataatgttccctgataaagtgcatacgcttttcgtctttttcacacatgatgattcgcttcggatttttcagcataacagacagtaaggtacagatacctgtaggaccggctccaatgatcagcaccgtgtcatcctcagtgatctcggaaatacgtgctgcccagtaaccggtggcaagtacatctcctacaaataacgcctgtctgtccgtaactttatccggaatcttattcagcccctgatctgcaaatggtacacggacatattctgcctgaccgccatcgatacggcatccaagagcccagccgccattttcatcggtacagttattcacataacctttcttgcagaaaaaacattctccacaaaaagtttctacatttaccgtcacccgatctcctggtttcacattcttcacagcagttccgacttcttccacaattccaaccatctcatgaccgactgtaatccccgtcactgcccttggaacgcttccatgcttaatgtgcaggtcactggaacaaatgctggcaagtgtcacctttacaatggcatctctttcatgcatcagcacaggctttggcttttccattaattcaaattttccttttgaaacataagtataagtctgcattctttcccccatcactttctataataatttatccagaatttccgctgctgatctattaccaaatacgccattgccaaataacaaacaagataagaaggtgcaccggataaaacgcataacagaaatacttgaaccacttgttatggtacccctgctctccatgatataaccagattggaatcagtgccagcagtgcaaagctctgctgtgcaatctcaaaatgatgtcccagaatcgttaccggataatacagattccccagcataactacattcaaataatacagtccgacaagctgtgccgcaaaagaaatccaggttttcttgcgaaaaaaataaaaaagtaataccgtcagtattcctgcagcattgtaatctaccatggttatggttccaagcagaaaatccatcaaaagcacgaggcaaaccacaaaaaacgatatccatttcttttgtttcttctttgccttttcaatgatctgtatcgataacacccctaataaaaaggtccatagtacattttgatgaaacgggtaaaatacagaacttcccataatcaggttaaatggtatttctgaaattatggcaaatagaaaaagacgcagcatgtattttttcacattcgaagtataatagcatccttctgcgatcataaatgcgaaaatcggaaaagcaagtcttcctacgcatgtcatccattcctgtgctggaaatagtgtcgcccacaaatgatcacataacataaacagcattgccagaatatgtagtgtaaacgaatcaattcctctttttttctccataggttcttctccatctatccaggcatagatatctgccttttattcttttcattatattatggagcattatccaacgtcaatcaactcttgcgtcctaatctatcactaattcaaatactcaacgcattctactcataaggggtgttcatttcttataatttatattatgcttagattaaacagaaggaagtgaattatatggatttaatcaaaatcggaaaatatattgcagaaaaaagaaaagctcttggactgacgcagaagcaattggcagaaaaactgaatatgagtgacaaatcggtttctaaatgggaacgtggagtttcccatagttaaagataccacaccaaatataacgaatccacgcttatatgatactgcatgaaaaaaggtacttgataaaagcaatgaagcgcaatatcaagtacctttttgatttgttttttacatggttattaagagaattactcttattccgaagtcctcaatcgttccaccacagttcctttgttaaagaagtggagaacgatcagcggaatgaccgcagccagcaacagataaagcacgccgatgaccaaagctggaaccaatgtaatgtgcagagtaaagaaccacatagatggcgagttcaagacatttttcagcaccgtcacagcaagcagcagcgcaaccactccaccaatgatgtctgcaccagcggcatagtaaacgccttcataaaccatcagcctttgaagctggcgatttgtcataccgatactctgcatagtcgcaaactcatggcgacgggtaataatattggtgatgatcatatttgtaaagttaatcaatcctgccaatgccatgatacagccaatcagactacctacaacccaaaccatacttgcaacagaatttaattgttctttcagtaattttgttgaggtataggtaactgaggggttcttttcaacataactgctcagaaagtcctccatttgcggatgcagagaagcatccatattaaatccatagttcaacagggtcggggtcgtgtaaatctgtttgaatacggtgtctggtaaatacacaaaaggcgcatcgccgccaatatgcatcgtagccgtagttgttgtcggcgtttcgtcctcagtcccaacggtgcaggcttttgccagaattgtgcaggttttgactaactcaccatccctgtaaaaagaaatgctatcaccgatctgcaactgctctgacagggatgttgttttcgggccaccactcagtcggtctaatcggtttccgataatgacatattctccggttagcattttctgtttcagtacattaggatctgtttcaccatcataaatcatcatgtcagaccaaaaatgttcggaagcgccatagacatttccaaagaaaagattttctgcatccggggcagtattcagcgcataattcccgaaagacttgctaatcccattttcatattcaaaagtatttgtgcaagtaagtccctcaaagccgtaatccacaagcacgttaccgtcatctacggtgttacgataaagataccgttcttcttccagaccgttctgctcacggatcatatctactacttgctgtggaagtgcatcttcgtgatgtctaaagccctcctgaacattgactgcaatcgaattgtagacggtaaaatctgtttttgttgtgcgggtaatccacttttcttcatccatactctgtgtcacgatgataatagagttgaacagaacgatacacaaaagcatagaaacaacaatgaatacacaacggcgtctgttacgtcctaagttagaaaatgccatgtgagagagctttgctccactgattcgtgtaaccgttttctttttataatcatcctgctccgtataacgaattgcctccatgggagatacttttgatgcctttttggccggtttgcgggtactgataaacactgtcaaaatcgtaaacaatgcggctataacaaatagcataggagatgccgatgcctgcaaacttgccgtagaatactcataactgaaaattcgcattactaccggaagcaacgccctgcctgcaaagaacccggcaattaaaccgatcggcagaccgattagggtcagccataccgcctgccgattgacgatgcttttaatttgccgtgtagaagtaccaatcatcctcaataagccatattgccgaacatcctgcataacggaaatatcaaaaatattataaatcagcagatagccacacaatacaaacatcaaaacaaatactacggcaaataagatggactccgaagaaatcatggcttttcccatctggttttcaacagagaggataaagttatcggcagacatatcctctggattgccgccgatggagtagacaaagctatccatctgctcctgaatgttcgtcttgtctttcagcacaacttcagaaaaagtaacccctgagatttctccatccactgcgtgggtatttttcaccacatccggattatcttttacaaactgctctgagagaatcgccacgctgaccgtatcgttgcttgcttcccaccaaccggaaagcaccatatcataatgataggtttttccccgcagttcaaattccagaggaacttctgctccgatctccggttccacaccaagggccttcaaagccagttcggtagtagcaatttcattcgccttttccggcgctgaaccatgcgttggcacgcagaatgtaagttcctgctgtatgctgtcagcatagtttaattcaacagaatgacccacggcgttgcttgcatatccaatcgtccgccgatgacctgcctgctccacaaaatcactgtttttcagttgctcaaattgctcctctgtcatatagccgaaggttccatctcccttgctgcctttctgcatctgcatagagagctgcatggaggataccatgttaaatgccagtgaagtgatggatgtaaacaaaaatgctgtcagaacgatcgcaagaatcgccgccagattacgaaccttattcttcttgaaatattgtttagacagccgcttgatggtttttgtattattattgccaaatagaatgtcattcatagtcccgccccctttactgcacgatcttgccatcctcaatccgaatgatacggtcggcaagctgggcaatctcattattatgagtaatcatcacgagggtttggtggaatttctgacttgtggttttcaaaagccccagcacatcagcgctggtcttgctgtccaggttgccggtgggttcatcagccaaaacaatagcgggttttgacaccaaggcgcgggcaatggctacgcgctgctgctgaccgccggagaggttattgggcatattgttcagcttatcctccagccccagcatcnnnnnnnnnnttctttcataaacttcttgtctaccttgtttccgtccagctccacaggcagcacgatgttttcatagacatttagcaccggaaccagattgtagttctggaagatgaagccgatctttctcctacggaagatagtaagctgctcatcttttaatgtggagagttcacgcccatccacaataaccttgccggaggtaggcacatccagcccgccaatcatattcagtagtgtagatttaccgctgccggaggttcctacgatagcaacaaattcgcccttttcaatggagagggtcacaccatccaaggctctggtaatgttcggctttgcaccataatattttttcagttcagtcgtttgcaaaatgctcataaagaacaccatcctttctttttgataaatccattataacgaccaaacctcacagaaatgtcacagccagcataataaattgccctgaaatgtcacaatcctgtgacatttcaaaaaaacaggttattcatggggaagaaaaacggagaatgttgaacctgttcctacttgagaagttacttgtatataaccgttctgtaagctaataatttcccttgcaagatacaacccaatgccgattccctctatatcgtggacatcttcttcccgataaaagcgcctaaaaattgctccttgctggttttcgggaatacctttgccggtatcggtaatgctgactttcaggtgcatttcccagctttcaacgcaaacacgaatagaaccgtactccggcgtgtacttaactgcattatccaatatgttaaataaggcttctgctgtccatttgcggtcatgggaaacaaccaatgtttccgggcagtttacttcaacttgtatgtgctttctttcagcgttcagaaaaataccgcccagcgccatagcaagagtatcatagataggctgctgtttcttttcaagtgagataacgccagtttcaagtcgggaagtttttatcatagcctgcattaagaaatccagtttatcaagctgtgtgccactggcaagtagaaattcccgctgtttatccggtggcacttcttgttctaataaggtggcatttatcatttttaagtttgctatcggtgtctttacctgatgagaaatatcggaaattaactcctgtaagtcagctcgttcactggcaacgctgtttttgctttcctgcataacctcataaagacgcaccagccgatgattgattttataaaataggttttcttcttcggcaacctgtgatacatctatttttccattcatcatttcgtctaaggtgcagcaaagcatttcagaaaacaaagtcagctttcgccgtatcagtatcacaaaagcagtaacacaaagtagaaaaagcagaccaaaagccatgctacaaaataccacagacatttctttggtcaggatatatagaaccgaaaacatgaccactgataaaagtaaaatggtagttgccagtattatgcagactttatttaaggagagtttttttgaaatcatttttgcgctcctccaatccacatatagcccataccgtaaacggttttgatgtaggaatgctggttcgtttcaattttactgcggatgcggctgatcgttgtggttagtgcgtgttcatccacataattttcatctacatcccacagcttttcaagcaatacctgacgtgtcaggacagtttgagaatttcttgtcagcacttttaataaacgatattccaacgatgtaagggtaatcggctgtcctgcgagacaggctgataattcggaaaaattgatatacaaattcccgtcatcgtagaaatcgccgccggattgtgctgaaatgcggttcagtaaagcagatactttcttttggaacacgctgataggaaagggctttgttacataatcatctgcgcccaattcaaatcctttcagcatatcgctttccatatcatttgcggttagaaaaatcacggcggtatcaggacggcgttcttttacctcatggcatatatcaaacccgttcccatctggcagattgacatccaaaacgattaaatcataatcctgtttttcaagaaatcttatggcaacagcctttgacatagccccatccacggaatatccgacagccgacagattatagcttaatgtcttattcaaaagctggtcatcttcaacaaccagtattcgcat

SEQ ID NO: 793 - DNA, 17861 bp, unidentified
  source 1..17861: mol_type = unassigned DNA
atgaaagtagtaatcctggctggcggccttggcacgcgcatcagcgaagaaagcatctataaacccaagccgatgatcgagatcggcaacatgcccattctgtggcatatcatgaaggaatattcctactacggtttccacgactttgtcatctgcgcgggctacaagcagcacatgatcaaggagtggttcgcggattacttcctgcataccagcgatattacgtttgatttcacccgcggccagaacgagatgatcgtccacaaccaccacaccgagccgtggaaggtcactgttgtggacaccggcctcaacacgatgaccggcgggcgcatcaaacgcatccgtccctatatcggcaatgagaccttcatgatgacctacggcgacggcgtctgtgatgtggacattgccaagctggtggcgttccaccgtgaaaacggcaaggtcgccacgctgaccgccgtccagcaggagcagcagaagggcgttctggatattgccgaggataattccgtctgttctttccgtgaaaagaaggccagcgacggcgcgctcatcaacgcgggctatatggtgctggagccgcagatcttcgactatctggacggcgacgcctgcgtctttgagcagaagccgctgcagaagctggctgaggagggtcagctgatgagctatatccacaagggcttctggcagtgcatggacaccgcccgcgagaagcaggtcctggagaaaatgcttgccaccggcaacgcgccctggaagaagtgggaggattgatgatggtacattacgatcctgaattttaccgcggcaagcgggtgttcgtcaccggtcacaccggcttcaagggcagctggctctgcaagatgctgctgatggccggggccgaggtcacgggctacagcctgcagccgccgacgcagccgaaccttttctccatcgccggcgtcgaggacaagatgcacagcgtcatcggcgacatccgcgactttgacgcgctgaaggccgcttttgacgcggcgcagcccgacattgtgctgcacctggccgcgcagcccatcgtgcgcgacagctacaaggacccgcgctacacctatgagacgaacgttatgggtacggtcaacctgctggaatgtgtgcggctggcccagcagcagggcagagcgccccgctcggtgttgaacgtcaccaccgacaaggtctaccacaacaacgagtgggcctggggctaccgcgagaacgagccgctggacggtttcgacccctactccaacagcaagagctgctcggagttggcgacgcactcctacatcaacagcttttttgccgataagaccgtggctgtctcgacggcccgcgcgggcaatgtcattggcggcggcgactttgccaatgaccgcatcatccccgactgcgtccgcgccatggccgcgggccgtaagatcggcgtgcgcaacccctactcgacccgcccgtaccagcatgtgctggagccgctggcggcctacctgctgatcgcccagcgccagtacgaggacaaccgctttgcgggctactataatgtaggccccgacgactgcgactgcgtcaccaccggcacgctggtggatctgttctgccgggcctggggcggcgacgccgcctgggagaatcaggccgaggccaatgccccgcacgaggccaacttcctgaagctggactgcagcaagctgaaaacaaccttcggctggacgccgcgctggcacatggccgagtgcatggaaaagaccgtcgccttcagcaagatctggcttgccaacggcgacgtcccggcggagatggaaaaggaaatcaatatttttttggaggagcaataattatgtggaagaacgaggcagaagcccgcgagcagatcaaggcgatggtcgccgagtattatcacgacttcaaggagaaaaagaccccctatcaggaggggaatcgcatcacctacgcagcccgcgtctttgacgagaaggagatgtgcgctctgaccgatgccacactggacttctggctgacaacaggccgctttgcagaccggttcgagaaggagttcgctaagtggatcggcgttaagttcgcccatctggtcaacagcggttcctccgccaacctgatcgccttcatggcgctgaccgcccccgagctgggtgaccgccagatcaggaagggcgacgagatcatcaccgtggcctgcggcttccccaccaccgtgaccccggccatccagtacggcgcggtgcccgtgtttgtggatgtgaccgtgccccagtacaacatcgacgtcaccaagctcgaggccgccctctcccccaagacgaaggctgtcatgatcgcccatacactgggcaatccgtttgacttgtccgcagtcaaggcgttctgcgatgcacataatctgtggttggtcgaggacaactgcgacgcgctgggcacccagtacaccatcaacggcgagacccgctttaccggcacctggggcgacatcggcacgtccagcttctacccgccgcaccacatgacgatgggcgagggcggctgcgtttacaccaacaacccgctgctgaaccgcctgatcctctccttccgcgactggggccgcgactgcatctgcccctccggccaggataacttctgcggccaccgctttgacggtcagttcggcgagctgcccaagggttacgaccacaagtacgtctacagccactttggctataacctcaaggtcaccgacatgcaggccgccatcggctgcgagcagctgaagaagttccccaccttcatcgagcgccgccgccacaactgggaccgcctgcgcgccgcgctggagcccgccgccgacaagctgatcctgccggagccggctgccaacagccgcccgtcctggttcggcttcctgatctccgtcaagccggagagcggcctggaccgcaacgccgtgacccgctatgtggagagccacaacgtgcagacccgtctgctgttcagcggcaacctcatcaagcacccctgctttgaccagatccgcggcaccgatgcctaccgcgttgttggcgaattgaccaacaccgactttatcatgaacaacaccttctgggtcggcgtttaccccggcatgaccgatgagatgatcgactacatggccaagacgattatcgaggctgtgaatcagtaaaattttgacaacgaggtacggacccctatgatgcagcaaaaagtgaaaacgacccgcgcacccggactgcggttggacaaaaacaggcggctgacgcctatgcagatttactgctgggcgacggtggcctgtctggcggtgctgctgcttgccctgctggccagccgtggtgcgctgctgcatcaattcttcttttatgatgtcaccgataccggtatggactttttccatagtattgagtatatgcgtggacgtatgccctacggacagttcgatacgctgtacccgccgcttgcaaatctgtttttctatgtgttgtatttgcttgtgccaaagacacaatcagatacctggacggaatcgtttatctcgtctctcaacatgaagggaacagaacgggatttgcgtttacagcaagcgacgatgatgctgtttatcgtctttgttatcgtggtggtcttaggaattgtatcgatgacagaacgcctgacgcgcagctgcggggggcggaaaaagctgctggcattctgtgcagtgttcagctatggggtactgtacggcttggaacgtggcaatattctgctgctgtgctggccgttaatggcattttttatcctgtaccgcaattcagaaaaaccacttttgcgggagttggcctgtctggcactggcgattgccgccggtttcaagctgtacccggcgtttctgggcgtgctgctgctgcgcgataaaaactatctggccgcggtgcgcacggtgctgtacggtgttgtctgcctgtgcttcccgctgttcttcttcaatgaaggattgtttggcctcacactgtggttccgtgtactgtttgattttagcggcagcagaggtgaaccgtggatcggcaacggtttctccaacattttggcagaggctggacatgcggtggacaagctgctgggcacgcagctgggctatggcagctacgcactgctgggcattgtgctggctgcggtgctgctggtgtgcagcttttttatggataaggagtggaagcgcattacagcaatcattctggcgatgctgatgttccagtcccagtatgattatgtatggtgcctgtttttgattccgctgttcctgtttatggagcaggagcgtgagctgcgcagggacaacgtgctgccctatctggccttgatggtgccggtgctgccgctgccgctgtttcggcgggaccagatggagacgtcctttgtaccgcgcaacacgatttgtcatgtcatgctgctgctgctcattgtctggtgctttgtccaggcagtgcagggggtgcgtgtacgctgtgcggaaaaaccggtcaagccggcacacggacacccggcagccacggtgctgctggccgtttgtgtggcggtggccggtgtgggcggccagcagctgtggcagcgcacccacaactggggctttgactacagctacaacggccgactggatgccgaaggcatccagcagaaggacgtgttggacagcgacggcaacccggtagaggcaacatggagcggccgcggtgcgtatattatgatttacaaccacgcgccatttacgcaaaggatggtggtcacgttccagacaggctacggcatggatttgaagcgcgcctatacgatgacgtttgaagcaccgaatctggaagatgctgatggtacaaccggaaagcagaagcagacgaatattaagattgaccatgaggggcagaccgtgtgctacacggtagatgtggcccccggccagacccaaattgatgtgagctatgacggcccgatggcggtctatgatgcttcttcgcgcaaaaacggtaccttcacggtgacaaacctagtggtggccagtgagggcgctgtggaggaaaccgaataacggaaggaaacatatactatgcagaaattgctggccctgctgggcgcaaaaaataaagaggaatttgtggagctgttcaagcagttcgtcaagttcggcctggtgggcgtaagcaatacggctgtgtccatggcggtctactatatcttcctgtggatcagcccggacctgtatatggtcggcagcattctgggcacgattctgagcattgccaatgcatttttctggaatgataaatttgtctttaccggcaacgccaatgactggcgcagcaagctcaagcggctgggcaagacctatgtcagctacggcggcacgtcgattttgtccaacgtgctgctctggattgaggttgcattcttcagcgtcagcaagtccattgcgcccatcgtcaacctgctggtgacgattccgctgaactttgttatcaacaagctgtggacgtttagagatgagcaataatcaatgaatagaaaaataaagacatgggcgtatgcaattcttttgttaaatataattgttgcgggaatcggtattgcaaagcttttatttgatgtttttaccggcaacggaaatacacaagttggaaacaatcaatatggatgccgtttatccgttaggatggacgacaattgttgaaaacgttgcgttactcttgatggaagtatcgattgtttttgaggaattgttttttaggagtagagaaaacggatgaaaaataaagagcgaaatggtaatattgagctgctgcggtttgtgttctgcgtaatgatggttttataccacgcatggtatgtgcgcagaggatatattggcgttgagttcttttttatggtgacggggtatttcctcgctgaaaagatatgtaggctaaatgcaagggaagcgagccgcccatcggtagaaaatgccatgaaggaagcaacgcgagatgttacgaagcgttatcgctcaatatttccgtacttttttgtcgccaccattttgggatttatagtgcgtgcctatgcacagaaatgggacaatgcagcaatcctgttgggcgtgcagttgattccagcggatttcttatacttgcaaaaccttggattttcgacaacatctgccacgggggtattatggtatctttccgctatgacttttgcggtttggacgctatatccgttactgcgcagacattataacgtgattgtgcaagcagctccgatgggaagccttttgatactgggagtgattctgcaaaactgtgggtcgctggacgcgccatgcacatttctgtttggctgggtcaatacaggaatattacgagctttcgcgggcatcctaggggggtgacgataaataacattgcgtcaaaactgaggaaaatcaatgttggtgaaaaaacttccgcagcaatgacgatagtggagttggctggatatgtgtgggtactttaccacatttgggcgatgaatgaaacgcgtgttgcgttggacggcattgtagtcttagctcttggggtcgcgtttactattactgtaagcggaaaatcacttttttatgggaaatttaataatggttttgtgcgattcctggggaagacaacgatgcccatttttttaagtcacttctactgtgttcaatatttgccgaatatattggcaaggtatagtattgaagtgacagaattgcagcgcttagggatttcctttgctttctgtgcaatagcggcgggaatagtctattgtgtgggacaagttatagataggcaaatgaaaaaggttggtatcttttttgaacagcaagtgattaaaaagagcgaataagttgctgaaaaagtttaaaagataatgcttggtagggtagcatagcaatgttggcgtaagcaacacggctgtgtccatggcggtctactatatcttcctgtggatcagcccggacctgtatatggtcggcagcattctgggcacgattctgagcattgccaatgcatttttctggaatgataaatttgtctttaccggcaacgccaatgactggcgcagcaagctcaagcggctgggcaagacctatgtcagctacggcggcacgtcgattttgtccaacgtgctgctctggattgaggttgcattcttcagcgtcagcaagtccattgcgcccatcgtcaacctgctggtgacgattccgctgaactttgttatcaacaagctgtggacgtttagagatgagcaataatcaatgaatagaaaaataaagacatgggcgtatgcaattcttttgttaaatataattgttgcgggaatcggtattgcaaagcttttatttgatgtttttaccggcaacggaaatacacaagacggattgcttttccagaacctgcatctaacagcgtacagcacggattcattcatggacttctttaatagcattcagtatggaaggaagccctatacagcaggagtgatttatccgccactgataaatttgatttatgctatattcgggatggggattccggacagcgttaaagcacaggggacacttgcatacaggacatcgctacaaggaattgtggcattagtgctgttttatgtggtagctgtattgctatatatcgttgcgtggaaaggtgattctcgcttcaccaataaagaaaaaatctttttaataacagctacattttttacgctccccttcatttttgcggtagagcgaggaaatagcttactttggtgtgttccgcttacaatgttatttgtaaataactataataagaaagaaaaaagaaaacgtatactggcaatcgtagcgttagcacttgcagcctcaatgaaaatgtacccggcgttttttggaattttgcttgtgcgtgaaaagaaatggaaagaagcactaacggcagtggttgttggggcgattacaatgtttgcaccttttcttttaatggaaaagggaaatcgtagtccgctactatggcttagtaacattgcaaaaacaagcgaaatgtttcaaagcactggctatgggtataaagtaaacttgtctaacacaatagggtttattgagagtgaatttggcatacatattacgggaacaaattttttgataatagcggttttacttatcaacagccttttggtgctaatcaagaagaatatgcctcagtggaagtgcatagcgttgctggctcttatcacaatcttggtgcctggatttagctatacatacacaataatgtttatgctgattcccttcttttgctttttaggaagtgagcacgatcaaaaatgggactgttattatctgattctttttatgctgatgtttgtattgctaccgataaaaaatcagtttggcggtttggaagcaatcaatatggatgccgtttatccgttaggatggacgacaattgttgaaagcgttgcgttactcttgatggaagtatcgatagttatcgaagaattgcctttaaaaaacagggagaaataaagatgaaacagcgtttagcggattatgtggcggactttctggcggcgcgcggtgtgacggatgttttctccgtcgtgggcggcggcgctatgcacctgaacgatgcgctgggccataaccccaatctgcatgtgacctacaaccaccatgagcaggcctgcgccattgcggcggaagcctacgcccggctggaaaataagatcgcggcggtctgtgtgaccaccggccccggcggcaccaacgcgctgaccggcgtcgtgggcggctggctggactccatccccatgttcatcgtctccggccaggtgcgctatgacaccacggcccggtacgccttgcagtacaccggtacgccgctgcgcgccatgggcgaccaggagtacgacatcaccaagtccgtccagtacatgacgaagttcgccgccatgctggaggaccccaaggacattcgctacctgctggaaaaggcgtggcatctggctacaacgggccgccccggcccggtctggctggacatcccggtcaacttccagggcggctacatcgagactgacgagctgcgcagctacgaccccgccgaggatgacgcccagctgcccccgtcggtggacgacaccacgatccggacgattctggaaaaaatcaagaacgccaaacgacccgtgttccacgcgggctatggcatccgcctgtccggcgggtatgcggcgttccgctccgtggcggaaaagctcaacatccccatcgtcacctactggaacgccgtggacctcatcgaggatgacaatccgctgtactgcgggcgcgccgggaacatgggtgaccgcccgggcaactgggctatccaaaacgcagacttgattctggccgtaggcacgcgaatttctatccgccaggtcggctacaactggaagacctgggcccgcgcggcagaggttatcatggtggacattgaccaggccgagctgaaaaagccgaccttgcacgtcgaaatgccggtctgggccgacgcaaaggactttttgaccaagctggataaggtcgccgcggcccccgtgaacgcgggcggcgagtggctggccacctgccagcgctggaaacgtgactaccccgccgtgctgccccgccagtgggaggaaaacggcgagactgccaacgtctacgcctttgtgcgctatttaagcagtcgcctgccggagaacagcctgaccgcggtctccaacggtgcgtgctgtgtcgtcggtaaccaggcgtatgtcatccagaagggcagccggatggcaaacaacagcgccattgccagcatgggctacggtctgcccgcagccattggcacctgcatcggcggcggacgccgccagacgatctgcctcgagggcgacggctccatcatgatgaacctgcaggaactgcagaccatcctgacgaacaagctgccgatcaaaatcttcctcatcaacaacaacggttaccactctatccgcctgacgcagaacaaccttttcaaggagcactgcaaggtcggcatcggccccgagagcggcgacctgtccttcccggagtttgaaaagattgcaaaggcgtttggctacccctactacagcgcccacagcaacgccgagatgaagcaggccgtggacacggtgctggcactggacggcccggctttctgcgagattttcaccgacacgaaacaggtctgggagcccaagagcagcaccaagcgcctgcccgacggcacgctggtcagccccccgttggaggacctggcccccttcctgccgcgtgaggagctggaaaagcagatgttcatcccgctgatgccggaagtgtaagggagtgcgtgattcaaaaatggcaagcattcaaagacaaatccacaccgccatcatcaccggtcctacgggggcaatcgggatggcgctgtgtgcaaagctgctggcggagggtgtgacggtctacgcggtcacccacccgggcagtgcgcgggcggcgctgctgccgcaggacgcgcggctgcatgtggtgccctgcgatgcggcggagttggccgcgctgccggagctgatcccggaaaaagccgatgcgttcttccactttgcgtgggcgcacacgatcggcccgggccgcaacgacatgccggcgcagatcgagaacatccgctacaccattgcggcctgccgcgccgcggcgcagctgggctgccaggtctttatcggagccggcagccaggccgagtatggccgcgtggagggtgtgctgaccgcgcagaccccctgcttcccggagaacggctacggcatggccaagctgtgcgccggccagatgagccgcgtcgagtgccagacgctgggcatggcccacatctggacgcgcattttgagcgtctacggcccgcacgacggtccggccacgatgatcagcggcaccatccgtaagctgctgcacggcgagaagcccgctctgaccgcgggcatccagcagtgggactacctgtacgccgccgacgcggcagctgcgttctacgcgctggccgtcagcgggcaggacggcagggtctacccgctgggcagcggcacggcccgcccgctgaaggactacatcgaggcgctgcgcgacgccatcgacccggcgctgccgctgggcttgggggaggtcccctacggcccgctgcaggtcatgcacctgcaggcggacacgtcggccttacaggaggacaccggctggcggcccgcgaccccgtttgaagaaggaatccgcgaaaccattgagtgggtaaggaaagagacaaaatgagtgagaaaaagacgatttcggtaatgatcccctgctacaacgaggagcagaacgcccgccccatctatgaggctgtgcgcgatgagctggtcaagagctgcccgaactacgactatgagattttgttcatcgacaataagagcgaggacggaacccgtgccatcatccggcagatctgcgccgaggacaagcacgtcaaggccatcttcaacgtcaagaacttcggccagttcaacagcccgtactacggcatgatccacacctccggcgattgcacgatcacgatgtgcgccgacttccaggaccctgtggagatgatccccaggtttgtggccgagtgggaaaagggctacaaaatcgtcattggccgcaagacccagagcaaggaaaacccggtcatgtactggctgcgcggctgctactacaagctcatcaagaagatgagcagctgcgagcagatcgagcagttcactggctttggcctgtacgacaagagctttatccagacgctgcgcaacctgaaggatccgacacccttcatccgcggcattgtggccgagctgggccccgagcgcaaggaaatcgagtacacccagccccagcgccgcgcgggcaagacccacaacaactggtacagcctgtacgacgccgccatgctgagctttaccagctacaccaaggccggtatgcgcattgcaacgttcgcgggcttcctggtggcggggctgagctttctggtcggcctgttctatctgattgccaagctgctgttctggcagagcttccgcgccgggtacgcgccgacgatgatcgccatcttctttatgggcggtattcagctggcgttcctgggctttttgggtgagtacgtcatggctatgaacacccgcatcatgaaccgcccgctcgttgtggaggaagaacgcctcaactttgggccggacgaccagtgaccggcatgaagcaggagtttggttatttcctgaaaaacgcgaaattccgcgcggcgctggggctgaccctgctgctcagctacggctatgccatcgccacgacacgggtcagcattgactcgctggaaggggaccgctacatcggcacgggcggcgtcatgctgtccaccggccggttcggcatgaacctctgggccgcggtgctgggctacggcagggccgagccgagctatgcctttggcattgacctgctggcggcgctgctgctggcgctggcggcggtgagcttctgtgcgctgctgcgcaaggccgcgcaggatcgcatcagcatgttcggctatgggctgtttgcctgcctgtttgtctcctacccgctgatgaacgaaatttgggagtacagcggcgcgaatgtctgcgtctgcggcggctatttgctggacgccgctgcgctgaatctgctgtgggacgcgcgccagcccggcgtgccgtggcgcggcagggctctgcgcatgtgcgcggcggcgctctgcctgatggtggtctgttcgtcttatgagtcactggcggcggtgtttgtgctggctgtctttgcgcttttaacgctggagcagctactggccgccgagcgcccgcggcttgcggcagtcctgaccgagggactgtggtacgcggcggcgctggtcggcggtctctgcctgcgcgtgctggtgacgtcgggcatccatcttgtgctgccgcaggctgcggccaacggcgccaccgaaattttgtgggcgttctacccatttgtctatcttgcaaagctgcttgtcaagggcattctgattaactacgcactgcgcggctgtttctacctgcccattgctgaattggcggtggcggcgcttgtatttatcgtactggttatcgcgcttgctgtgcgcaaaaagcggcctttgctgctgctcaccggcgcggggacgctgttctcactggtgctgctgtcgtttgtgcaggggcggtactcgccctaccgcacctgtcaggtgtttgcgctgcttgtggcgctggcggggctggccgtgtatgagctgctgcgccgcgctgcggcccggcgggctgtgctgctgggcagcgtgcagctgctggcggtgctgctctgtctgcaccaggccatgtacctgaaccatctgctggccgtcgattaccagcgctccgagcaggaggccgccgtggtgcgcactctgggcaccgagcttgtgcgcgactacggcaccgataagcccgtggtgctggtgggccgttacacgctgggggagaatatcacccggtacacgacggctgacccgatgcagcacccgctgtaccgcttcttccgtgagcacacgagctgggagagcggcgacaccgtcaagtacgtcgagaccaactgcaactcggtgctgaactggtcggtcacggccttctccgaggtggacgacgtctacggccaggcagcggagcacctgttccgctactatggctttgctttggacatgacccacagcgctgccctgcatgagcaggcgcagacctacgccgacgcccaccacctgccgggatacccccgggcgggggcgattgtcgattgcggggactatgtgctggtaaatctgcaataagaataccgcggaaaagtttgcgcttctccgcggtttttactttctttctgtattttgccgatgttttcagccggtcacggtctcaaagggcttcgtcaggtgcccgttcctgtcggcctcgcaggtgcggcgggcctacttcaaatactccaccaaaaacgccactgtcgtctcccgcagcgctttgtccagcgcggcggcggtggcggtgtcctcggatagatagttgtggttcccctcggcaaacggctccagcacgaccctgccgtcgggcaggctctcgacggcggctatcgtctcggcctgggtcgtgtcgctcaaaatgccctcatggccggtgtaggtcaaaagtgtcggcagggcgctctcccgcagggcggcgttcgggtcggaatcgcgcatctcggtgaacagcgttccgctgacatcgacgccccaggtgctgatgctgccgctcgcctcggcctcagcggccagcgcttccacggcggaaaagtcgtcgatgttcaaaaactccatgccgcgcaggcccgcgccgttggcggggctccacagcgccagcgccgtgatgccgcccctgcgctgcgggtagaggctggccagccgtccgcccatgctgtggcccaccagcgctgtgcggcctgtgccgtaggtctgctgcatgtaggtgatggcgctctcgacgtcgtcggtcatgttggacagcgtgtaggccgtgaacggctcggtgctgttgccgcagccgggaaaatccagccggtaaagccgtggcagagcacgacgagcggcagctcctccccgcgggccagcttgccgggcagctgtaccgtggcgtaaatgtccccgcgcgtaccgggtatggtgacgtcctgcgctttcggtgcgggcgtcagcagaaagagcgatgccgccacgcagagcgccagcgcggcaatgcagcctgcaagggtataaaaagcgcgtttatacgtttgtttgtgcatagaattacctccgtaatgcctctattaaagcctatgcggggcaaaaagtcaagacgcacagaatacacacaaaaaaacaggtgacaaacccggggcggatgtggtatactaaaaattacaaattggttaaaaagtcagacccggggcgcaggcgcagccttgccccggcttttgtcctgttttaccggaggtgcttgactacgaattctatagcgaaccgtatgccccgcctgctggctatgctgtttgtgctgctggggctgttctgcgcggcggcactgcctgcccatgcggaggactacgacacggtgatggaccgcctgtcccgcctgcaggcgctggcgcgggattactcggccagtcaggccgacacgcccgacccgatcgagctgacgctggcctacacccgcacgggggagtacaacaccacgatctggcagctgaccgccggtgtgcgcgacgccgggtttgagagctacgtcaacagcagtgaccccgatctggcgtcgctgcagaatatgaacaccgtcgtcctgcccaacggagagagcatcgactttgggcacctgctggcgtcgatgaaccttgtctacaacggcatacccatcacgggcagctggggcggcgactgtgaggagctggccaggcagtattacggccaggccggcgatgccgcgggctacgccgaggcgatgcgcgcttcctttaatatggacgatgacggcacgctgagccgcttcagcaacggggacctgcgggcggacctcgactccgtcgtcgtcggctccaaggtgacaaaggacaccgacctggccgaggcgctgcgcagctactacgcgaatctgaccgagtatgaccgcgtcaaggagttcatctcactgagcttcggcacggtggatacctcgagcacggcctttgcggacgccgtgtacagcgctctgctggaggattccggtatgcagctgctgttctacatgaacggtatgtggaccgtcaagggctggcagatcaaggacgactacgcccccgccgtgcgcggcgcaacagacctgtttgccgagtacctggccgacgcggtcaatcacgagaagatcaagagcgagacgaatgaccgtctggttgccatgggcgggcaggcactggccgacgcgctggaggcgttgggcgacaccgacgccgcccaggccgcactgaccgccgccgaggagatggccaataacgcccaatcgacggtttcctccggttcggatgtggtctccgccgcgcgggagaatttgcagacaaattttaacgtgaaggtcttccagctgattttgctgattgcggcagggctggcggcgttcatgctggtgttcagcatggtgatgtttgtggtgcaccgaaaagaaaattgagtttggactgcgtgccgctctcttgtgggaaagagagcggcacgcttttttggttgggcgcggggcaggcgggcaggccactttttctgttcacaccccgttcacattccgtatattcaccccgagttatccacggcgtataacggttatccaccgtggaaatgttgaaaactccgtggaaagcgtggaaaactctgccgcccggacccgttcaaaagcggaaaaccgggaaaatctacgtagaaaaaacgtttattttccacattttccacagcggcgctgttgaaaactgtggaaagccggggaaaacgcgaattgcgctttttgcaacacaaaatacacattttgtaaataagggcttgcactcaccgcgcgacagcgctataataaacctaaccatcacccgcactgctgtgcggcggtgcgcttgagtataaaagggagagtgtgaaattatgttggacattaaaatcaccaaaacgacccatccgaaggaaaagccgcaggacgagtcgaagctcggcttcggcaagcagttcagcgaccacatgttcctgatggactataccgcgggcgagggctggcatgacgcccgcatcgtcccctatggcccgtgggagatggacccggctaccaccgtgttccactacgcacaggaaatttttgagggcatgaaggcctaccgcaccgcagacggcaagatccagctgttccgccccgactgcaacgcgaaccgttttaacgattccgcggaccgtctcggcatgccccccatcccgccggaggacttcgtgcaggctgtcaaggcgctggtcgatgtggaccgcgactgggtgccccactccgacggtgcgtccctgtacatccgcccgttctgcatcgctaccgatgtgggcctgggcgttcatgccgccaagcattaccgctttgccatcatctgcgcgccctccggtgcctactacgccgagggcctcgaccccgtccgcatctatgttgaggatgagtacatccgcgccgccccgggcctgaccggctttacgaagtgcggcggcaactacgccgcgtccatcaaggccggcgagctggctgaggagcgcggcttctcccaggtgctgtggctggacggcgttgagaagaagtacgtcgaggaagtcggctccatgaacatcatgttcaagatcgacggcgagatctacacggccccctgcgtgggcaccgttctgcccggcgtcacccgccgctccatcatcgagctgctgaaggactggggctacaaggtgcatgaggagcgtgtcgccattgccgacatcatgaaggctgccgacgagggcaagctggaggaagtctttggcaccggcacggctgccgttgtctcccctgtcaaggagctggattgggagggcaaggttgcccacatcagcggcggccacattggcgagctgacccagaagctgtatgacacgctgaccggcatccagtggggcaagctgcccgacaccaagggatggatcgttcctgtggaataa

SEQ ID NO: 794 - DNA, 24170 bp, unidentified
  source 1..24170: mol_type = unassigned DNA
  misc_difference 19009: note = a, c, g, or t
  misc_difference 19010: note = a, c, g, or t
  misc_difference 19011: note = a, c, g, or t
  misc_difference 19012: note = a, c, g, or t
  misc_difference 19013: note = a, c, g, or t
  misc_difference 19014: note = a, c, g, or t
  misc_difference 19015: note = a, c, g, or t
  misc_difference 19016: note = a, c, g, or t
  misc_difference 19017: note = a, c, g, or t
  misc_difference 19018: note = a, c, g, or t
atgaaaacggtggtattgggcagcggcggctggggaacggcgctgtcgttggtgctgcaccggaacggacatccggtgaccctgtggtcccacgtgccggagaaggcggcgtatatggagcgggccagagagaacccccggctggagggagtccctctgccgccggagctgcgcctgacggcggatatgggctgcctgacggaagcggagctggtggtggtggcggtgccgtcctacgccgtgcgggagacggcccatgccgccgccccgctgctgcgccccgatacgctgctggtgacggcggccaagggcatcgagcgggatacccacctgcggatgagccagatattggagcaggagaccgggggagcctttcccatcgccgccctgtccggcccctcccacgccgaggaggtgggtcgtgggctccccaccggctgcgtggcggccagcgtgtctcaggcggctgccctcacggtgcaggacgcctttatgaacgaccgcttccgggtgtataccagccccgatatcgtgggagtggagctgtccggcgccctgaagaacgtggtggcgctggcctgcggcatctgcgacggtatggggtatcaggacaacaccaaagccctgctgatgacacgggccatggtggagctgtgccatctgggggagcggctggggggcgaccgccagaccttcggcggccttgcgggtatgggggatctgatcgtcacctgcacctccatgcactcccggaaccgccgggcgggcatcctgctgggacagggcaagtccgtggggcaggcgctggcggagaccggcggcgtggtggagggctactatgccgccgccagtatgcaccagctggcggaaaagaccggcgtggagatgcccatctgccggtgcgtctatgagatattgtaccggcagcggccggtgcaggaggtggcccgtgagctcatgggccgggccagaaagggcgagatcgaggacggctggcgctatcccgtgggataacgccggggaaggagggacgtatggagcggatcctgctggtggaggacgatgcacagatcacggcgtcactgtcggcatttttgcagagtgagggcttttccgtggagacggccaccggggagacccgggccaggcagctggtggagcagacggctccggggctgctgctggtggatgtgcagttggcggagggcagcggcttcggcgtgtgcgcctatgcccggagccggggtctgccggtgatcttcctcaccgcctccggcgacgagagcagcgtggtgctggggctggacatgggggccgacgactacatcgccaagccctttcggcccagagagctggtctcccgcatccgcagcgtgctgcggcggtacggcaaggagaagacgctggtgccgctgggcggtgtgatggtggatacggagaaggggcgggtcacacgggacggccgggatgtgtatctctcggcgctggaataccggctgctgctggtgtttctgagccaccggggaaaggtcctctcccggtcgcagctgctggaggagatctgggacgccgccggggatttcgtcaatgacaacaccctgacggtgtatatcaagcgcctgcggaagaagatcgagaccgaccccgcagacccacagatcatccggacggtgcgtggcatcggctacatggtggacgcatgagcatctggaagaacacggaggtgcggcggacggccctgtggctgctgctggccacggcggtgtgcgccgtggcggcggccctgctgtatcccatctgcggcctgctgacgctggggctgggggcggtctgcggggccatctggtacggctccacccggcggcgctaccgggaactggagcgcatgagccgggacattgaccgcattctccacgggcaggagcagcaggtgctgccccagcaggaggagggagaactggccatcctccgcagcgagatcgggaagatgacggtgcggctgcgggagaacgcccagcgacagcaggaggagcgtgtccgactggcggatgccatggcggatatctcccaccaactgcggacgcccctgacggccatgcgcctgaccctgtccctgctggagcaggaggagctgacgccccagcggcgtctggcactgatgcgggagctgaagaagctgacgggccgtatggagtggctggtggaggccctgctgaaaatggcccagctggacgccgggacggtggtgttccacccgcaggacaccacggcggcggagctggtgcgccgtgcggcggagccgctggaggtccccatggaggtgcggagcatccgcttcaccgctcaggcgggggaggagcggcttacctgcgacgtgccgtggagtacggaggcactgggaaatattctgaaaaactgcatggagcacgccgcctcatgggtgcaggtaacggcacgggagacagccattttcacagagatcacggtgcaggatgacgggccgggcttcgacccggaggagctgccccggctttttcagcggttttaccggggcaaaaacgccggggagaacaacttcggcatcggcctgagcctctcccgtcaggtgctggcccagcagaacggcacggtgcaggcggaaaatgtcctcaccggcggcgcacggtttatcctgcggtggtataagggcacgatatagatgccctcataagccccaccaggccggtgggaaaagtgcaggatgaaaagaaaatttaccttctattcataaaaaccgccgggaagtgtgaaatgacctgccgccgccggttgcattttgccgaggcttgtagtataatttcacaatatgtaagtccgcccaaccgggcgcagactgaaaaacaacgaaacggatcaaaccgactaaggagtgcgtatcgatatgcgaaatatacccttcagccctccggatatcacggagctggagatccaagaggtgtgcgaggccctgcggtccggctggatcaccaccggcccccgcaccaagcagctggaaaaggagctggcagagtactgccatgtggcgaagctggtgtgcctgaactccgctacggcggcggaggagatgaacctgcgggtgctgggcatcggtgaaggcgacgaggtgctggtgccggcgtacacctataccgccacggcggcggcggccatccatgtgggggccacggtgaagttcatcgacagccggaaggactcgctggagatggactacgatcagatggaacgggccatcaccgacaagaccaaggcggtgatcccggtggatctggggggcatcccctgcgactatgaccgcatctatcaggcggtggaggggaaaaaggcactgttctgccccaagggcgatgtgcaggaggcactgggccgggtggccgtggtggccgactgcgcccatgggctgggtgcctcccgtcacggggtgcctaccggcgctctggcagacttcacctccttctccttccacgccgtgaagaacttcaccaccgccgagggcggtgcatcggcgtggcgcacgctgccgggtcttgacgacgaggagctgtaccatcactatcagctgttgagcctccacggccagtccaaggacgctctggccaagaccaagctgggggcgtgggagtacgacatcgtggggccgtggtataagtgcaacatgacggacatcatggccgccatgggtctgaagcagctggagcgctatcccggcctgctggagcggcggcatcagctgatccagcgctatgatgaagccctgcacccgctgggcatccggaccctgccccactttaccccggactataccagctccggccacctgtacctgacgtggacccccggcatcggggaaaaggagcgcaatgagatcatcctgcggatggcggagcggggcgtggcctgcaacgtccactataagcccctgcccatgatgacggcctacaaggccatgggcttcgatatcgctgactatcccaatgcctaccaccactatgaaaacctcatcaccctgcctctgcacacccgcctctccgatgaggatgcggcctatgtgacggagcagtttgcggacatcgtgaaggagtacctccggtgatgctgcggaagtgggaggatctgccgcaggagatgcggacggaggaggttcgcccgtactatgacctgctgcgaaagaagcaggggagcctgctttgcaagcggctgttcgatattttggcatcgctggtgctgctggtgctgctgagcccggtgtttctggtgctggccattgccatcaagctggactcccacggcccggtgttttacaggcaggtgcgggtgacccagtacgggcgtgaattccgcattttcaagttccgcaccatggtgcagaacgctgaccgcatcggcagtcaggtgacggtcagcggcgacagccgcatcacacgggtgggcaaggtcatccgcagctgccgtctggacgaggtcggccagttgctgaacgtgctgggtggctccatgtcctttgtggggacacggccggaggtgcccaagtacgtggcccgctacaccccggagatgatggccaccctcctgctgccggcaggagtgacctccgaggccagcatccgctacaaggacgaggcggagctgctggacaaggcggaggatgtggacgagacgtatgtgcagcaggtgctgccggggaaaatggcatataatctggcgagcatccggcgctttggcttgggtcaggagctgctgaccatgctgcggacggtcaaagcggtgctgtgaccccctccggaggatacaaaggttgcaattccggtccgcagggagtataatactccgttgcggcgatagccggagaacaaaacaaagaggacgccgcctgcccccagcgggccgggtggcggtgagaggtcaactatggaagaaaagaaagaggtcacgatacaggagatccagagcaagctcctggagatcctgctgtattttcagaagttctgtcaggagaacgggctgggcttcgtgctggccggcggcacctgtctgggtgccgtgcgccacaagggcttcatcccctgggacgacgacgtggacgtgttcatgctgcgggatgactatgaaaagctctgccgtatctgggacgaaagggcggacacagagcactattcctgcgtccgctccaacgatcgattcaacatccgtcactccgccacggagatcaaggacaacaacaccaccttcatcaaccgccacagcgcagatctggacatccatcaggggctgatgatcgacgtgatcccgctggacgccgtgcccaagtccaagtggaagcagctgtggcagatggtggactccatgatgtactgctgcttcaatttccagcgtctgcccgcccacaagggcaaggtcacctactacgccgagaagctggcgctgacgctggtgccgtccttcaaggcccggtacaagctgtggaagggcgccgaaaagcgactgagccgctactcgctggcggatgcggagtacgtctcctccttcggcgagggcgctaccatcatgcgccagaggttccccatccggtggttccgccacccggcgtatctggagttcgagggccatcagatgccggtgccggaggactatgacaagtggctgaccatctcctacggcgactatatgcagctgcctcccccggaggagcgggtctaccgccacgatgcggtattcatcgatctggagcacagctacaagcagtataagggcatccactactgtgtggatgaaaagaaagcgtgagagtcatgtcgaagctgagaaatatgttctccacccggaagtgtatgcagatcgcaccggagacggagatgatgcacgagctgacgccggaggagctgaaggcgctgcaggcgtgctttctggagatcatcaaggacatcgatcgggtgtgtcaggagcacggcctgtgctatatggccgccggcggtactgccttgggttccgtgcgccacaagggctttatcccatgggacgacgatgtggatatcctcatgccccgtgaggatctgaaccgcttcgtggagctgttcgaggagtgcatgggggacaagtacgagctcaccacccccaattccgataagtaccagctggagagcatgatctccgccgtatataagaaaaacaccctgaaagcggcgtttctggactataacacgccgtttcccaagggcgttcacatcgatatcttcgccattgagtccgtccccagaaaccccattgtccggggcatcaagggcgtaacggccatgggcctgcaatacattgcggtatccaccctgttctaccactaccgcagcccggagaagaagaagttcttcagccagtccttcgccggaaagttcaactatggcctgcggtgcacagtgggcttcctgttctccttccgcccctataagaagtggggcgacctgtttgaccgcttcgtgcggtgcaagaaggacacgggattgtgggccgtccccacggatatcggccactatttcggacatattatgcccaaagaggtatattatccccccatcaaggggccgtttgaggacttttccatcaacctgccacatgatccggacacctatctgaaaaatcagtacggcgattactgggtcatcccgccggaggccgaccgggagaagcactattccgtgggtttctgtctggactgcgccgccgaggaacagaaaaaggacggagcacaggagcaatgagcacgcatcccattgacatcgtgatcccatgggtggacggatctgacccggtctggcaggcggatcacgccaaataccgggcctccaaaagcgccgacaatcaccccgcccgctaccgggagtgggggctgtttcgctattggttccgaggcatcgagcagaacgccccgtgggtgcgaaaggtacacctgctgacctacggacacctgcctgcatggctggagcctgaccatcccaagctgcatatcgtcaatcaccgggacttcatcccggaggagtatctgcctaccttcagctcccacgccatcgagctgaatatgcaccgcatcccggatctggcggagcacttcctctatttcaacgacgacgtgtacctgatgaagccctcccgaccggaggatttcttccgggacggcctgccctgtgacacggcggtgatgggcgtcatcaaaaacaacgacaccgccaacttcatgccctatatcatgctgaatatgatggcgttggtgaacatgagcttcgataagcgcagcgtcatccggcagaatttcggcaagtggttctatcccggctacgggaagggcctgctgtataacctgtacctcctcccgtggggggacttcacaggcttccgcaattaccactcctgcgtctccttctgcaagagcacgctggaggaggtgtgggacaggttcccggaggtgctggacgccacctgccgccacaaattccgggaccgggcggacgtgaaccagtatctgttccggtactggcagctggccagcggccggtttgcccccaaaaagcccgacagcacctatcttaccatcggcaagcagagcgagtcggaggtggagcggctgctgcggggcgggaagtaccgggtggtctgcgtcaacgacgaccccatggacttcgatttcgatacggagcggcagcagctggtggatatcttccagcgggccttccccaggccctccgcctttgagcggtcatgagccgctcccgaaactgagagaacggacggatgctatgaaaaagctctcacgagccaaaaataccatgcggaataccctttggggcgccatctaccgggtggccaccctcatcgggccgtttgccatcaagaccatcatcatcaaggagctgggacaggagtataacggcctgtccaccctgttcacctccgtgctgacggtgctgaatctggccaatctgggctttaacagctccttggtgttcaccatgtacaaggccattgccgaggatgacaagccggccctgtgcgccatgctgaaattctaccggaaggtctaccgcatcgtgggtttggtgatcctgggcatgggtctggcggtgatgccgtttttgccatggctggtgaaaaacgagtgtccgccggatgtgaacctgtacgtcctcttcgccatctatctgtcggagagcgtactggattacctgatgttcgcctataacaacgccacgtttaccgcctttcagcgcaacgacgtgacgctgaagatctccaccgtgcgctatgtggtgcagtataccctgcaggcggcggtgctgctgatcttctccaattactatgcctatatcatcctgctgccgctgatggtgatccccaacaacgtggcggtgtatctggcggcccggaagcactacccggacatcgtgtgtcagggtgagctggacccggtgaccaaaaaggacatctataagcgggtggggacgctgttcggccataagctgggcaacacctttctggtgagcatcgacagcatcatcatctcctcctttctgggactgacggcgctgtcgctgtatagcaactattactatatcctcaccgccgtcaatggcctggtggagatcgtcaccaacggcagcctctccggcatcggcaataagctgctgacggactcccgtgaggacaactaccggttcttcaaaaccatgacctatggctgggtggcgctggtgggcggcgcagcggcgtgtatgctgtgcttttaccagcccttcatcgccgccgtgtggcttggcccggagtatctgctggatgaacggctgatgatgctcatcgtgctgtacttcttctcgtggatgttccgcatcatgcagctgacctaccgggatgcagcgggcctgtggacggaggattggctcaagccctatgtgggcatggccgtgaatctggtgggcagcatctggatggtgaaggccaccggcagcatcgccggcgtgctggttcccaccattctggtgttcttcttcatctataccccgtgggaagcgtgggtggtggtgaaataccagttctaccgcagctggaacgaatacatgggaaagctgctgggctatgtgctgctggcctttgccgcctgcgccgcctgctacggtgcgtgccggtggctgtcgccggacaataccatcctgtcactgctgctgaggtgcgtcatcgtgggcgttatttaccccggcatctggctgggcgtcaccggacgcacggcggagtggaagcagctgtggggcattctgctgcgctttttgcccaaggggaaaaaggccgcataggccggtggcataatctatacaaagtaggagttataccatatgcaaaagagagaactgcggcgtgcggtattcggggatgagagctgtatcggacggcttccgtggctgaacacggcggtgctggtgtatgtaggcgtgacggtggtgagctttgtgctgctgcagatcgccccggtgctgacgtggatggccaaaaccccgctgtaccacatttccacctatttgggactgataggcgctgtgctgatggcgctggatctgttcaccaaccggggcctctggcgaggtatctggtgctggctgctgtatggcgtggcctttatggatgtcatcgcctccctgcgtaccatgcgctacggcgtgaaggacaacctttttgacctgtgctgggtggtgatccagtttgcgctggtgtacagtctggcccagcgggtaggcaaggaacggatgcgccggttcctgcggaacctgttctatgtggtgctggtcatctggggcattgcctgctgcgtgggcctgtatcaatatctgttccgcatcggctatacatatgtcgccaatcccaataccaccagcccggagctgacacggcagggctattatcagagccgcctgttcggcctgttcatgggtctggactatgcggcatataccagtatgttcctgtttgtcggctgtatgcagggggtcgtgacccgtgggaaacactgggcggcccgtgcggcactggccgtggcggcgctggtgctggtcacgcacgtgatcctcagcgtgtcccgcagcgccctgatcgccttgatcctgtatgccttctgcttcacggtgctgctggtgcgtaaccgctgcggcagtatgaagcagttgaaacggctgggtgtcagcgtgttggctggtgtgtgcgccgtggtggtgtgctggggctgtacggagggtatccgggctggtatgcagcatatggccgtgggtagcgtcatcgaggagccggatgccatcgagcggtcacaggagggcgatgtctccaacaaccgcttcgagatctggagggactatctatcccttgccggtgagatcggccctgcgggactgtccctgtccaactacaacgactatatcggcgaccggcatccggagatgtacatcgtgcgctactttaccgatcagttcaaggatacggtgaaaacggatctggtctacgagtcccataacaactatctgtttgtgtttatcagcacaggctttgtgggagcagggctgttcctgtgcttcctggtgctggcgctggtgcgggtgattcgctatatcctgcggcatccgcagctgtccctgtggacgatcacgacactggcggtggtggccttcggactggtggaggcgctgttcatgaacagcgtattcctgaagatcaatgatgtgtcctttattttctggctggcgctgggtgcgctgatgctggaaacggaagataaggcgcctgcggcagagcgtactctgtgacaggtaccggtgaaaggagaatatagtttcatggacatcaaaaaggatcatatcaactttgcggtgggtccggttcagatctcggaggagatctcccggatcggtgcagaccccgtgccctacttccgcacgccggacttctccgccctgatgaaggagaacgaggcgctgctcaaggagttcatggatgccccggaggatgccagagcggtattcctcaccggctccggcacggcttccatggatgccgtcacccagaacgtgttcaccaaggacgaccggctgctggtggtggccggcggcagcttcggtcaccgcttctgcgagatctgcgaggtctacggcatcccccatacggccatcgagctgcggcagggccatgccctgacccccgccgatctggccccctatgccggacagggctacacgggctttctggtgaatatgcacgagacctccaccggcgttctgtacgatatggacatgatctccgccttctgccgtgaaaacggtctggtgctggtggtggatgccatcagtgcctttctggccgacgacgtcagcatgaagcgctggggcgccgacgtggtgttcaccggttctcagaaggcgctggccgtgcctcccggcatctccatgatggtgctcagcagccgggctgtggagcgtatctacgccaaccgccccgcctgctactatctggacctgaaggccgccctgaaaaacggggagcggggccagacacccttcactccggcggtgggcatccttatccagatcaatgcccgcctgaatcagatcaaacgggacggctttgcaaacgtacaggctcagatccgtgccattgccaaggatttccgctcccgcatcgggaagtatcccttccacatcgtgtccgattccctgtcctatgcggtgacgccgctgtctcccaacaatccggaggtgtccgcccaccagctgttcctgaccctgaaggacgagtacggcattatcatctgccccaacggcggtgagctggcggataaggtgttccgggtgggccacatcggccacctgaccgtggaggataacgacgcactgttccgggcctttgatgacctcatggcccgtgggattctgaaggcttgatcgatatattacaaggaggaagaaacatgaaagttctgttgcttgcggcgggtcgaggcccccgcatcagccggtatttggccggcaaccccaagtgtaccgtggacatcggcggtcagaagctgatccagtacaccatcgagctgttccacaagaagggcatcaccgacattgccatggtgctgggctaccgggcggaggtcattcaggagacgctgaaggactacgagggtatccgctacttctataaccccttcttcgacgtcaccaacagcatcgcctcggcgtggttcgctaaggacttcctgtcccagtacgatgacaccctcatcatgaacgccgacgtgtatctggaggagacactgctggaccgcattctggagtgccacaagtccccggtgatgtttgccgacggcacccgcaaggaggaggccgactacaagtataagtacgagaacggcctgctggtgaagtacggcaaggagctcaccggcagcgatatcaccggcgagtacatcggcatcggccgcttcagcaaggatttcatgccggagttcatggagaagctggacggcatgatccgcacccagcagcacagcgtctggtgggagaatatcctctatgaaatggtgggcaagcgcccggtatacgtggaggagatggacggcctgttctgggccgaggtggactatgtggaggattatgagcgcatccttcgcttccgcggctataaggcagacttctccctgaacgtggagaagatctgaggaaggacaggcggcccggcgtcagccggagccgccggaaggaagaacggatgaaacaagaaaacggcaaaagagccatgaccgccggactgcggcggacgatggtgatcttcgtgctggatctgctgtgcatcgccgggtcctttttcctggcgctgtggatgcggtttgagttccgtctgggggccatccctcagatgtacctcaacgagtatttgaagatcatcgggccgtggatcgtcatctgtctggtggtgttccagctattccggctgtataacagcatctggagctttgtcagcatcgacgagctgttccgcatcattctggcctatggcgtgctgctggcggccggactggcctatgtgctgattttgaagatcgatatgccccgctccttctactttgcgggctttatcatgagcttcatgtccaccacggcgctgcggttctcctaccgattcatgcgccagttgatggcggggatcagcacggagaagagcgagcgggaccgcattctgatgatcggcgccggcgaggccggacgccagctgatccgggagatcaattccaatccccggctgggcagccgggtggtgtgcatcatcgacgacaaccccagcaagcgccgccggtatctggacggtgtggagatcgccggcgggcggcaggagatccccgatgcggtgaagaagtaccaggtcaataagatcatcttcgccatccccacctgcgacggacaggatcgcaaggagattctggacatctgcagcaagaccggctgccgggtgcaggcggtgccggggatgttccagctggtcaacggcgaggtcagtgtcagcaagctccgggacgtggagctgcaggatctgctgggccgtgaccctattcaggtgaatctggaggagatctgccggtatatctccggcaaggtggtgatggtcaccggcggcggcggttccatcggcagcgagctgtgccgccagatcgccaaaagcaaccccgaacagctgattatcttcgatatttatgagaacaacgcctacgatatccagatggagctgtgccgcacccatccggagctgaatctggaggtgctcatcggctccgtgcgggacatgggccgtctggacgatgtcatggccaagtaccggccggagctggtgttccacgccgccgcccacaagcacgtccccctgatggaggacagccccaacgaggccatcaagaacaacgtgttcggcacctataaaatggccatggcctcggtgaagtacggtgtgaagaagttcgtgctgatctccacggataaggcggtgaaccccaccaacatcatgggcgcctctaagcgcctgtgcgagatggtggtgcagatgatgaaccgccgcagccccaatacagacttcgtggcggtgcgcttcggcaacgtgctgggcagcaacggcagcgtcatccccttgttcaaaaagcagatcgctgagggcggcccggtaacggtgacgcacccggagatcacccgcttctttatgaccatccccgaagcggtgtcgctggtgctgcaggcgggatactacgccaagggcggcgagatattcattctggatatgggccagccggtgaagatcgacaccatggcccgcaaccttatccgcctgtccggtcatgagccggatgtggatatcaaggtagtctacacgggcctgcgccccggcgagaagctgtatgaggagatcctcatggcggaggagggcctgcaggagacctccaacaagctgatccacatcggaaagcccatcgtcatggacgacgaggagttctgccaccagttggatcggctggagaaggcctgtcaggaggagacggaggacatgaaggacatcgtggcctcggtggtccccacctatcgccgcaagaaataattctgcaaggacaaaagcctttcaaggacaacggtaagagcaagagcagccccgacggaattttccgccggggctgctctttcactgtcgggagactgctctgtaaggctgctctgagagactgcccttccgccgggacggttttgtgacgtttttgtaatgaaacctgtcaccgaaacgtcatcttcgtgtggtatactggacaacagaaagtcaaggagggacacgactatggaactgatgcagatccagcatctcagtaaggtatacggacagggtgaaaatcaggtgcgggcggtggacgacatttccttcaccgtagagaagggggagttcttggccatcatcggcccttccggctccggtaaatccactctgctgcacattttgggcggtgttgaccgccccacctccggcaaggtctttgtggatgggcaggatgtctacgcccagaacgaggatcagctggccattttccgccgccggcaggtggggctcatttaccagttttataacctgatccccgtgctgaacgtggtggagaacatgaccctgccggtgctgatggacgggcgacaggtgaatcaggagcggctggaggagctgctggacgtgctgggtctgcggggccgggagaagcacctgcccaatcagctctccggcggccagcagcagcgggtgtccatcggtcgggcgctgatgaacgccccggcggtggtgctggcggatgagcccaccggtaatctcgacagcaagaacagccaggagatcgtggagctgctgaagatgtccaacaagaagtacggccagacgctggtcatcatcacccacgacgagaacatcgccctgcaggcccaccgggtcattgccatcgaggatggccgcatcacacgggatgagcgcatccgggaggtgctggaatgaacgtctttcaccgctacacccggcaggctctgcggaaaaaccgctcccggacgtgggtgaccatcgtgggcatcatcctgtcagtggccctgttcaccgccgtgacggagggtgcttacagcggcgtgcagtatctcgtgggggccgccgagtacaccgtaggccggttccacggctgctaccagaacctcacggagcagcaggcgtcgcagctgagccgggatgaaaaggagatcacggagcagtctgcgtggcagctggtgggctgggggcaggtaggggcggacaatgcttataagccctatctgcggatcatgtccatggaccccaccctgccggacctgctctccatccgactgacccaaggccgcctgccggagaaggccggggagctccttctgccggagcatctgtggtccaatggcagcgtccgccatgcgctgggggacaccatggagctggagctgggccaccggacgctgggtagggaggagctgacggccgatgacccctatacgcagggggagacgctgacagataccacgccccacacctacactgtggtgggcttttaccagcggctggatatgacgacggagcccttctcctgccccggctatactgccctgacctgtcaggagcagggctatcagacggatgaatttttccgggtggcccatcccagccgcttttacagctatatggagggaaacaacgagaaatatccggggttggagtggttttccaattccgacctgctgaattactacggcgccaccaccttcttctccgtgaaccggatgatctacagctttgcggtgatcctgctgctgatgatctccttcggctcggtgtcgctgatctataactccttctccatctccgtggcggagcggacccggcagttcggtatcctgaaatccatcggcgccacccgcaagcagattcgggacagtgtcctctatgaggcactggtgctgtgcgccgtggggatcccactgggtctgctggtgggctgtctgggcatcggcatcactctgtactgcctgcgggacagcttcggattcctgatgggggcgagcggcaacgccctgcaaatgcactttgtgctcaacggctgggcgctgctggcggcggcgggcatcggccttgtgacggccatcatctcggcgtggatccccgccaagcgtgccgtgcgggtgtcgccggtggaggccatccgccagaccaaggacgtgaagctccggggtcgggaggtcaggacatcccgcctgacggaaaagctcttcggtttctccgggatgttggccgccaagaacttcaagcgtaaccgcaagcgctatcgctccacggtggtgggcctgttcctcagcgtgacactgttcatctccgcctcctccttctgcgcctatctgacggatgccgtagaccaactggggggcgacagcacactgggcgtgcagctgtattacagcgagtccctgccggagggcgtgacgccggagcagcggctgggacagctggccgccgccgacggcgtggaatcgggcttctacaccgccgacagctacgccagcctgcactttgccaaggaggacatggatccggactactggaaggacaccggcctggagggagaccgcagcgccgccatgtacttcctccgggatgaggacttccggcagctgctgcgggacaacggcctgccggaggaggattacttccgtcccgatgcacctcaggcggtggcgtgggatatgctggacatctggcgcagcaccgagggcagtaagtacaataagctgtaccattaccacctgctgaacggcagcagcctgcccatcaccggaacggagagcagctatcagcccatggatggctggttcaccgagggagaccgcatcacacgggacggtacggaatatgtgctgtactatccggaggactatatagacgattactataccgcccgcagcgagggggagaccccggacgagagccgggcacaggcggtgccggcatcggaggccgtcctcacccggagctataccgtgggcgctattttaaaggaggctcccgatttcctgggtaccggcgacctgtatctgctgtacccgtacagtatgtatgaggccgtcaccgggcaggctcccgccgccgacgccttctggttccggagcagcgaccacgccgcctcctacgagagcatggggcagatcctgatggagctgggcaacagccgctctgagctgcaggatctggccgccaacggcgagaaccagcgggccatggtgacggtggtgaacgtgttttcctacggcttcatcatcctcatctccctgatctccatgaccaatgtgttcaacaccatctctacctccatcgctctgcgccgccgggagttcgccatgctgcggtccgtgggactgacccagcggggctttgcccggatgatggactacgagtgcatcatctacggcgcacgggcgctgctgtggggactgccggcatcggtgctggtgacctatggcatctatcgcagcgtggcccagagcatcgccgcccggttttacatcccgtggtacagcgtggccatcgccgtgggcagcgtgttcgtggtggtgttcgccaccatgctctacgccacccggaagatccgcagcgaaaaccccatcgaggcgctgaagcaggagaacctgtaagccccgtctcgcaagccgaagaaacagcagccccggcagaactgccggggctgctgtgcttctgacactcgtgatcgccgcctgcgccctgcggcgaagatggggattgacaggcggcggccgggaggctatcatgaggacagaaagaaaaaggagggccgccatgtcacaggtcaccaagcgggcgctggaggcgtcgctgaagcatctgctgctgcaaaagccgctgaacaagatcaccatcaatgatattgcggaggactgcggcatcaaccgcatgaccttttactaccatttcaaggatatctacgatctggtggagtggagctgtcaggaggatgccagccgggcgctggcggggaaaaagacctacgagacgtggcagcaggggcttttgcagatctttcaggcggtgctggacaacaagcccttcatcctgaacgtctatcgctccgtcagccgggagcaggtggagaactacctctaccggatcacctacgacttgctggagggcgtggtggaggagaaagctcaggggatgtccgtgcggcaggaggacaaggagctcatcgccaccctctataagtacctgttcgtgggactgatgctggactggatcaagggggacatgaagggcgacccccaggtcatggtgcagaagctggagctggtgatccacggcagcgtggcagcggccttggatcggnnnnnnnnnnggacggacaagcctgcatcaaacggggcggaatgataaaaaactgaacatctcccatcccggtgataaaaaacttatcaccgggatttttctgtttattgaacaaattgcgcccaaggtgtatgttttcatcatcagaggaaaacataccagcgagacgccgccgacctcccgtgtgcgtgctgagaaggggacggggcggcgcagcggtcaacagaaaggagcgcatttttatgtattattccagcggtaactatgaggcctttgcccatcccaggaagccggagggcgtggacaacaaatccgcctacatcgtgggcagcggcctggcggcgctgactgccgcctgctatctggtgcgtgacggccagatgaagggcgagcgggtccacattctggagaagggtcccactgccggcggcgcctgcgacggctggaggttcgagaacatcggctacgtcatgcggggcggccgtgagatggacaaccacttcgaggtcatgtgggatctgttccactccatcccctccattgagacggagggcgtcagcgtgctggacgagtactactggctcaacaaggccgaccccaactattccctgtgccgggccacggtgaaccgtggcgaagatgcccataccgacggcaagttcgatatctccgacaagggtgccatggagatcatgaagctgttcttcacccccaacgaggagctgcaggacaagcgcatcagcgacttcttcgacgacgaggtgttcggcagcaacttctggctgtactggcgcaccatgttcgccttcgagaactggcacagtgctctggagatgaagctctatatccagcgctatatccatcacatcggcggcctgcccgacttcaccgccctgcgctttaccaaatacaaccagtatgagtccatgatcctgcccatggtgaagtatctggagggcttcggcgtccagttccacttcggcgtgcaggtgaccaacgtggagtttgactgcaccgcccatcggaaggtggccaagcgcatcgacgtcatccgggacggcaagaacgaggccatcgacctgacggagaacgatctggtgttcatcaccaacggcggctgcgtagagaactcctccatgggcagccagaacacacccgccccctacaacaccgagatcaaggagggcggcggctgggatatgtggcgcaagatcgccgctcaggatccctccttcggccatcccgacaagttctgctatgatccggagcagaccaactggatgagcgccacggtggagacgctggatcagcgcatcatcccctatatcaagaacatctgcaagcgggatcccttcaccggcaaggtggtcaccggcggtatcgtcaccgtgaaggactccagctggctcatgagctggaccatcaaccgccagcctcagttccgccagcagcccaaggatcactgtctggtgtgggtgtatgccctgttcaccgataagcccggtgactatgtgaaaaagcctatgcgggagtgtaccggtaaggagatctgcatggagtggctgtatcacatcggcgtgccggagagcgaaatcgaggacatggccgccaatagcgccaacaccgtccctgtgatgatgccctatatcgacgccttcttcatgccccgtgcctacggagatcggcccaaggtcgtacccgacggcgctgtgaacttcgccttcctgggccagtttgccgagacaccccgtgacaccatcttcaccacggagtactccatgcggaccggtatggaggccgtgtataccctgctgaacgtggatcgtggcgtgccggaggtctggggcagcgtatatgatgtccgggatctgctggatgccaccgtgaagctgcgggacggcaagaaacccatcgatatggagctgaatctggtggaaaagatggccctgaagaaggtcctcagcaagatccacggcaccgatatcgagaagctgctgaaggagtatcaggtcatctgaggcccgctgggtcggctgctgcggcagtcgatgaccttctgaaaacaaaaaaaggagaggccatgtcacagccctataaggcggtaatttcaaaatacggaaagtgacattcgcaaaggcaagcaataagactctggctcacaaggtcggagccttattgttttctgcctgtcatatatcgcatctttgtgcctcggcagttttctgcgtatcatgaaaacgtcaggaggtgtcggacaatgagaaaacaggaatatcacacctatctaaccgagcaagagcagttggatgtaattaaattgcttattgatctgaatactgcccttgccgccaaaggcaaatatactgatgccgtagatgacttgctggtgaagttgaccattgcaaggagaaagaaactcaagatctcctacatctaataagtatgattgagccgcttatctcctgatcagagcatggctttgtgcgatgagggcgatgagaggaaaccggcagcagaggggaggcccttgcgggtcaaagaatttgtaggcggtaaaaataacggatccccattttgttttcggcatagaacggccctcctgcgttcatgggagctgctctcatatcccggagcgcaaaaaagaaatgccccttcgccgtccgacatgggcagagtgatatttatgatctcacattctctatgggatacccggtcagatccgccggatatatgttctgttataaccgaaggatgatccatctggcaagtggtttttccggaggttttttcggtcgagaggagggagatttcaacttgacgcagggtaacttttgtattatggtgtacttaccatccatgaacaagggtaaacacggttttgccgggcagaaatccgcccatactgcgtcgatcctcttgaccatacggaaagtatgctctgcgggtctttccttgtctggccgcatttctgctccggcaaaactgcaaggcccctgccaacgatggatcttcgagtgatttttgttttttgagatgcagacggcgcctgccaagacgaaaaggacaaaaggcgccggaaagacacgctgccaggcgtgattgccctcgtccatcgatggtaccggacgtggtaccaaaaatggacattgacaggacaaaattcctgtcagcgatcggtgagaaaagtgtccggttcgtgtcagaaatcggccagatcgggggagaccttgttgtgaccgtttcaccgcacctgctgccaagagcatttcggcagcagagaacatttcggcagcagaggacatttcagcagtgaaggatatttttagtaaggaggattttccatgcctaccatcaaaaccggcatccgcttctccaaaaagcagccgctgagcgagcaggagctgcggcagcttcacgcctactggcgtgccgccaactatctgacggcctgccagctgtatctgatggataacccccttctggagcgcccgctggtcaaaagcgacctcaagcagaccatcgtgggacactgggggacctgccccggccagaacttcatctatacccatttggatcgggtcatcaagcgcaacgatctggatatgatctatctctccggtcccggccacggcggcaacgccatggtggcgcaggactggctggacggcagctataccgaggtctatcccaacatcacccgagacaaggaggggatgcagaagctcttcaagcgtttctccttccccggcggcatccccagccatgtggcgccggagacccccggctccatccatgagggcggcgagctgggctactcgttggcccacgccttcggcgccgtggcggataaccccgatctgatcgctgcctgtgtggtgggcgacggcgaggcggagaccggcccgctggccacctcgtggcacggcaacaaattcgtcaaccccatcaccgacggtgcggtgctgcccattctgcacctcaacggcttcaagatcgccaaccccaccatcttctcccgcatgagtcacgaggaggtggagtgcttcttccgtggctgcggctgggagccgtacttcgtggagggcgacgaccccatggtcatgcaccagcagatggcggcggcgctggaccgggccatccgggagatcaagcgcatccagcgggaggcccgcaagaccggcgaggccaagcggccccgctggcccatgatcgtgctgcgcacccccaagggctggaccggccccaaggaggtggacgggctgccggtggaggactgctggcgagcccatcaggtgcctatctccatggggacagacaccgatcggcacctcgcccagctggaggcgtggctgcgctcttataagccggaggagctctttaaccccgacggtacgccggtggagctcatcgcctccttcccgcccacgggccgccgccgcatgggcgctaaccctcacgccaacggcggcctgctgctgcgtgacctgcggacccccgatttccgggactacgccgtggacgtcaaggcccccggcgccgtggaggcgcaggatatgtatgtgctgggtacctacgtccgggacgtgatgaagctgaacatggagtcccgcaacttccgcatcttcgcccccgacgagacggcctccaaccgcttgcaggcggtgttcgaggtgacgggccgccgattcctggaccagcagatccccggcatcgacgaccatctggacccggacggccgggtcatggactccatgctctccgagcatttctgcgagggatttttggagggctacctcctgacgggccgtcacggcttcttcgacagctatgaggccttcatccgcatcgtggactccatgttcgcccagcacgccaagtggctgaagatgtgcagcgaactgccgtggcggcaggatatcgcctcgctgaactatattctggcctccaacgtctggcagcaggaccacaacggctttacccatcaggaccccggctttttggatcatgtggccaacaagaaggccgacgtggtgcggatgtatctgccgccggatgccaactgcctgctgtcctgcttcgaccactgcatccgcagccgaaattacgtcaatgtcattgtggccagcaagcacccccggccccagtggctgaccatggagcag

SEQ ID NO: 795 - DNA, 21798 bp, unidentified
  source 1..21798: mol_type = unassigned DNA
  misc_difference 13604: note = a, c, g, or t
  misc_difference 13605: note = a, c, g, or t
  misc_difference 13606: note = a, c, g, or t
  misc_difference 13607: note = a, c, g, or t
  misc_difference 13608: note = a, c, g, or t
  misc_difference 13609: note = a, c, g, or t
  misc_difference 13610: note = a, c, g, or t
  misc_difference 13611: note = a, c, g, or t
  misc_difference 13612: note = a, c, g, or t
  misc_difference 13613: note = a, c, g, or t
gttgccaaaatgctcgataagacatccagtattatctgcgcttttggcttagcaactgccgcacctcgctcgccgtatcggcacttagaattatgcggtgttgccttaatatgatacaccctagtgtacacgaaagtacgacttaaagcaagtactttgcgcaccggaggttttacagcttcacgcccattttttccagcgcaaacagcgctgcgcccaggctgccgcacagttggctgtactcgctgacctccaccggggctttcagggcggtttccagctctttcacaacgccgcggttgcgggctacaccgcctgtcatcataaagggggccacgccgccggtgcggcgggccagggcagcggttttgcccgcaacagatttgttcaggccgtggatgatatccgccggtgcggtgctgcgggcaatcaggctgacgacctcactttccgcaaacacggtacacatgctggaaatggtcacatcgttgtgccagtccaggccaagctcgctcatctccggcagcttcatctgcagggtgcgggccatcatctccaaaaaacggccggtaccggcggcgcatttgtcgttcatcgcaaaggtttcaacagcgccgctttcgctcaggcggatcaccttggaatcctgcccgccaatgtcgatcacggtgcgcacggcggggtccagatgatgagccccgcgtgcatggcaggtgatctcggtcacggctgcgccgtcatcgcccaggaactcgcgcccgtagccggtgtataccttggaacccaggtcgctttcggcaatgcctgccatcgtcagggcctgttccagtgcctggcgggcgccggttgcagccccggcgccggtgggcacaatggcccagccgcagatctttccgctgcgatccaggatcacggcatcggtgctggcagagccgctgtcgatgccggcggcatattgtgcgttggtgttcatggcgggggcctccttgttttcggtatcgggaacggcgttcaggctttcggcaaatgcgcccaggcgggtgctcagctgcccgccgccgctggtaaaggtctggcgggaacagtcggtttcaatttttaataccggcaaatggaactgctccggcgcggtcaggccgggggcgtaataatcacagaactgcacggtgtggtacacaatgccaacggtctggccgtccaccagggcggcgcgctcactgaccggggcatccatccgcatgcagggcatctggcccagcagggcggcggcgtaaccgggcaaaaagtcctccagtgcggcgggggcaacatcggcaagctcacggttgccggtgcaggtagcatccaccacgggcagggcaaaggctttctgcacggtatcatacagcacgctgccgccatgggcacccagcagggtcaaatgcggaccctcggcgtggggtttgtgcacaaaaaaggcgtgggcgcgctgggcgtcgaattcctgcccggtgtaccgctgcagggcatccgccagcctgcgcaggtcccgcgcaaagcgggcgcgggtggccggggtgctctggtgggggacgggcagcagctgcaaaaattccatcttaccactggcagccagcacatcgtaaacgcgcagcatggcatcgcagcagttggtcagcaccaaagcccggatgccggattgctccacctgttccagcacagccttggcgtaaccgcacaggttggcgtgggcgcagcgctccgcgcaggaaaaactttccgccagcggatccagcgccgagaaggtggccccatacccggcaaacagctccagcggggcgtatttgcaggcataatagatcgttttgctcataccagcgcctcctgtttgctgtgcagcatctccaggaaagcatccagccgggtggcggtctggccgtccatcgtgttggcgcggtcgcagccatcgccgtccagcagcagcaccgggtagccctcggcttccagtgcgctcttgaacagctgtgcggcccccatcgtctgcttgcagccccattggcagaagtagaccaccccgtcgatctgctgcatgcggcacagctccagcgcgcgctggatgcggtgctgggcgctgccgttaaagatgttgttcaccagccgcgcggccatgctctcaaacggtttgtccgggtccatgcagcagcctaaggtatcggcgttcatatcgcaggtaataagctggttttctgccgagaaattcagccgctcccgcacgggcgcctgataaaacggcacggcgtgcgcccacagcagccgggtgccgccacccatggggctggcctcgatatccgccagcagcttgcgggcgtactgttcagcctgcggggtgcccagcatggtgtgggtcacaaacacttcgtaaaattcggaggtgacatcgttgtgcaggttccgcccggccttggcggcctgtgcctgctgcaatagttccagcgtgcggccgctgtgggcgactgcctgctgcagggccgcttcgtccagcttctggtgggtcgcatcctccaaaaaggcggcgaactctcgtaggcggtcggaaacttcggccacagcgtactcgtcgtggtcatagggcacatccagataaaagtgggggatgccgtaatgctgcgccagccgccggaaggtcaggttgttggcatcgcaggcaatggaggtgcaggcagtgaacagcggcttgcccgccgtgccggaaagccccatgcccagcaaagccttgtggtagctgcacagcgtggggctgatgcctgcgctctcggcataatggataaagccgcgctcggctgcggcaccgttcaggtaacaggcggtggcttcggcaaacatcggcagcaggtggaaggcgtgcagcagttcacagggcataaagatattgaccagcgccgcccgctgcgggtgggccaggggcgcaatcatggcgtccatggcgatctgtgccgcatactgccgcgcgggggtgagctctttttccggggcaagcagcagctgcacatccttggcgcggtagcccaacagcagcagctggcgggcaagctccggcttgggaatggcgtcatccaccagctggccaaagcggtcaacgatatttggcatagggggttatcctttcaacacataggtttcaatggccttggcaacgccgtcatggttgttgtcgtccgttacatagcgggcggcggccagaacatccggtgtggcgttgcccatcgcaatgccgtacccggcggcctggatcatggcaaggtcgttgccggaatcgccgcaggccatcacctggttcatcgccaggcccagggtatcggccagcgtttttaatccgctgcccttggtcacgccgggggcgttgatctccatgttgttgggaatgctggaagtaatctcaacattaaaccggctggcaacagcctgccaggcggcatcgcgggcggcattgtcccggtaggtgatgctgaacttttccacctcgtgcgggtgggcggcgaacactgcgtgcatgtcatccaccacaatgcggctgtcgcgtaggtagcggcgcagggcagggggcatcagggcaaggccgtcattggcaccaaaataatcggtgtaggctttgccgccgataaaaatgcccatggcaccgcccgttgcggccacgatatcataaatgtcgctggcaagggcagcatcaaacggcaggttgaccagcggtttgccggtggaaagctccaccacgctggccccgttggaagtcagggcataccgcacgccgggaatgcgcaaaaacgcttccggcacacccgatgccacacgccccgttgcggggatgacatcaacccctttggcaatggcagcgcggatggcttccagcgtgcggggtgtgatctctttttcatcattgaatacggtgccgtccagatccaatgcaacaagacggatatcgggcataacggacccctcctttgttatatttcaccaaagattttagcgcattttcggtcattttgcaagggcgccttgcatttgctatgccaagtatggtaaagtgacatcagccctttgcatattggcacagggcagggaggggaacgcgatgcaaaccgaacaacagtcgttgcgtgcggcagccgggcagcgcttttggcagatcgatgccctgcgcgggctggcactgctgaatatgctggtttaccatgccatgtatgactgggtgtatatttttggccatgccagcggctggtacgatatctggtccacgcactgccatgtgtggcagcagtatatctgctggagctttattctgctttcgggttacagctttaccctatcccgccgcccgctcaagaacggcctgctcacggcggcctgcgcggtggtgctgaccgtggcaaccgccgttgccatgccggaggaagtcatctggttcggcgtgctgcacctgctgggctgtgcggccctgctgacctgtctgctgcaccccgcgctggaaaagctgcccccgctggcaggggttacgggcagcgcggtgctgtttgccctgctgaaccagctgccgcagggctggctggggtttgagggaacgcacctggcggccctacccgccgcctggtacaagccgaatcttttctggctgggtctgccagatctgacggtgttttcctcatcggattatttcccgcttttgccgtgggtgtttttgtattgggtggggtacttttttgcgcggtgcttccgcgcccgctgcaccgcgcagcccggcctgccgcccaaagccctgcgccccctgtgcgccgtgggcagccgcacgctgctgatttatatgctgcaccagccggtgatttacggtgctttgctggggctgcacgcattggggttggcataaagtttgggtaaagaaaaaagaagaaagaataatgaataatggatgtgtgccgcccacggcgtcacattttaaccaagtcagttgctccggcaaaaagcattccagccagagcagccaacctattttatttgcgccgctgcgggcggcgcaccagcattattctttattcattattatttattattttgtataaactattgcccagaccccgcgtatgagggcaaaaaactgaactttttatgaaatttcaaaaagtgggccagaacgcgtaaaatcgtggttgacaggagcctataaagtatagtataatttcagttactggttgattgtaattttgattgaccggcaaactcctgtctcagaccaagggagggaaaaagatgtcggagatccgtgtcaaagagggcgaatcccttgagagcgccctgcgccgtttcaagcgcagcactgcccgcagcggtgttcttgctgaggtgcgcaagcgcgaggcttatgagaagccgtctgtgcgtcgcaagaagaagtccgaagccgcccgcaagcgcaagtttaagtaatccggagccatcgcagcggctatgccgccgttttcgataaccgtgtttacccaaaggaacggcagaacaggttcgcagagatgcgggcctgttctttctttatatctaaaacccggggtggcgcttgcccgctgccccgcgcttataataaggtagtttgtctatgcttcttacccctgaatatattttccgtgccattgaggccatcacgccggagttcctgcgccagcacggtatcaccgccctggtgctggatgtggataataccttgacgggggatggcagccagcagctggatgccaccgtgcagcaatggctggatactatgcgtgccgcgggtgtgcggttgacgattgtttccaacaataccgccgcccgcgtgcgcccctttgcggaccgtgtgggcctggcttgggtgccgctggcctgcaagccgctgccggtcggcctggccgttgcccgccgccgccttggcgttcgcaaaaatcagatggccatggtgggcgaccagatctttacggaccgccttgccgcggggctgtacggcatcccctgcctgtataccatgccgcgtgggggcgaccaccagcgcggtgtgcagttcaagcgcaggtttgaaccctactggctggaccggtattaccaaaaagggggccgcctgtatgagtgaagcaccgcgctttggcacggctgggctttcggacagctaccgtgtccgcagctttgacccgcaggccatggcggagtatacggcttcctttgggctgacggcgtttgaataccagtgtgggcgcggtgtgcgcctggggctggataaagccgccgccttaaaagaagcgtttgatgcaaaaggcatcactttctcggtccatgcgccgtactacatcagcatgagcagcctggaggaggacaagcggctgaacagcgtgaactatctgctgcaaagctgcgcactggtcaaggcactgggcggccgcagggtcatcttccacgcgggcagctgcggcaagcagagccgggaagccgcactggaaaaggcgctggacaccatgcgccgcgccgttcaggccgtggatgaagccggttatggcgactgtatcctttgccctgaaacgatgggcaaggtgaaccagctgggcacgctggatgaagtgctggccctttgcagtgtggatgaacgcattattccctgcgtggattttggccacctgtatgcccgcagccagggcaccgagctgaacgatgagaccgccccggcagattacgccgccatcctggatgccattgccgcagccttgccgggggagcgggccaaaaagttccacgcgcatttttcccgcattgcctacaccaagggtggggaaaaatgccacctgacttttgcggataccgagtttggcccgccgcctgccccgctgatgcagctgctgaaaacccgtggcctggcgcccaccattatctgtgaatccgccggaacccaggccgaggatgcggcggcgctgaaaaaactgtatgaacaaggctgagaaagcccaaaaacagccaacaaaagccgaaaaaaaccaaaatatcacccgaaaatcccgctaacctcttgcaatactggcgcttttcgggtaaaatacttacaggtatgacaatgcaatggcattgcttgatgggcggcggggccgctttttcaaacaggcccgattctaaaattatggaggagttcctatatgatctctgcaggcgaatttcgtaacggtgtaacttttgagcaggacggccaggtccttcaggtcgttgagttccagcatgttaagcccggcaagggcgctgcttttgtgcgcactaagaccaagaacgtgattaccggttccgttgttgaaaccagctacaacccgaccgctaagttcccccaggctttcattgagcgccgtgaggttacctactcttacgaggatggcgacctgtactacttcatggataatgaaacctacgagcagatccccgttgccgctgccgatgtgccggaaaacttcaagttctgcaaagaaaacgaaatctgcaaactgctgtcctacaagggcaaggttttcagcgttgaaatccccaacttcatcgagctggaagttaccgagactgagcctggcttcaagggcaacaccgctaccaacaccctgaagcccgctaaggttgagactggtgccgagatccgcgtgcccctgttcatcaacgagggcgacaagatccgcatcgatacccgcaccggcgagtatatggagcgcgtctgatcttaaaacaaatggccgggccgtggtttttgccgcgtcccggcttttttggaaaattgcaaaaacaaacaccctgtttacagtgcgtgaaggaggttttcccttatggctatggatctgaatgcaaaggccgcttacatccgcggtatgatgaaagggatggagtttgaccccgccacccaggaaggcaagatcattgttgcaatgatggacctgctggaagagatggccgatgttgtgagcgagcatgacgatgccctggatcaggcttttgacgagctggacgccattgatgaagatatggatgatctggtggacaacatcttcggcgatgatgatgaggacgaagatgaggacgaggatgacgacggcgcatttgaaaccagctatgaagtcacctgccccaactgcggtaccgtcaacattgtggatgaagacaccctgatggacagcgataagatcgtctgcgcagagtgcggcgcagctttcgatgtggaagttctgcccgacgatgccgagatgcccgccgatgcagaagccgaaagtaccgatgtgaccatcgagtaagcggttaagtgcacgaaatagaataacagatagaaaatcacccctgtggccggattattctggccgcaggggtgattttttgattattggggaagaaagtaatttgcagcgaggttgcaaacgctgccataaacctgtagacgatgcgtaggggacgatacttgaccgttccgaaaccgtaagacaatatatcattataaaatttgtgatgctcaatgatgtaaaagctccggcgtggtcaggtagcaacgccctgcggcacagggatgaagtacaacaaaaacagcccggtccaaacggaccgggcattgtgggttcctgtttactttttctcgttcttcagctggttgcgcagcatgatatcgccaaaggtcagggcgttgaacaaaccgccggccttgttggcctggcgcacaatgcgcgccggcagaggcttgctttcatcggtggaaagcaatacaatgtgaaccttatcggccacgtcggcattgccttcctttttggtggtcagcacctgcaggtacacaacataggggtcatgcatagaaccatagtaaatatcgttgccgcagcgcaccagcgggcggcccttataggtcagactgggggtaaaagccatctcttacaaccttctttcgctgttgttgtatccgaaaagccaaaaatatagcctgtttctacaaacacagccgaattttgccttaaatccgccttgcgtttgcgaaatatgcgtcattttctttgttttcagctacaccttaatcaataaaaaatattataccatacaagataggggattacaaatctaatttttcgctttcgatcttttcttcgttcaaggcaacgcgctgggtcaaaatgcgcaccttgctgtccagctgactgagccggatggacataaaaaactgtttggccagcagcaaaaagatgatgacgatataaacaaaattgatggggctctggaacccaagcagatacgccgcccagtaggcaatgccgggaaagatggccaaaatcagcagaatgccgctgaacagaagccagaaaatggtatcttcgatctgcaccttagccaaacgcacgcggcgcagaatataggttgcggtgatcaggctgcccaacacaaggcatacacggataattggctgatcaaacatggcttacaggctcctttccgggtaaggcgtttcggtgtcccgcttgcggaaccactgaatcagcaaaatggagatggacattttgaccatatattcaatgctgcgccaaaaggtcaggtagctttgaccggcctcgcgctcgcccattgtaacttgtacttcgcgtaccacagcgccgtttttgatcaggtaactgatggtatccggctccgggccatagttcaaattttgggcaaattcttccaccatggcgcggttgaacagccgcatgccgctggtggggtcgcagatggcacggccggtggtcagccggatggaccagctgatgatgtaacttcccagcatgcgcaggcttttgggctttttcaccgtcaaaaagcggctgccaatcacgatgtcggccccgctttccagctcttccagcatggcggcgatatattccggtcggtgctggccgtcagcatccagctgcatggcgcagtcatacccgttttcggcggcatagcgcagcccggtctggaatgcacctgccagccccaggttgaccggcagatcgatcaagcggaacccatgttcccggcagatggccgcggttttatcacggctgccatcgttgactacaacatagtcatactgcgggtagttcttgacaatgccgttgacgaccttgacaatattggcttcctcattatatgcaggaataacaatcagcaattttgacatagcaaatgttccttatccacttgcccggcaaacaccgggcagatgtcagctttggtttatgatccccatcattttatcaaatacggcatcccatgtaaagtgcgcgtacacattgcggtacgccgcctcggcacaggcatgggcgcgggcgggatcatccagcagggtctgcagcccggcgcggatggtttccaccgtggcgtcctgtggctggccgggcagcacaatgccgtgggtatcgtccggcagcagctcctcggttccagcggtacgggtgcacacgatggggcagcggcaggccgcggcttccagcaaggtggtgggaaagccctcggcataccgggtgggcagacagtatacatctgcctgctgcagcagctgaaccaccgcatcatgcggcagggcaccgggggtaacggccccaaggtccgccagttcctgctgctgcggaccgctgccagccgccaccagaacaacgcccggcagctgggccacggcctgggctaataatccggcgcccttttcgggaatcaggcggcccacaaacagcacgatcttacggtcgccaaggttcagcttggcgcgccagtctggcgcgtgggcggcttcctgttccaaagcagcggggtcaatggcgttgggcatggttcctgcagccgtaatgccaaaggtgtgcagccagcggcaggcagcagcggaaacgccatagaacggcgcgccggtgccgcgcaccaggcggcaggcaacctgctcatacagccgcccgcaggcccccagcaggccgttgcccatcggcatgtatccggtggaatggtcaatgaccagcatggggataccgcggcgcttggccgcgcgggcagcccagacgctttgggtgtacatgcgggtctgcaccacgcagaaatcgggcttttgcgcccagatttgcgcggtcagcgcgtggaagcgcgcccccggcttgatgacaggaaagcgcccgttcatgacaggccagacgggcaggcggtaaatttcaatgccgtccccgtcaatttcgtgatccggcaggttgggcagagcactggtaaccacaatggcgcggtgcccggcggcaacagtgcggcgggcgaggttccaggtgtagcgctccacaccacccaccgtgggcaggtactgcgcagaaaaataacaaatcgtcatcgggcaatcaccgcaagcatggcgttcagcaataccccggcgttgattacgcacaggcagcagaccagggtacaggcggactgtttgccgctggcaacctggacccggcggggcaggcaggtaagcaggaacaacggcagcacgggcagaagataccgcccctggaagccgtaaacgatctggtagtaggtcggggtccacacaaggcagccggcaaaggccaacgcggcgcacagcagcgcggccagcacacaccacacccggtagcgcccctggggcagccccggcacgggaacatcctgcgccggaacggcggcataccacagcagcaggtagagcgccaacacccagaaccaggccaggtccagcgagctgtagcttaagctgccacccacaaggccgcgcacccagttgtcggcatcctgcaccacgctgcgtaccagcagcatagccacggcgggcagattgtgcagaatgtaaccgggggtaaaggtggtctggtcttcctcgctgggggtgctctggctgtcccgcacggtacggacagcttcgatctctttgatcagcacattgcggtccagcgggtagcggtcatcctccacgccggggtagatctggcaggcggaaagcagctctgcacattcatcactgctgaacatggacttgaaaaagtctcggcggtcagcattggccagccgttcccggcacatttcggcgtcggtggtcatcaggtcgcggtccaggtaaaccagggaagccgcactcatgaattcatcatcggtcaggctggaatgctccacttcctccgggctgaagaaaaagctctggcccagaacggcggcggtcacatcgccctcctgcaaggcctgcacccagaactccagctccttctgcgggatctcggtcacgccctccacgcagtaatacaggcggcgcacaaagttggaagccgtgttttcgcggtactcggcaggcatgttggcaaaccggttggaggttttgccgtcacccgcggcaggggcggcatgcagggtacgattgtcagctgtctctgttgctgtataagaaaccgcggcagccggggtagaaccctgtgcggaggtggtttccgcctgggtagtctgattttcaaacccggcagaaccggccaccgaggtgaccagcacagcgcggttgatgctgagcgccagcagcacgcatccggccagataagcggcttttttggttgcggcgctctggccaaagcggctgttgggaatcagcaggaacaacgctgccagcggcaggtaaaccagtttggccggtgccagcagaatgccgaacaccgccagcggcagccacagccgccccggcagcaccgtgccgtccttgcagccaaaaatcgcctgcatacacagcgcagtaaaggcaaacgccagccccagcagcagggaatcccggctgaaagaagccgccagatgcagcgtcatgggcagcagggccgccgcagcgaatacccgcctgccaaacggcgcggctttaacggccagcgccgctaacaaagcgaacacaattaaatttgctgtgcgccccagcatcagcgccggaacaaagccaaggtgaaaaacatatgccaggaacaccgctgccgcgctgaacagatacagcgtgggattgcggtcggtctgcagttcttccagcgcagtgtggctgtcaaagctgtcaggggtggtggtgaacaggttctcgctcagttcctgccagctgaacacggtggtcttttcgttttgcagcagggggtcaaagtcgtgctcgcggcggtaggtcatatccagcggcacattgcccatccgccattcatccggcgagagcacgttggcccatttgcaggctaaagtaaaagactggttgatgtggtatttttcgtccggtgcggcatagggcggcagcacaaagctgtacagcatgccaaagcagagcaccagcacaaacaccagccggtgcagcggcatgcggccccgcatggcaaaataaatgccaaggaacaccacaacgctggccagcagcccgaccagcaaaaagaaccgggtcaaaaatccgccaatctgtttgtaagtcaccagcagcgccagcgtgccgtccacggcttcgccgtttacggtaaagctatcgttccacagcacagcgccgttgctgcagcccacggtcaaccggccggaaccggtatactccggtttcagggtcacgcggtagcggcggcctgcgctgnnnnnnnnnnctgccggtcacgggggtatccagccccatgccggtgtactgcccggccacaatgttcgccatatcgccggtggagcgggccagcacctcgccggtgtcggcatcggcaagttccaggtgcagctcaccggtgggttggccgttgctggtgccaaacacaaaggccatggccagcaggtcattgtcggtatcaaaggtctgggcagcgccgttggcttcgtccagctcggcgctgtactggctgtaatcatcgctgatgcgctccgacaggctcttgtcattgttggggcgcaccgcggccaaccaaaccagcaccacggccagcaggcaggcagcagcggcgcacaaggcggtgcccagcgggcttttcagaaaatcctttattttgctcatacgggctcctcccggttttggtggttcagcgttcagggggtgtccaaaacaaacaccggaatatttaacgtttcagccgcacccatcaaatctttgcgccaaaggcttttttaacggcggcaggcaggcggccgtcccgcagcaggatctcttccaccgtgccgcgcacagcgccctcgccgcctttttggcggcagatgaaatccgcccgccccagcacagggccggcggcatcggccgggcaggccacaaagccgcacagggccatggcggtcaaatcgttcaggtcatcgccgcaataggcaacatcctgcttggtcaggctgtgctcagccataaacctgctcaaaaaggcggctttgtcgtgtacgttctggaacagatagtcaatgtgcaggtcctgggcacggcggcgcacggcttcacattcgcgcccggtgcagatcataacctgcatccctgccgcgcgggccagcacgatcccggccccatccttgatggcaaactttttcagctcgttgccggtggaatcatagtacacgccgccgtctgtcatggtgccgtctacatccagaaccaaaagtcgaatcatgggcaaacctcgttattttgcgtattcgctgggggtgataaaggtcacatccagcccgcaggctttgatggcacctgccatggcggtgttgaacgcagctccgcgcccggtgtgagcgtgcagcaggctgtcggcataggcgggggtaccgggcttgtagccatcggccccggccagcagcacagccttggcaccgcacagccgcagcaaccgcagcagcatcagtacactgttgctgccaagggatgcgttctgcacatccggggcagccagccggtcataattgaccgccagagccccctgcggcagcggccgcaggttggaggtgagcacaacagggcagggcagggaagcaaggtccagcttttcaaaccgcttgctgttggtaaaaaatgcgtaatccggctggcagaattccgggcagaaattggctgaaacaatgcagtccgccttggcggcggccacagcgctgcgcccggtttcgtccgccaggctggcaccgggggccagcaccagcacggtcttgccgctaaacgcggtgcgcagggtatccagcgcggcggtgtcgtcaatggcgcggttctggtattcgcggtacaggcggtcggcatagtctttatcgtatgcggtggccttgctgcggtcaaaaccggccagaatatggttgatgtcccggttggtcaaatcgcctttgtccagataatgctcggcgtaatcgcggtgcaggttgtaccgtgcgctcaggaagtaagccggggtgtaaccccaggctgtctcgcctttcagcggggcgatatggtcctggatggcgtccatcatctcgtcaatgtcataatggcagccaagggtctcgttcatatagtcggcaatcagctcaatgggcaggttgccgggaatgcgccccatgcccatcaggctgccgtccacagtggtatcgcggcccaggtgcttgtccagaaattcctgcgccaggcagaaagagagcgccatgttctcatgcaggtgcagccccacgcggatatccggggccaggttgtggtccaccagactgacgatgcgctctaagtcacgccgccgcatgctgccgaaggtatccacaatggagaactggtacgggtgaatctcgtttacctggtctaaaatccacagcaagtctttgtcggcatagcccataatgttgatggggttgatggacagcttgtacccgcgggccttgacttcgcgggcaaaatccatgccttcgcggatatcgtaatcgtgggcggtaatgcgcagcatctcaatgccgtgcccctcataaggggacagcttggcaatatcataattggagcgcatggccatgccgctgtacatggtgctgccggtgtgggcaggcagcagtctgttcagctcttcaatggtgttgcagacggtcacatcggggttgtagccatccacattgcgcagaaagcccacttccacaatgtcagtcccggcacgggtcagcgaggcgataatatctttggctgcagcgaagccccagttccagctgttcacatagccgccgtcacgcagggtgcagtccaacagtttaatatcgggcatttattcttttcctttcaggatttcgctcacaagggcaaggtccttgggggtgtcaacgctcacagtcttgtacgggctgacgatggcatgtaccttgtggccgttttccacaaagcgcatcatatcgttctcttcggctttttccagaatggacttcggtgtttcgtggtagaacgccagcgcccggcgggagtacagctggatgccggtcaccttctcgtattcaaaatccagcgtgcctttggggtagggaatggggctgcgggagatcatcaaaatttcccgtgcggcgttggtcacgaccttctggttggaaaaatcgatcacatccgcggggtgctccatccggttggtcagcacggcaacataatacgggtcctccggcagggtatccggcagaatcaaatcaaacgcttttacgttgatcagcggctcgtcacccatgatctgcagatacaggtcggcttctaccttggtggaaacctcccagatgcgcccggtgggggtgtcatggtcggggctggtcatgcagtattccatgccgtaggtgcggcaggcttcggcaatgcgctcatcatcggtggcgataaacacatcatcgagctttttgcactttttggcttcctggtacacccaccagatcatgggcttgcccaaaatatccgccagcggcttgcccggcatccgcgtgctggcataacgggcgggaataacgccgataagtttcatatagtaaccttctttatatcaaaattcagtgtaaaacaggtcattcaaccatttctggggattttgttgaatataaagccagatttcctcatagtcaaagtggttgcgaataatatggtcgtggtaggatttttgccatacggggaaccctgctgcgcgagacaccccggacttatattgcccaattatggttggcagtgtagggaacggtctcgaccgttccgaaagctcgttacagccgattgctaaaatgcagtggatgtggtttggcataatgacataagcatccagcgcagtggaagtgaaatgcacaggaacttccaacagcattttctcggcagtctttccaagtgaggataattccatggcggcggaacggtcaagaccgttccctacaatctgcccaaacagacgggcgcgatttttggtgcagatggtcacaaagtaatacttcgcggaagaataatcgaaactttgcagccgcagatttttacgttgtttcagctccatggaatcacctgaacaggtattttcaaggggagacgttacccctgcaccaacttttctgcctcttccagccccacaaacaccttttcttccgcggcggtaaagccgcgcaggacccagctttgcacggtgacggcgcgctggaatttgaagggcaggcagaaattgagaacttcgcttggcatggtgcggggcaggataacagcagtagggaacagcttggaataatccgtggtatcccgcgggtgggttttgataaacagcggttctgtgcagtatttcttggcaacagccgcaaacatggcgtcctgggtgggctgatccatcaggccgtccagcacaaagctgcggggcaaaagcaggcaggcaccctgcacatgctccggcaggggaacggccaaaaacacccggcggatgatggctttttcttcctccatcaggctttccagcagctgcgctttggataccgttaccagcttgtctacgccaaaaatgctgcaccgcgcggcgtcttcgctttccaccgtgcggcagcaggggctgtcgccccagtagcggtaggggccgcgggggttggtgcgctgctcgtccagcaggtgctggtcagggtccaacgtgccgccaaaggtatcttcgcacagggtataaacccggcgctcccgctgcaggtagcgccctaaagcgctccagtcattgctgatgtacacatgccccttgggcagcgtaaaatacggcttgcggaacgggtggcgcaggcggtaaaagtcgctttcgctgttctgtgcgtccagcttttcctcgtccacgatcaaaacagcgtcccacagatccggcgcggcgtccagcaatttagcgcgcagggtttcggcttccggcacacaggtgctcagcacaagggtggacttgccggggcggctgcgcagcgcgcgcaccagcgcgattaacacatgatacagcgtgtggcagatgaaaatatcacccatcgtatccattctccaacactttgaccggcgggaagtggatgcggccccagcccggtgcccattccggcatggtcaaatcgccggaggttacctcaaacgcaaactcggtcactggcttgtccaggcagacagcctgggtcaacacgccgtcaaacacatccacatagaagaaatactggccttcgcccagcaggctggggtcaaactcaaactcggtggtatacagcttgccgggcacggcggcgcccaggttgaccgggtgggtaatgcccacgggggtcgaatcccggaaatgcaggttcagctttaagtgtaccccggcaaacggctccgaaacacgccaggtaatgcgcacccgaattttttcggtgtccgcaaacacactggattccttgcccacaaagtccagcgtttccagccgcatccgcttgcctgcgctggcgttcatgcgggaaacatccagcaggtcatagtggaccacgttcacatcggtggtttccatatacacggcaatggcctgttctacatcgccgtcaaagatcacgcggccctggtccagcaccacgcagcgggtgcacagttggcggatggtgctcatgttgtggctgacgtacaggacggtgcggccctcctgcccggcaacatcgctcattttgcccaggcatttctgctggaacttcatatcgcccacggccagtacttcgtccattaccatgatctcgctgtccaggtgggcggcaacggcaaacgccagcttgacgaacatgccgctggaataccgcttgacgggggtatcaataaaatctccgcactccgaaaattcaatgatctggtcaatcttggaatcgacctcggcgcgggtcatgcccagaatagcgccgttcatgtagatgttctcgcggccggtcatctcgttgttaaagccggtgcccacttccagcatggaagccacccgcccgcgcagccggatctcgccctcggtgggggcggtaatgcgggacaaaattttgagcagggtggatttgcctgcgccgttgcggccgataatgcccagcgcttcgcctttgtacacggtcaggtccacgccgttcagcgccataaaggttttgccaaacaggcgggcgtccgtgccaatcacggtgttggggtcctctttgccgcgcacacgagcccaccagctttgcaggtcatgcgtcaaagtgccgccgccaatctggcccagtttgtattgctttttcaagcccgatacctgaatgacgggtacgcgctggttttgtgcatgtgtctggttttccatctgcgcccctccttacacggtatccataaaggttttttcaatgcggctgaacagcaccacgcccagcacaagggcggctgcggtaacaatcaggctgtagatcaggctgcccacttccacggtgccggtgccaagggtgcccatgcggaacacctcgatcggtgcagtcatcgggttcaagcgcatcagcatctgcagccggggggattcctccaagctggaaaggggatagaccacaggagaaatgtacatccacagctgcacgccaaagctcacagcaatggcaaggtcacggtacttggtggtcagggcggaaacgataatgcccacgcccaggcccagcagcatgacttccagcaccaccagcggcacggcaaacgcccaggccgtcaggtgtacaccggacccggtcacggcaaagtagacccagaacagaatgtacatgacaaactggataaagaagttgatcaggctggtcaatacctggctgatgggggtggtaagccgtgggaaatacaccttgccgaacacctggctgttggccacaaaggtgttggccgtgccgttgatgcaggaggcaaaaaaggtccacaccgtattgccggccatgtagaacaaaaagctcggcgtaccgtccgtagaaagcccggcaatgccgccgaacaccacgttgaacagcactgtggtgataagcgggttcaggatgatccacagcggccccaggatggtctgcttgtacatgacggtaaagttgcgcttgacgaacatgacaatcaggtcacggtagcgccacagctcttccaggtccacatcaaaccagccggtgcgcggccgaatgatggtggtccattgcgtgttatccccggcaggggtctggttgcgttgctctgccataaaaagccctttcaaaaatagatatttcaggggaatccccgatacatacttatagacaattcattgtaccataatccgcggtaaaaaacaatgtttgcactgtggcagaaagcgctgccaaaacaaaaaccgccctgcaggcccggaacaggggatgcagaacggttcaaaaagtttattttgcggtcagcctgcgccagccggtgcgcagcaatgtccagcagccaagcagcagcagggaaagcaggatgtcccacccgatgcggcagggcagcgtgaacagaaggtggtctttttgccagatggcactggtaaacacatccatatggtgcacaaagaacagccacaggctgtgccgccccaaaaagctgagcgccggccgcaaagcgttattggcgttcagttcacggcacagatggcagaagatccagatgccgcatacactgatggaagcgcacaaaatgtaattggagtatgtgcgggaagcaagttcaatataaatgccctgctggcagcaccatgtccaggggatcagcatggcaaggaaaagcgggacccggtaacggtccaacagtgcctgatgctggcggaacagctgccccaatgtgaggtacatgacaacgaccattgcaacatccagacattggggaagatactgtacctgcccgatgtatgccccgaacagcatgacaatgaaactgacggcaaaatcccctttggggaacaaaagccccagcagctcccagatcagcttgccccagaacagtgcaaacaaaaaccatggcatgccgcagctgggaatgccgtcggcagggttaccgctggcccagaacagggtgatggcattgtagtgggcaatatcccacaggttggtcaggcttctgtcatcagaaaggaaaaagttcagcaaaacgttgaacacctgtaccacacccagcacgggaacgatcagtgcagcaaagtcttttttgacccggcgggcaaagccctgccaggtatccgggcggcgggctgtataaccggtcagaaagaaaaaggccggcatgtggaacgaaaaaatgaaattgcgcatcaggttgccgtagggcagggtgtgccccacaataaccaggatcatgcacaggcccttggccgtgtcgatccagtcaatgcgctggcgcacggcagggcgggaagctgttgcggcgggttgttgaacagcagtcat

SEQ ID NO: 796 - DNA, 24205 bp, unidentified
  source 1..24205: mol_type = unassigned DNA
agggtaagaacatttaggaggtactattaacatggctgttagagttgctatcaatggttttggtcgtattggccgtctggctttccgtcagatgtttgatgctgagggttacgaggtcgtcgctatcaacgacctgaccagccccaagatgctggctcacctgctgaagtacgataccgctcagggttccttctgcggcaagatcggtgagggcaagcacaccgtcgaggctaccgaggactccatcatcgtcgacggcaaggagatcaagatctacgctgttaaggacgcaaaggacgctccctggggcgaactgaacgttgatgtcgttctggagtgcaccggcttctacaccagcaaggagaagagcatggctcacatccaggctggcgccaagaaggtcgtcatctctgctcccgcaggcaacgacctgaagaccattgtctactccgtcaacgagaagaccctgaccgctgaggatcaggtcatctccgctgcttcctgcaccaccaactgcctggctcccatggccgacaccctgaacaagacctaccccatcgtctccggcatcatgaccaccgttcatgcttacaccggcgaccagatgatcctggatggtcctcagcgcaagggcgacctgcgccgtgctcgtgctggcgcacagaacatcgtccccaacagcaccggtgctgctaaggccatcggcctggtcatccccgagctgaacggcaagctgatcggctctgctcagcgtgtgcctgttcccaccggctctaccaccattctggttgctgtcgtcaagggcaaggacgtcaccaaggagtccatcaatgctgctatgaaggctgctacctctgagtccttcggctacaacgaggatcagatcgtttcttccgatgtcatcggcatgcgttacggctctctgttcgacgctacccagaccatggtcgctaagatcgacgacgacacctatcaggttcaggtcgtgtcttggtacgacaacgagaactcctacacctctcagatggtccgtaccattaagtacttcgctgagaactgctaatgacgttcttgcgttaaaaagtgcctgaattgtctaccggagtttgtcttgctcaactacgaacaagcttgatttggtacgataagcttatctagcaatttttcaccctttcttttgtggtccgccatgaaggaaagggtgttttttttatgtgtttgaaagatctccgcgatgaatttatctacgattgtgaatgccgccatctggctaaaggatctctgcgcaattataaggctgcgacccgttttttgctggaataattgttcttgacgttcggatggatgccttccccaacaaagaggcggttcaggtagcagcccaaaaagaagggaaaagtgtgaccgaatacatcatggaggcggtacgccttcgaatggagcaggaaaatgccgcatcaggcactccggggatggttaaaaatctgaaaggggacactgacccggtagaatgagatcgttgtcccatctccccagaccgaattaaatcataagtagtagaaggcctctgtctttcacagaaatgtgatcggcaggggtctttttgcgttaagaaaatgatgctcgaaaaacaaaaaaagtatcccccatatggaaaatgaaagatcgtggctaaaatcgagcgttattccatcagatttagcacttttctgccctttatagacccctgatgggagaatatccggttcatctcccggcgctttcgggtcaggttagaatgcacatagtgctgtaaggtaatgttagcgttagcgtgtcctagcaactcgctaagggtctttacatcgcaccctgcctgcaaacaggtcgttgcaaaagtatggcgcagtgtgtgcggacgcacttgccggacaatcgcctgtttcagatataccttgatgcttttccggtagcagcggggttctgtgggtttggattcattaccagatagaaaccatgtagaattactggcatttccgcgcagctttttcagcatcagcaataaacatttcgggattggaatttcccggcgggaggtgcgggttttgggcgtttggatgaccaccttcgtgtgaccatctccgcaggaaattcggcagaccgtccggttaattttcagcgttccgagtttcaggtcgaaatcgccccattgtaagccgcagatctcgccaatacgcagacccaattccagccctaataataagccgattttgcggggcgtggggttctcctgtacataatgataaagccgttgctgctccaccggagagagcggcgcagaaattttgtcgatggcttttggcagcgctacttccagctccatcggacgaatcaggcgtaaatgtgcggcgtacttgcagatacgtcgcagcattgagaggcattcccgggcagaggagtttcccagtggcgtgtgtgcggcatccgtaggcacgatgatctgctgcatggcctgttccagaaagctttcctcaagggaggcgaccggcgctttgctcaaaaccggaagaagatacttgtgcagtgtgtacgaataatgcgcataggtggattcttttatgctgttccgcagggaatacagccacacctcggccagtgcttcaaaggtcaggtcggttcttttcagcttgtagaaaccagcctctgctttcttctggatcaacacgcgtttgacctctgcatagaccgttccgtagacgtagccccactggattttgccttccgatgtacgcgctttgatatagcggccttcccaccggccatccttgcgtttgcgtatattttctccccgtcgtgccatttttgtttcctcctgcgtcttggacacccatctgaccacttattttgttcacatgcgttttcatctggatttttcatgcgaaactgggcattgtgcaaaaaacttccacttttacgaagctttttcgaaggccatgtgggatacatttatataattttctattgaatcccagatataaccatgataaaataataagagaattcaaacaacgatgtcgaaagatcggtatcctccattttccatgttgaggatacccctttatcgcgggaaggggtgagcagagtggcattgcgtctgtttgagcacaacgaaaaagcgtatcgtgcggcgatccggatgatggagcaatacggcaaggctgcgattgtccacccgaccggcaccggaaagagctatattgcgttcaagctgatcgaggacaacccggagaaggtcgtgatctggctttctcccagtgagtatatctttaagacccagctagagagcctgaaaaggaacgacccggagtttccgttggaaaatgttcacttttacacctacgccaaactgatgtgctgtacgcaggcgcagctgggcgaaatagcagcgcagaagcccgcctatattatactcgatgaattccaccgtgccggtgcggaatgctggggcgaaagcacggtggctctattaaagttatgcccggacgcaaaacttcttgggctgacggcgacaaacatccgatatttggataataaccgcgacatggccgaagagctttttgacaaccgtgttgcgagcaacatgacccttggcgaagcagtcgtcaggggcattttgcctgcgccaaaatacgtgacgaccgtttatcagtaccagaaagcgcttgcaaagtatcaggcacgagtggacaacctgcggacacagggcattcaggatgtgaaccagaaatatctggatgcgttgcgccgcgcactggagcaggcagacggcttggacagggtctttgcccatcatattacaaacaaatctggaaaatacatcgtgttctgcgccaacaaagagcacatggacgagatggtatcccacgtgccggagtggttcgcaggggtcaatccagatgttgtggtgtacgaagcctactcggatgacccgaacaccgataaggcctttgtggacttcaaaacggacaccagcaaccggctgaagctgctgttctgcatcgacatgctcaacgagggcgttcatgtggagggaatttccggggtcatcctgtttaggcccacgatttcgcccattatctacaagcagcagatcggacgcgccctgaccgctggtgataatacgacaccacttattctagatgtggtcaacaatttcgaaggcttgaccagtatttcaggtctgcaaagcgagatgcaggaggccgtccaccgtctgtatgccaacggcgagggtgacaagatcgtcaccgagcgcttcgaggtcatcgagcaggtgcatgactgccgggtgctgtttgaacggctgcaggaaagcctttcttccagttgggagcactacttttctgaggcaagcatctactatgcggaacacggcgacttaaaagtgccgaagcagtataagacacctgctggcctgagccttggggtgtggctcgtcacacagcgcggggtgcgcgaagggagagtctccggaaatctgacggaacagcagatcgcgcggctggacagcattggtatggcctggggaaatcagaaagagagcgcgtggcagcgtggctttgagaaggcgaaaaaatatcatgatacctatgggaatctgatggtagctggaaagtatgtggacccggacggctaccctctgggtaagtggctcatcaaaacacggcagcagaagctgaatggcaatttgaaggaggaacgcattgcgcagcttgatgagatcggtatggtgtggagtgtttttgatgccaagtgggaaaaagcttatgcgctggctgcggcctactatgaggaaaacggcaacctgaatatcccgcgttcgtatgtgacagcggctggtgaacggctggggcaatgggtcgcaagtcagcaatgggcgtacccgaaaggaaagctgacggacgagcaggtcgaacggctcaacagaatagggatgtactggggcaaccgcaatgatcgccagtggaacgaaggctatcaagaggcaaagtgctactttgaagcccacggtgatctgaacgtcccggcagaatatgtgtcgccgagcggatataacctcggaaattgggtcaagcggcagcgatacacgcggctgaaccccgataaagggtgtggtgtgctgacaccggaacgcatcgcacggctgaatgctattgggatgcagtgggacaagcctgacccgtggcagcaccggtataaactggcgcagaaatataagaaggctcatggaaatctgaaaatcccggccaagtacaaaactgcggatggcatctggttgagccggtgggtatatgaccaaaaacggctgctgcgagataactctcccaaattaagtgcggaccagaaacaattactggaagaattgtttgatggggcggtaatggaaaaggaacccgtagcaaaggctgggtaagaatgcgcgcagcggggatcgtgcgagaaaatacaaagtgtgaagaggtaaaaatgagtacagaagtaattggaattgaaaagccggtcgtcatcgaccgaaagcagaatctgcgggaacatcggttatattgggtcggacgccggacgcaggatgtggtcttatcggcactggcgctggtggtgttgtcgccggtgatgctggcaacagctatcgctatcgtggtagatgacccttctgccgggcctattttttcgcaggaacgcattggacgagatggcaaaccgttcaggttctacaagtttcgttccatgtgtccgaatgcggaagcaaaactggacgaccttctggaccagaacgaaatggatggtccggtgttcaaaatcaaggaagacccgcgcattacccgtgtgggcaagtttatccgcaagaccagcatcgatgagctgccgcagctgtggaatatcctgaagggcgatatgagcatagttgggccccgcccggcacttccccgcgaggtcgagcagtacggcgactacgaaaagcagcgtttgtatgtgacgccaggcctgagctgctattggcagatcgcgccgcaccgcaacgacctctcttttgaggagtggatggatttggatgtgaagtatgtcaaggagcgcagcttctgggtggattggaagatcatttttaagaccttcaaggtgtgcttgctggggcatggagaataaaaagacaggcctgcgtatggattgtggctgcaatctgtatacaggcttgttgtcgtacggctcattatgagatttacatacattgttgatgaaaaggtttcaggaagatatgggattatgaaaaagactataaagttgcagccgcaggtaccggggctagagatataatacgcggctgtcataatagggacaagggtacggcagagaatgaaaggctccgcaacccgaagttcatattttcttacccgaagaatgaacgactgatctttttgggtggcagcaatgccatccagaaagaaatctcgaccatgagggtggggtgacagccagcggacaggtgtacgagcctatccgctctttgtgttggccgagatattgatgaagaaattgagtgggattgtgggaaagatttatgagtaagaaacttgcgattgcgatgttcggacagaagcgattatcaagagagggcggagtggaaatcgttgtcaaagagctctgcacccgaatggcacagaatggctgtgacgtgacctgctacaacagagcaggccatcatgtgagtggtgcagagtacgatgatgtcacgatggagtatgaaggtgttcgccagaaaacggttcctacaatcaacagaagaggactcgcggcggtaagttctttattcttcgcggctctttacagtgcgtttggaaaatacgatgtggtacatattcatgctgagggaccagcttttttctgctggcttccgaagatgctcggtaaaagagttgtagttacgattcatggtcttgactggaaatgcagaaagtggaagacagaaagaaagctttaaaatctgttagttaaagcgcaaggggtatgaatgcggcatatcgaaaaataaagaggagtatttggaagatgaaaaagaaaaaaatcaaaatactacatgtggcgcaagctgcaggtggtgtggatcgctatatccgaatgcttctcaaatatttggataaagaaaagtttgagaacatactggtttgttcgcaagatttccgagagaaagattacaagaacttggttgatttttttgagcaagtgaagatggatagagctattggaagtaacgatttaaaagcaattggagaagttagaagactgataaagagatataatcctgatattgtttatgcccattccagtaaggcaggagcaattgctcgcgttgcagatattggcctcaaaaatcactgtctatataacccgcatgggtgggcatttaacatgcgatgctctgcaaagaaagaagcaatgtacacagctattgagaaaatagctgcaccgttttgtgataaaatcatttgcatttcagatgcagaaaaacagtctgcactggataaaaaaatctgcagagaagataagttgcaggtcatttttaatggagtagatattgaagcctatgaaaatgggattcacggcacagttaagagaaaagacctgaatataccagaagacgcgtttgttgttggtatggttggaagaataagtccgcagaaagcgccagatatttttattaagatggcaaagcatgtgaaagataaagtttcaaatgcacactttattattgttggaaacggagatcaggaagctgaaattcaaaagtatgcaaaggataataactttttggatagtctacacattacgggctgggttgataatccgatgagttatgtagagctttttgatgttgcatgcttactgagccgttgggagggttttggtttggttttacctgagtacatgatggcaagaaaaccgattgtagcgagtagagtagatgctattccaaatattatttgtgatggagaaaatggtttgcttgtagagatggatgacgtggttggagcaagtacagcagtcctaaaattatatttgaacaataacttgaagagtaaattgatagatgaaggtttaaaaacagtctataaaaaatttgacgttcaaagaatgacaagagaaacagaaaaattgtttgaggaagtgacaaggtgataggttcggttgtggttttatataatcctacagaggatgaaataaaaaatataaattcatacatcccaaatgttgatcgtgcggttattgttgacaattcggtacagaacaatgaaaaaattgtggaattgcttattaacgataaaagcaagatacagtatttttctaaacaggaaaacatgggcttatgtaaggcattgaacattggtataaaactcttagaagagagtgggtgtgattgggcattattgtttgatgcggatagcaaacttgggtctgatattgtgacagaatataaaaaggcaatagaggattataaaggaaaacaagtagcattgtttacgcctgtccatgtgtttgatcggtcgaatgccgtcccatatagtggatataaaaatgttgattggtctatgacatcgggctggctaattaatatagagatattcgaaaagcagaatggattttttgaagagctttttgtcgatggattggatatggattattgctttaaatctcatgaaaatgggtatttagtgattgaatgtggaaaagcggttataaatcaccatccggctgaaacaagaaactgtctcggatttaaatatggcattgcttcgccgtatcggtattatatgcaggcaaggcagttgatttggtgctggaaaagatataaaaaaacgaggattttttttgtgtatctatataaatgggctaaagtgctgttgttgtttgatcataaaatagattacataaaaagtatggcaaaaggaacaagtgatggagttttattgctaaggaaggaacaatataatgcagagtaaaaataatccactgattactgttattatcccgatttataaagttgaggcatatctagatgaatgcgtgcaaagtattttgaagcagacatattcaaatttggaaatcatactggtggatgatggatcaccagatcgatgcggcgaaatgtgtgagatatatgctgaaaaagatgctcgtgttaaagtgattcaccaaaaaaacaagggactctccggcgcaagaaattcggcgattgatattgcaacaggtgaatacattacgttcgtagatagcgatgattatctgaaagaggatatgattgaagcactccacaatgaaattatacagtatggagcagaaatggcagtaactgtattagagagcttttttgaagatggaacaaaatcaatgaatccgcatggtggaaaaatttttgtatataccaaagaaaaagcattggattgctttttattcaatgattatctgacaccgtgtgtatgcggaaaattatatagtatctcgctttggaaatctgttcggttcccagagggaaagctgtttgaagatcaatttacgacatataagctgattgatcaatgcaaaaaaatagtatttgatacaactccaagatattattatagaaaacgagttgggtcaatcggacatagttctttttctaaacgaacgtatgatttgaatgacgcaatccatgaggaatatgattatatacattcaaaatacggtgaaaaagttcccaatatagcaactgccagaattacatgggaagttgtttttatcaatatgatgattgttgctggatatgaagatattagcacaaggaaagaagttcagaagtttgcaaaaaagaacatgggaaagatttggaactgtgaatatatatctaaagtgagaaaaattcaacttagtttatttgcatggtctttcccggtgtacgttcttttttaccatatatataaaaagaaacatcctgttgcttgaggaggtgatgactgacctatggtggtatacatacctatgattgctgcaacgacattattaatatggttagctaagcatgtgaaaaggaatcaacgcatagttgttttgattatggcaattgcgattcctgtaactgttgcaacgctacgatacaacaatggcgctgattatttgatgtatcttagaatgatgaagttggcagaacagactggtagttcggctacagcatttactaagattaaaagtattgaaagtggatattggcttttactaaaattgtgtggggaaatatggcccggacaattttttatgacatatggtgtgattgcgattatcatatgtggcttttgttatattgctatatggcagcaatctccaaatccagctctatcagtttatttgttttttgtgtcgggaatttatttcgattcgttcaatggattaaggcagtatatagctgtcgcaataacagtatttgcatataaatatatacaaaatggagaactaaaaaagtatttggttgcagttataattgcatcgctgtttcattattcggctttacttgtaatacccgcttattttatcagatacataaaaattgatttaaaaaaagcatgtataattgttgttgggtgcttggcaggaggaacaatcatatttaatcttgtatctactcttttgagttttactagatataaatatttcttgacttctgttgaatatgaggcgcaagcgacaacatccacgattttgtttacaacggtggtttcgctaatttcttatgggtacattgcgtataagaaaaagaatgtatctgaacgatttcaacagatgatgagttttcagattttaccatggtgtacagctgttttatcaataacaataccgcttgcttggcgtgtgcagtattacttcatgttttttgaagttatctatattccggcatttttattaaatgtagagaataaaaaaacaagactggtatttgccactgtattcgtgacaatgtatacagcaataactatttggggaatgactcaaaatgactggtatatggcattaccatataattactattttaattatatgtaatttttgaatggagaataatatgattcctaaagttgttcattactgctggtttggaggtaatcaactcccggatgatgcaaaaaagtgtatagagtcatggagaaagttcttccctgaatacgaaattaaagaatggaatgagcgtaatttcgatgttaattgctgtgactatgtgaaagaagcatatgcagcccaaaagtgggcttttgtaagtgattatgcaagattctggattttgtatcatgagggtgggctgtattttgatacagatgttgaggtaatcaaagacatgagcgacattattgcgaagggcgcatttatgggctgtgaaacagacaataaatgcgcccccggcctcggcctgggtgcaaaccccggcctcggcctatataaagaaattttggactactatgagaaaatccatttttttattgaaggaaatactacagaaacggttgtgacccatacaagcaaaattctgaaaagccatggctgggtcggaaacggagaaattgaacagatagaaggtgttacaatttatccgccggaatatttctgcccaatggattacaaaacaggaaaacttgatattacacccaatacccggtcaatacactggtatacggcaagctggcaatcttcatacagtaaggcaaaaacaaaattacaacagttgcttggaccttctttgacgtctgagataattgatttaaagaagaaattcaagagttttatacatggaaagtgaaaatgtatggagaacgaagtaaagaaaattattgggacagtaggaaaacttttgccgatgcagacaaagatgtcaccgagtgcggcacgtgaaatcttacaaaactacagtcctaaaccaattggcacatgtcgggcaaacaataaagtggcgattgactacgatttacagattatagtcccctgctataatgttgaaaagtacatccggcaatgtcttgattcaatattgaagcaaagaaccaactatcgtgtgctcattagcattgtaaacgatggttcaacagacggaacagcagatattttgcagcagctgctttgggaagccaatactgagaaaatgatggggggggggtacactgttgagttaatcgcgcaggaaaacaaaggcttttccggtgcacgcaatacagcacttcaggtactcaagggaatgtacattgcatttttggattcggatgacgttcttacagacggtgcagtacaaaaaatgttggatgcggcatttgggtgtaatgcagaaatcctgcagggaagctggtacacattcagcggggaagaaacagaaaaccatatcatacccaaagaaggtgtgcttaacgataatcaaggtgtcttttcaggttatccatggggaaaactatacaaatataacgttatggagcattttcaatttcctgaggggttctggtttgaagatacaccactgtcgtttatgattgcagcaatgccttaccgctgtgcagcgataaaggacatcgtatacggttatcgattcaatccgcaaggtattacagcaaccgctagaaagaaaaaaagagctgttgaaagctactggattacagaggcctgcctagaggaatttccgattttcagcctttcatatgatcaacgtgcatatgaatatctactccgccagagtctccaaaacgaaggacgcacaagacatcagccataccgtattagaaaagcacagtttgttttaactgcagaactgatggagaggtactttgcagggtttaagacgagaaaacctgcgatggagtgggttgaggaagcattaaggaaaagacagttcgtaagatttgatttgggaacactgggaatataagggaaaaggaaggaaaacgatgaatgaacaaatataagtatctttttaaaaacataggtcttttgacgttaagcagctttgcaaccaagttgcttagctttttccttgtaccgttatatacaaacatacttacgaccacagaatatggtacttatgatttgttcaatacgacagtaggagtgctgctgcctatcctaacactaaatgtgcaggatgctgttatgcgttttgcaatggatagcaaaagcaaccgcaaggcaattatatctgttgcaatgaaaatactgcttgtggctaatacagttgtagcagtggggcttatcgtaaatgctgcttttgggataagctcgttagtaaaagactattccatattctttttcctcatgttttttatgcagtcattatctggtgtggttacatattatataaggggaattgacaaaatcgcagatttatcagtttccagtgtgcttgtatcggcatttacgattggctgtaatatcgtttttctggcggtatttcattggggactaactggctattttttggctaatattatcggccctttggtacagtccttgtatctgattgctcgatcgaggttaattcatgacacggatttaagagcggacttttcggaagaaaaaagggcaatgctggattactgcaaaccgatgatagctaattccgtcgcatggtgggtgaataatacatcggatagatatgtggtcatctttttttgcggtttagctgaaaatggtatttattctgtagcctccaagataccttctattttaaatatttttcagtccattttttctcaggcatggactctatcggcagtaaaagactttgatccggaagataaaaatggtttttttgccaacacataccgtgcatataactgtctgatggttctgctttgttcggctattattgtagcagataaaatattagcgcatttcctttatgcaaaagttttttttgtcgcatggaaatatgtgccgtggttgacgattgctattgtttttggctctttatcaggctacattggcggctttttttcggcagtaaaaaactcaaaaatatttgcgcaatccacagttgtgggagcggtaagtaacattgttttgaatctagttatgactccatttatgggagctttgggcgctgccattgcaacagctgtttgctattttgtagtgtgggtgatacggtactggaattcaaaaaaatttataaagctgaaaattaatttaaaaagagacttgataacatatgttctgttggcggcacagtcaatcgtattattgcttgaggatggtattgtactgtatggtgtagaaataggaatgtttttggtgattgtaatattgtatgcgggagatttaatgtcaattgctaaaaaaggaaaacaagcagttcagagataattgttggtgaaaaataatgagaattggaattatcacatggtttacagggcctaattatggaacgaatttacaggcgattgcactacagtattatttaaggaaacagggatatgaggttgaactaataaattgtgaggtagaatcagagtatagtaagaatcgtagaacttttattgagaaaatagaattctttccagaaaaatgtgctcaaaaattggcgtgcagagtcttttttaaaaaggaaaaagcaattcgagatgagaaactggtaaaaacaattcgaaaaaattgtatccttacaagacgatgcgaagctgagaaagatctagttgaagtgtttaattcctttgacttgcttatcagtggaagcgaccaaatatggaatccgaattggtatcaccgcttttattatgctgattacgaaggcgttacgacacgtagaatatcctatgcaccgagtatgggagtgacaaagattctggacgaagttgaaccagagataaaaagaagtgtttcaaagtttgatgcaatctccgttagagaagaaaatgcggtttcactactagaaccatactctaagtataaaccagtcgttgctgttgatccgacattgctgctggattcaaatgactgggcatcaattcttcctcctactggagcagcaccaaagagtgactatgtgcttggattctttattgagggaaattttgaccatctccatgctacgaaaaaatttgcaaagcaaaagaagatgaaatacgtttttgtgccatatagcggtctatcgtattatcaaattggagataggtgtgcggatgcagggcttgaagacttgttggaactgattcgaaatgcacggtatgtaataacagattcttttcatattacagttttttcgattattcatagaaagcagttttattcttttatgagatatagagaaaaccctgttacaagtacgaattctagaatccggaatttattgcacacggcaggattagaaaaccgtggactggaatttggaacaagaaagattaaggagttaccagatattgattatgctccgcatatgaaaatgctccagcaggagattgagaagagtaaagaatttttacaaaaaagcattagaggtgagtatagaggtgaagtgtagtggatgtagtgcgtgtgccactgtgtgcccaaaggagaattgcatcaaaatagaatataatgcagatggatttctaagaccggtaaaggatgacacgatatgcgtacattgtggcttgtgtgagaaagtctgtccgatgaaagctgcacatggctgctttttggatgagtgtgaattatactcggcgtgggcagatgcagaaggacggaaacagtcttctagtggtggcatagcagcagttcttgcggaatacgcagtagcacatggctatgaagtatgtggcgcaattatggattataatacattgagtgtgcggcacaagatttttgaacggggagaagatttgaaacctttgcgagggtcgaagtacctgcagagtaatgttcttccggcattttgtgaagtactgaatagattgaaacaatttccacagaaaaaatttgtggtatttggaacgccatgccagataagtggttttagaaatgttttggaaatttatgggtggcttgatagagtcgttttgattgatattttttgtcatggagtaccttcaaattttttgtggacaaaatatatgaaatgggttacgagaaaaatgaaattgaatgctacagataatattagaagcatactgtttcgagataagtcatattcatggcatgaatattttatgaatattaatggggggggtactgcctatgtagcgagtagggaaaaagacccttttttaaagctgttttcaatgggtgttgtgaatcaggaatcctgttttacctgtccgtttagaaatgaaacatctgcagatattcgattgggtgactattggggtgaacgcttcaaaaacaatgaagatggcgtttctatggttctcattaatggaagcagaggattagcattgctgaatgctgtaagtgataaagttacaataaatagacaggacataacagatcgatttggtcagcagcacacagattatgattatcctaaatactatgagaaatcgctggagttgctgaagaatagcaaatctgagttcaaagacgtaattggtttatatgaatcgaattttgatcgatttaagagaagggtcaaaaagattattaaacgaatgttatgtgcttgaattatctgtaggtgctttattcaataatccagcgaaaaggagattggattatatggaaaaagtatctgcaattgttgcaatttataaatcagaaaaatttttgccgaaactaattgactccattatcaaccaaacttggcagaatcttgaaattctgcttgtagatgatggctcaccagataatagcggtgccatttgtgataattatgcatcgagagatgaccgtatcagagtaattcataagaaaaacggcggcgcatgtgaagccagaaatgttggtcttgcggaggcaactggcgagtatatccttatcattgatggtgatgattggctggaactggattatgtagaatacctgatgaatctgattcattagactggtgcggaaatggccatgacggacaagatatttacaacacgtgatcgggaacagacgaaaaaagatgctgttgaagtatggacaccagaagatgctttctgcggaattatctatcctaagtttccaattggaccttggaacaagatttataaggcatcgcttctcaaagaacatcacatagattttaatagaccttggtctggagaaggactgtacttttcatcaatggcagcacagtgcgcaaataaggttgcagttggacatagaaaaatctataactaccgactcaacaacacaaatagtggactgactcattataatctaaaaatgggaactaatgcgatggagaatattcgctacattggtgaaacaagaatcgttaagacgaaaagaacagaaaatgctgttaattggcatatctggaaaaattacgggtatgtactgtttttgattatcgctacggattctgttaaagaaaatcaggccttatatgatgaatgtatacataatctgagaacaaggctctttggggtgcttgttcactcggaattgggacctagaacaaaagcacatatgcttgtgcagggattgtttcctgtgtggtgggcaaaaagagatttgcgaaataatcaagcagcattagaaaatgataaaatggagtgatagttatgggatttggaattaaaacaaaattaaaaaaattgttccctcagccgataaatacgccaattattataatgccgtcatctggatcagaacttaaggataaagttgtactaatttcaggtggaactggtggtattggtttagaaatagcaagaaattttttactatctggcgcaaaagtgattataacaggaactaatgagcgaaaatttgaaaaaataaaatctgaaatttctaatgataagttgaaatttatagtattggattataaagaaccatcctcatttgaatcaaaacttggtgagataattaatatatgggggcgtttagatatatttgtaagttcaacgggtgttcatgttgatagagatgggcttgatttcgtaaatgtcacgcttgatgagtatgacaccattatgaatattaatttgaaaggtacatactttatgtgccaaacagtagcaaagtacatgattgaaaataaaattaaaggacatattttaataatatcgtctcagtctgcattggaaccatcatggtcaccgtatagattatctaagttaggaattgatggcataacaaaaggaatggcacaacgtctgttggaacacggaatcattgtgaatgcgatagggccgggaccgacaaatacatctatgcagaagaactatagagaaggtaacctatatacaccattgaatccgataaaaagatttacaacaccagaggaaatagctcaaatagcaaagatactagttagtgatttgggaaatacaatagttggtcaaactatatatatgtctgggggaaggggaatcgtggaaattagatgagttgagtctctgaataatagatttttggatagagatgtgcagcaggcaacatctgtggttgcctgagatgtgagataatatgttacaaagcgatttagaaaggaataaaatggctaaatactttgaaacggatggcttccgtggcgaagctgggattacattaacagcagaccatgcctataagattggtcgcttcttaggatggtattacaataccctgcgtcagcacaatggtgataccgaacctgctcgcatcgtgattggcaaggatactcgccgcagctcctatatgttcgagtacagcttggttgctggtttgaccgcctctggtgcggatgcttatctactgcacgttaccactacgccgtctgtggcttacattgctcgcgtggatgactttgactgtggcatcatgatttctgccagccacaatccgtactacgataacggtatcaagctgatcgactgttacggcgagaaaatgccagaagaaactctgctgctggtggaggactacatcgatggcaagctccatgtatttgacaaggactggccggagctgccctttgcccatcgtgagcacatcggctgcactgtggactatgtggcaggccgtaaccgttacatgggctacctgatctctttgggaatttactctttcaaaggagttaaggttggtctggattgcgccaacggtgcaagctggaacatcgctaagtctgtattcgatgctctgggcgcagatacctatgtcatcaacaacaagcccaacggcctgaacatcaacaacaacgctggttctactcacattgagggactacagaagtttgttgtagaaaagggcttggatgttggttttgcctatgacggcgacgcagaccgctgcctctgcgtggatgaaaagggcaatgttgtgactggcgaccatattctgtatatctatggctgctatatgaaagagcgtggcaagctgctgaccaatactgtggtcacgaccgttatgtccaactttggtctgtacaaagcattcgatgaacagggtattggctatgccaagactgctgtgggcgacaagtatgtttacgagtacatggcaaagaacggttgccgtatcggtggggagcagagtggccatatcatcttctccaagtatgcaagtaccggcgatggcattctgaccagcctgaagatgatggaagtcatgctggctaagaaaaagccgatgagcgaattggcggcaccgctgaaaatttatccgcaggtgctggaaaatgtccgtgtgactgataagaaggctgctcagaatgaccctgccgtgcaggaagcagtgaccaaggtggccgaagcactgggagatactggtcgtattctggttcgtgaatccggcacagagcctgtggtgcgtgtgatggtggaagcacctgaccacgacacttgtcagaaatatgtttccaaagttgtcgatgtgattcgtgatagaggatatagcctgtaaattaaaaaagctagctactggagataaacacacatcaggaaaaaattgaaatagcgtaagtgcatataaaacggcaaggttcgattttgaactttgccgtttttctttttgcccaaaattgtgaaattttcaaaactgtattccaaaacagctctgcggattcctattagtgtaggggccttcaaaatcttttgtagaacagctttccgctggttctataagtggaaaatgaacaaaatctatattctaaaattaggcagttcaacaaaatttgaaaatctgtatgccaaacacccattttagattgttataggtagaggggaaccttggaaaaatgaatttttttgaactttcaaaagacccggtttaaaaacaccccttaaagtttgtataaggtataggaagtgttttcaaaagtaagccaattcactacggtatcactgatgaaattccccgattccttacaaagtcacatcgcaccttgaaaatcgcatgagccaccccagcaggatacctccggtactgaatgtgcattctgcgcgtcttaccagaaaaaacgtcggagagaatcgggcaggaacgggctgggacagagtggacggtagttaagagcaagattcgcctttgtatacaaaatcgctcctacgggcgatttctccacgcggcatcttgatggggattgtgctccccataccctcacatcgtgcaaaatcacatgattttgcctgttggtgacctgcagaagcaggccacagccggagtgcagatgcactgccgggaaaatcaaattcttgattttggaaaggagaccccatgccacgaacaaagaaaaaagtgaaatctatcgtaaagacaaaagtaatctccgcacgagtaacagaaacagtacatgaacttttacaccagcaggcagaagatgccggaatgaccctctctcaatttgcagcacagatgctgatgaaaggccgcgtgaatacctcgtatgtgttctatgttcacccggacgagatcgaagcaatcacacgggagtttgccgccatcgggaacaacttgaaccagatcgcggcgttcttcaacagtgggggtcttccatcacatgtcatgtgtgaaaacatcaaccatgcgatttcctgcatttttgaaatgcgggagcaggtcgcagaaatggcaggaaagaactatggcaatcttaaagcacatcgcaagtaagagttccaactatggtgctgtgctggagtacctgattttcaagcatgacgaacttcggaaaactctgatccttgaccaaaacggaaatcgtatcatgcgggatgagtattatctggacggtctgaactgtgaaccctattccttcgatgcggcctgccagcaactgaaccgcgaatatcagaagaacaaaaacaaggatgaaattaaatcgcaccattacatcgtcagctttgatccacgggacagcacagaaaattgtttgacggggaaacgggcacaggagcttggactggaatacgcaaaagcaaattttccggggcatcaggcattggtctgtacgcacatggacggtcacaatggcagcggcaatattcatgtacatatcgtaatcaacagtttgcgaaagctggatgtacctaagcagtcctttatggaacgatccattgactgcaaggcagggtacaagcaccatgtaacaagcgagtatctgaagcatctgcagaaatccctcatggatttgtgcaaccgtgaatttctgcatcaggtcgatttgctgtcgccatccagaacgggcgtgaccgaagcggagtattgggcgcagcggcggctgggtgagaaaaaacgggaaatcgaaaaggaaggatttacacccaatccgacaaagtttcaaacgcagaaacagcttatccgggatgccgttgccgctgcccgtgagaaagcaatctcgtatgaagattttcaaaacatcctgcaggatgaatatgacattttcgtcaaagctcaacgtgggcgttacagctatctgccgccggaacggaacaagtttatatcggaacgttctttagggaacagctgcaaaagagaatgtctggaaggattctttgttcagaacgccgagaagaatctgcggtacaaggaagaccccatactgatctttacgaccagaaccaggctgcggctcgttgtggacctgcaggagaatgtcaaggcacaggaaaatctggcctatgcgctaaaggtcaaaatcagtaatctgcagaaaatggccgaaacgctggtatgggtgcaggaaaacaacatcaacgacctgacggaactgaacgatctgtgtaagacagcgcaggccaatgcgcaggcagcatatgaacggctgtcacaggcggaggatgaactgtacaaaatcaatgaacagattcattatacggggcagtacctttctacaaaggatgttcagcagcaatttacgaaagcaattttcaagaaaaaattccgcgcagagcattccaaggaattggatgcctatgcggaatccgtgaaatactttcgggaagaaaatgatggaaagctgccatcgttgaaatctctgaaaaagcggaaagaaaaactgacgctagaaatcgcagagaggaaaaaggcatatgctcccctgagggaagaatcccggcgtctggaaattgcatcggacaatgtgtacagcatcttccgaaaaaccaatgagatgaaatccgaccttgcatggaaacgcgagtgggaggccaatgtccgtgaaaaggcaaggcaggagcaggctcgacaggaaaagcgcgagcgtcaaccgaaacgcaagaagcgcagctatgatatgagcctgtaatcagcagggtcttccaccccgcaccccggaaccctgccggatgcgtaagcccgtgcagggctttcccatccggcagggacttttgaaaacgattaggaggaagtttgagtaaagagtacatcaaggcacaaaccccactacccgcttatttcccttatccgaaatttctgctgcagatgagcctttcccatacggcacgattgacgtatgttttgctgctggaccgcatgaccctttcgcagaagaacggctgggtggatgtgcagggccgggcatatgtgctctatccgttggcagggctggcggaagatcttcagagcagcatttccagtgtcacccgtgccctgcgggaactggaagccgcacggctgatcgaacggcgatccaatggcttttccaagccaaaccagatatttctcggcgttccccggactgcgcagaaatgcgcaatcgagatggcccaaaatgagcagcctgattgcttaaaagtgagcaatacggttgcgcaaaactgcacacctaaccaaataaataagaacaacctaagattgaaccaactgaatagaactaaagaagcgtatgggcgatatcggaatgtttttctggaagattattcggaactggaaatggaaattgcagagttggatactctgatcgaagacctttcagcctatatgcagtctacaggcaggaagtacgcagaccatgcggcgaccctgcgtagctggtcagcacggaagaaaagacaacagaaaccgggagcaggcatcccggactatacctacaacaaggaggaaagtttatgacggaaacgatccagacagcgatggacaggcttatgacgatctctgtggaaccgcaggactatgttgcagaagatgggctgctgtactgcggcagctgcaaaactcccaaggaagcgttctttccgaatggcaaaaaactgtttgggcgtgaccgacatccggctgaatgccggtgcaggcaggctacaagggaaaagcaagagaaagaagaacgtgcaaggctgcattacgagaaagtgcagcggttgaagctgcagggctttaccgactgggcgatgcagcactggacatttgcaaacgatcacgggcaaaatccacagatgcagctggcacagcggtatgtggcccactggccggaaatgcgggaaaagaatgtggggctgctgctctggggcggtgttggtacaggcaagagttttatggcgggctgcattgccaatgccctgatggaacaggaagtgaccgtctgcatgacgaattttgcccgaatcatgaatgaactgaataacgccttttc

SEQ ID NO: 797 - DNA, 9140 bp, unidentified
  source 1..9140: mol_type = unassigned DNA
aaaagtatcctgaggggttttcctttgaaagactatattgaagaacgagctattgggatagccaactatatcatcgaccacaacgccacagtgcggcagacagcgaaggcgttcggcatctcgaaaagcacagtacatgcggtagtaacaatatggaacgacatgaaagcaaaatcatatggaaaattgaatagaactgaaacaagggcactctcgggtagatatcagggagtgcttttgctataatgaaatcaggtaaccttgagtattggtgaggggagatgcaaaatgacaggaatatatgattgctttggttatggctctggctatgatgtctcttttgaagaaaggtacaaattgattagaaaatcgggatttgattgtgtaatgttgtggtggagcaatcagtttggcagaggagacggttatcaagaggatgtaagattagccagaagagctggtttatttgtagaaaatatccatgcgcctgtgcatgagcagaataatctgtcactggacaatttgagtggtgaaggcgtatttcaaagttatctacaatgtgtagcggattgctgtgaatatgatataccgaccatggtgatacatttgccaaatgataataatcctttaaatcaaacaggaatcagacggttggcagaacttataaacaaggcagaacaaaagaatattcagattgcttttgagaatttaagtaacattaaaaatttgaaaatagttttaaataaattcacttcaaataatgcaggctattgttatgatagttgtcatcatataaattatgcaccggatgaagatttgttgggagtgtatggaaaccggctgatggcaattcatttacaggataacggcggtagccataatcaacatcaattaccattcgacggcaatattaattgggatacagttatggagaaaattgcctgtacaggataccggggagctacaactttagaaccaatgaattgggattattctcatttagatatttgtcagtttttggaattggcttatgaaagggcaaaaaggcttgattacttgcgaaaataatgtaggtgatgaaaggatggaaacagacggggagtttaatcagatttctgattgattctgagggtttgggagatacgcccaacaagcaaaaatgcattttgtgtgtacaaatgcactgcttgccaagttgtgaatatagaattgattgtaaactggaatttagaaaaaacaaggcagagaagaggatgttgatcataaaaatgtatgcgcattagaattgagacgcttgaaaaggtttagtaacataaaatcttttcaagcgttttctttcacttttacggctttgaatggaatatgatgtagtcaggatcggtgtaatttttgaaaaagtatggtggaaatggacaaaagtccagtattttgggaacgtaatttgatttcaagtggattatgcttagattaaataaaaggtctggtctaatctaagaatccttctcatagtatgggagagaaggacaggcgaggtaagggggtgtagctttcgcttgaaacggacgaaattaaattatcgttttcataatccaaattcagcggaagatactgcagatttcctgtgcaaactcttaatagaagtaaatgccgggaaggtagagagggcaatagagaaaactgcattgtatgcagagagtggggattacatattagaaaatttatcggaaaacaaggaaaaattatttgtggggtaagaggagcaaggtgagagccttgctttttgctttgatatctaaaagaaatgaataatcaacacttaaatgagaaaaaaacacgtttaagtgttgattattttgaaaaaatgcatataataaaaaatagaaaagaagatgaggtagcaattatgttgatacaatttaattttaaaaattttagatcttttagagaagaagtaactttggatttgtctgccactaagatgacagaattttctgaaagagttgtgaccatcggaagtgaaaagatactgccgattgctgctatttatggagcaaacgcaagtggcaagtcaaatatatacagtgcatttgagtatatggctgagtatgtagtggattctttcaagtacggagatgaggaagagaagtttgaggagtatagacctactccgtttttgtttgattccacgtcagcagatgcagagtccagttttgaggtctattttactattccaggagataagaacgagaagacatataattatggattttgcgttgatcaggaaggtgtaacagaggaatggctgaattctaaggctaagacagccagaaagtacagtacagtattttatcgtggaaattctgacagtgaattagatttatcaggcttgccaaagaacagcagggataatataaagattgcgctggaaaagcaggtgttgattgcttctttaggagctaagttaaaaattagcaaatgtaaggcaatcagagactggttcttgataaatgaatttgcagattttggtgatccggttactaactttttcttatctcatagattgccaagaggctttgtggatgataagaacgttcagcagaaggttgtagaatactttgcatcttttgatgaacacattaaggatttcagagtagaaaaggttccgaatgatggcgagtcaaaggaagataaatataagatcaatgcacttcataagatgattgactctgacaagatggcagaaattcctctgggtgcagagtcggcaggaacattgaagatgtttgctctttatccggaattgcaggaagtattagaaaagggaagtgtattttttattgatgaattaaatgcacgattacatccgcttttggtaagaaactttttgcttacattcttgaacccgaatattaatgttaaccatgcgcaacttgtatttacaacgcatgatacctggcaactttcaaatcagttgctgcgtcgtgatgaaatctggtttgttgagaaggatgatcgaggtgtttcaacattatattctcttgcagattttgtggatgaggatggagcacgtattcgtaaggacgaaagctatgagaaaaattatctgattggtaagtatggtgctattccgaccttaaagagtattgatatgtttaagggtgctcaatgtccgggggacattggttcagcaccgaccgaagtggaacggagagattgagcatggcaaaaggggatagaacagggaacagaaagacaagagagcaaagaataacaatcaaagtaccggaattgggatattacttaatcgttacagacacagaagggacagaacgttgcttttttacaggattacatcaatccttgccggaaaaagttagaaacaaacttgtcattaaagtcgtagaaacaaagacaagaagcatgattgataaatgcctggagctaacagcttatgaggcgcaatatcgtattccttggattgtgtttgacagagatcaggtaataggatttgataaaatcatcgctgaagcagagaaaaaagacatacaagtaggatggtcgaatccatgttttgaaatatggatgtatgcctattttggtgcaatgccggcaattcaagattcatggacatgctgctctgagttcgggcgagtatatgagagcaagacgggacagaagtattccaaggcagatgaaaagatgtatggaaaaatttgccgtgtgggaaatgaggtaaaggcaatacggatagcacagcagaagttggaacagtgtgaacgtgaaggtaaaaagaaaccatcagagatgtgtcctgggacgacggtgtataggttggtaggagagattaaggaaaatgcaaatggataacaaaatacgaaaaaagtcagatatagaaggagtagatgaactttatgaacaccttgccgaaggtatcagtagcatgaaatccggtgaaatatatactatcgaagaagcctggcaggaaattgaccaactataatgaaatcaaccacaatccctatcataacccctcagatactttcatacactgtaaaaaagtattctgaggggttttcctttgaaagactatattgaagaacgagctattgggatagcgggctatatcatcgaccacaacgccacagtgcggcagacagcgaaggcgttcggcatctcgaaaagcacagtacataaggacgtgacggagcggctggtgcaggtgaatccgtcgttggcgaaacaggcgcggaaggtgctggatatcaacaagtctgaacgacatatccggggcggactggctaccagagaaaaatatctccatcagcactagatgttcgggcaggcaatagcttctgtacgggaaattatcttgaaatggctgatgacaccttatataatgaatgcatatcacgtattacatttgtgaggggagaatacgatggcaacagattttttgaatgatgcacggagagagatcgaaggacggacagaagacttttacggggaactgaaagccttctatcagggaaatgcaaaagcagagcagaacctgatggaacagacgacacagcccttttggcagagcctttgcttaagtgggaaaagattacagcagcgggacctgacggtggatatggagatgcaggaaccggtgcggccggcggattacgatggcccgaaaaaggacggctatgattacacctgccaccggaccaaagctgtgaagatgagacgtacctattaccgtaaagggaaaaaaatcgcgaccctgaagacaccggagatcgtggaagccaattttttgaaagcggatgtgcagggggatatggcgatctgcccaaactgcggtcatgaaggaaaattgtccagctatatcgatggctgtgatgcctgtggagcaaagtttctggtcagtgatttcgagacgaaggtatccggcttttcgttggaagaggacgcaaggcagaaaagcatttccaactttatcaaagccggagtgacggtaggaatcgtagtggttgcccttgcactgctggcaatctgtgcgggcggcattatgtttttactgctggctttggggagaaatggttataacgcggtcaaagcggcagcggcaatgatgcttggtatcggattcgctccggtgtttttccgttctttgtttttcatggcgatcatattcgtagtaatgattgttgtaatggaggaacatagaaaaccgaaaattcaggacgagtcaaaagtaaaggcactgatcccccaattttccacaggtaatttcctacagaatctggagtaccagctacggatgatccacatggcagataccgcagagcaggtgcgctttttcgcggtctgtgatctgacaggtactgtggagcggtatcagaatgtggtggattgctgtatctgcggcgtacgttttttgaaagcggaagcggtggaggaccggtacaggctgagcgtggaagtgaaaatgcgcctgacgcaggatacgggtagtaaaattcgcaaccgctatgagaaactgcggctggaactggaaggcagacaggagatcgtgacacagcatggcaaggcacttcgggaatataaatgcccgaactgcggtggcagtgtggatatcttaggcggcggagtatgtgactactgtaatgtagcagtggattatcggaatttcggctggatcatcacatcctatacgaatctgggacagccggagaacccctatgccaaaatactggcagcagccctgggcatctacggaattatcctggctttcagcctggtgctcatgatctgttccgaggacggaaaagaaaccctggagatctggcagagcatcggcaggtcatcggaatacctggaagccgtgaagcaggatattgtatatccggatgatgtgctggaaggccttgcggagacggacagtgaggaaagcatatttgcttccgcgaagacctatgcctgcggagacagcgaggcagtaaaagaagcttattacgaagcccttttagagagtggatttatcgagctacagcagtatccggaaggattttctgtatataagatcgaggatccttcagaatatgccgtggatgaagaagaggagatgttctatctggtgatctgtgcagaaaatgcaccggagggaattacagtaactgcgaccttggtggatgaaaattgggacccggtgcaggagtaaaacagaatacgtgaatacgacaagggacccgggcgaaagcttccgggtcctttttagagggaaagtgtttgtagttagcttattgggtgagaggaattctgtggaccaccctgcgatagagcttccacaggagcacagcagggaaactgattgccagatatgctgtggataaaagtccggtagcaccgcctacgattgcaatgattaaaattccaatattcataatgaattcctcaactttctgtcattctgcaaagcattcgatgaagcttttaaaaaacctcacataccgtattatagtaaacagatctccccgggtgaatagttttgccagagccttaacactattttgtcgggttatttacagaatctttgcaacacatttacagaatcttaacgggtggaaacgataccgggagttaggtttgcaatagtagggaatatcaagtataatagaaaaaaattgactgttgctgacaatgacagtttaagaaaatgggaggtagaatatgagtatgacgctggaacaggctaaggagaagcttgcaaagtatggtcaggaacatgttctgaagtattacggggaacttaccgaagaagagaagcgggggattctggatcagatcgaggctacagatatgagcattttggaagcttgtaagcacaaggaggatctggcgaaaaaaggagtgatcactccgcttgctgcaatgcagttagatgagatcgaggcaaacagagagaatttcacggcgaccggtatcgaggcgatccgtcaggggaaggtagcagcggttctgttagcaggcggcatgggtaccagattaggctctgacaatcccaagggaatgtacaatgtgggactgactcatgagctgtatatttttgagtgtctgatcaataatctgctggaagtcgtacatcagtcagatgcatggatccatctgttcgtaatgaccagtgataaaaataacgatgccactatcgcctttttacaggagcatgagtatttcggatacaaggcggagtatgtgcactttttcaagcaggagatggcggcggctaccgattacgagggtaagatttatctggaggagaagggcaagttgtccacctctcccaacggcaacggcggctggttcatttccatgaaaaataacggcatgctggatatcgtacataacgagggaattgaatggctgaatgtatttgccgtggacaacgtcctgcagcgtatcgcggatccctgctttatcggtgctacgatccagagaggctgtgtcgtaggctccaaggtggtccgcaagaatgcgccggatgaaaaagtaggcgttatgtgcttagaggacggcagaccttccatcgtggagtactatgagctgaccgatgaactgatgaacgcgaaggatgagaagggcgaacccgcgtataactacggagttatcctgaattacctcttcaaagtacaggatctggagaagatcatggaagaaaaaatgcccctgcacatcgtagagaaaaagatcccgtatctggatgagaacggagaaccggtgaagccggagactcccaacggctacaaattcgagagcctggtactggatatgatccatcagatggacagctgtctgcccttcgaggtagtcagaagaaaagaattcgcccccatcaagaataaaaccggtgtggattcggtggagagtgcaagagaactgctcgttgagaatggcgttgtgctgtaaacatttcgacagcttttcacaacataaggttattgaggaaacaacagaattacagtaatctgatactgtaagaaacgaagaaataatctcatccggatctgacagatgagagatcgtgcggtcgcagcagtgaacaaatggtattgtccggtatgcggcggataggagagagtatgagaattttggtaacaggtggtgccggattcatcggcagtcataccgtagtggaattacagcaggcaggctatgatgttgttgtattggataatctctgcaatgcaagtgagaaagttatccccagagtagaagccatcaccggcaaaaaggttcctttttataaggcagacattctggatcgtgaagcgctggaggagatctttagtaaggagcagatcgatgcagttattcattttgcaggactgaaggcagtcggcgagtccgtacagaagccctgggaatattacgagaacaatattgcaggtacattgactctggtagatgttatgagaaaacacggtgtgaagagcatcatcttctcttccagcgctaccgtatatggtaatcccgcatttgtccccatcacagaggaatgccccaagggacagtgcaccaacccttacggctggaccaaatccatgctggagcagatcctgaccgatatccagaaggcagatcctgaatggaacgtgatcctgcttcgttacttcaacccgatcggagcacacaagagcggcaccatcggtgagaacccaaatggtatccccaacaacctgatgccttacatcacacaggtggcagttggcaagctgaaagagctgggtgtcttcggtgatgattatgatacccccgacggaaccggcgtgcgtgattacattcacgtagtagacctggcaaagggtcatgtgaaggctctgaagaagatcgaggagaatgcaggactgaagatctacaacctgggaaccggcgtaggctacagcgttctggatattgtgaagaactttgaagcagctaccggtgtgaagattccctatgtgatcaagccccgtcgtgcaggcgatatcgctacctgctattccgatgcttctctggcagagaaggagcttggttggaaagcggagaacggcatcaaggaaatgtgtgaagattcctggagatggcagaagaacaatcccaacggatacgaagaataa

SEQ ID NO: 798 - DNA, 5544 bp, unidentified
  source 1..5544: mol_type = unassigned DNA
  misc_difference 780: note = a, c, g, or t
  misc_difference 781: note = a, c, g, or t
  misc_difference 782: note = a, c, g, or t
  misc_difference 783: note = a, c, g, or t
  misc_difference 784: note = a, c, g, or t
  misc_difference 785: note = a, c, g, or t
  misc_difference 786: note = a, c, g, or t
  misc_difference 787: note = a, c, g, or t
  misc_difference 788: note = a, c, g, or t
  misc_difference 789: note = a, c, g, or t
atgaaaaccatctatcttgtcaccggtgctgccggttttatgggcactaatgtctgcgcacagcttttggagcgcggtgatgccgtgcgcgcttttgtactgaagggcgaccccgctgtaaaatttatgccgaaggccgtcgaaatttttgagggtgacctctgcagtgccgaggactgcgagaaattctttgccgtggaaccgggcacccagaccgtctgcatccactgcgcgagtatggtgacgatcaacccgaattacagtgaaaaactcatcgccgtcaatgtgggcggcaccgaaaatatgctgaatgccgccaaaaatcacccggagtgcaaaaagttcgtctatgtttccagcaccggcgccatccccgagctgcctaagggcgagagcatccatgaggtatacagctttgttccctacgatgatgatcgcgtggtcggctggtacagccgcagcaaggcaatggcgacccagaaggtactggacgccgccgcggacgggctgaatgcctgcgtggtgcatcccagcggtattcttggcccaaacgaccccgccatcgggcagacgacccgcacgctgatccagattttgaacggtgagatgcccatcggtatgcagggctcgttcaaccttgtcgatgtgcgcgatctggccgccggcacgattgccgccgctgaccgtgggcgcaagggagagtgctacatcctttccaatgacgaggtttcgctgaaggagctgtgtgagatgctcaaggctgataccggctggcgcggnnnnnnnnnngccgcggctgcctgttttatctgccgctgtcttttgcgcattttgccgccaagcagatggaggcccgcgccgccaagaccggtaagcctgctgtgctgaccgagtttgccgtttacaatctggagcgcaacaaccattttgactgctccaaagcgaaaaacgagcttggctttgccccgcgtccctacaaggaaacactgcatgatctcgctgtatggctcaagcaggagggaaaaatcgcatgaagaagctgtatgaatctatctgcaagcttatgcaaatgaatgaccagcagtgggagtgctatctccacgcactggattccctgcactgacacaaagaaaagggggtgcctattatgaagaaggtttgtgttatcacaggcagcggcagcggcatggggcttgccacggcgaagctcgtctgtgaagaaggatattacacgattttggtggggcgcacggcgtccaagctggaaaaggcagtcaacgatctgcgcagtgcaggcggcgaggctgaggcgttcagctgtgatgtttccgaccgtgaaagctgctttgcgctggccaaacacgccgccgaatgcggcgaagtaaaagcggtattgcacattgcgggtctcagccctcacatgggcgatgcagagaaaattcttcgcggcaatgcgctgggcacggtgaatatcaacgatgccttttatgaggtcatggcaccgggcggctgtgtgatcgacacctccagcatgagcgcctaccttgccccgcagtttgtcatgcccaagggtgcgtacaagctggcgcgcaccgaccgtgaaaaattcatcaaaaagctggtggcgcgggcaggcattgcccctaaggacgcccgcccgggtctggcctacgccatcagcaagcattttgtaatttggtttgccaagaccgatgccgcacgctttggcgggaaaaatgtgcgctgcttaagcgtgacccccggcaactttgacacgccgatgggcgcactggaaagcgggcaggcggatgtattcaaaaaatactccgccctcaagcgcaacggaaagcctgaagaaatcgccgctttgtttgcgcttcttctggatgagcggctgggctttctgaccggagcagacattcttatggacggcggcgttgtggcaagcggtgccagcggattgagcaaataaaaaagggcagcaaagtaaaccccgattttagcttttggggtctgctttgctgccttttggattttgtgccttcgcttggctgtactttagtgcagctcgctttcgcagcggtccagaacggcggcgataacctgatccatgtcgtaatacttgtactcacccaggcgtccgccgaagatgaccttcggctcggcgtcggccagcttcttgtactcggcatacagtgcgccgtttttagcatcgttgacggggtaatacggctcgtcaccgggcttccactcagaggaatactcgcggctgatgatcgttttgggcaggtcgttgccgttctcgtccttgccgaactcgaaccatttgtgctcgatgatgcgggtccatggcgtctcgcggtccgtatagttgacggcggcgttgccctggaagctgggcttgtcgagcagctcattctcaaaccggacagagcggtactccaacgtgccgagtttgtagtcaaaataagcgtcaatcgggccagtgtagacgattttgtcagccagtgcgtccagcgcggccttgttttcgaggtaatcggtgttcagccgcacctcgatgccgtccagaagattggcgatcatcttggtgtagccgccgatgggaatgccctgatacagtgcgttgaaatagttgttgtcaaaggtcagccgcacgggcaggcgcttgatgataaaagcaggcaggtccttgcagtcgcggccccactgcttttcggtgtagcccttgatgagcttttcataaatatcgcggcccacaagggagatggcctgctcctcaaggttctgcggctcgtgggtgatctcgcggcgctgctcctcaattttggcggctgcctcctccggtgtgacgacgccccacattttattaaaggtatacatgttgaagggcagcgaatacagctcacccttatagttggcaacgggagagttcgtaaagcggttgaactcggcaaaccgggtgatatagttccagacctttttgttgttggtgtggaagatgtgcgcaccatacttatggacgttgataccctcgatgttctcggtataaatgttgcccgcaatgttggggcgcttatccacgaccagcacggattttccgtggaccttggcctcatgggcgaagatggcaccgtacagaccggagccgactaccagataatcatatttcatataacaggtgttcctctctttaaaaatcacagggatattgtgcggtaatggcattgagagccttactccaccgtcaaaaagcggcagaaaggcatttcagtctctgccgaatagatctcttgtgtagaccttgtcctgcacatcgttgaggcaggcatcgtagcggttggccagaatggcctgactctgccgcttgaatttgtccagatcgttgaccactgccgaaccgaagaaggtcttgccgtcctccagcgtaggctcatagatgatgacctgtgcgcccttggccttgatgcgcttcatgacaccctgaatcgagctttggcggaagttgtcgctgttgctcttcatcgtcaggcggtagacgccgatcgtgacgggcctttcgcggctttcgtcaaactcattttcctgatcgtagccgtagtacccggccagcttcaacacgcggtcagcgatgaagtccttgcgggtgcggttggactccacaatggcctcgatgagattttccggcacatcggcgtagtttgccagcagctgcttcgtgtccttgggcaggcagtagccgccgtagccgaagcttgggttattgtaatggctgccgatgcgcgggtcaagacatacgccgtcaatgatctgcttcgtgttcaggcccttgctctccgcgtaggtatccagctcattgaaataggcaacgcgcagcgccagataggtgttggcgaacagcttgacggcctcggcctcagtaaagcccatgaagagcgtatcaatgttctccttgatggccccctcctgcagcagtgccgcaaattcgtgggcggctgcgacaaggtgcgcattctccgggtcggtgccgacgatgatgcgggacgggtagaggttgtcatacagggccttggactcccgcagaaattccgggctgaacaggatgttccggctgccgagcctttcccgcaccgacaccgtgtagcccacgggaatcgtcgatttgatgaccatgacggcatttggattgacctccgtgacaaggcggatgactgcctccactgcagaggtgtcaaagtgctgggtctggctgtcgtagttggtgggtgcagcaatgaccacaaagtccgcatcggcgtaggctgcctttgcgtccagcgtagcggtcagatccagctccttctcagccagatatttctcgatgtaatcatcccggatcggcgatttgcgcgcgttgatcaatgcgaccttttccggcaggatatccaccgccgtcacatgatggtgctgggaaagcagcgtggcaatcgaaagccccacatagccggtcccggccaccgcgatcttatattttttcataacagttatactccgcagctgcgaattttccgtaaggcagcagtcaaaattacgccgtgccggcttaccgtatgtgggtttattatagcacgtcaccggccacaattcaatattgccgctttcctcagaattgtttgaacaataatccagtattgaaaacaatcgtctctactcagtctttgctgtatctgctaagatagaatcacggtactggtgtggtgtcagaccggtttgtttacggaaaacacgataaaagtaattgtcatccaggaatccgatctgctggcagatctgtgcattggacagattcgtatcgcaaagaagcttcattgccttttggatgcgcaggtgcgtgatctgctcgttgatgccgcagccatagagctgccgggaaagatagtacagcccggtacggcttaacgaaagatcacggcagatcgtttcgtttgtcaatgtctcatccagatgttccgccagatagcggctcagcttttcctgcgcactgcccgctgccagccgcgtcagccccttttggtacaatgcagccgccgccaaagccagcagatccgctgctgatttcagcaccggatagggcgtgtgcggcaaggcattataggctttttgcagtgccgttttatcaattgcgtaagccgagcagcatttttgcgcatagctccactcgctctgctcgtcggccccctgtacaatgtggctcaacagcaaaaagcccacaacagcaccatcgatctggactggcgtgatcacttcgatcaaccccgcatggcaggggtagatgatcgtctgcttttgccgcgttgccttgcggcaagccgcctggtcacacaggtaacagccggtcttgccatcaggcacactgcggatcaagcggcaataagctggcagttccggcggataggcaagcacttcgattccatacgaatcaaaaacggcggagcgcagccccgtaaggcagtgaaaatcctgcaagaggaccaaaagctcctttttattgaaaacggttcccat

SEQ ID NO: 799 - DNA, 9763 bp, unidentified
  source 1..9763: mol_type = unassigned DNA
ttaaaggtcaaaatgttttgtattttcagccaattcttctgacagtttgcgaagttctccggtcgctttattgcacaccgaaagaatttcattaaactcaagcatggatgctgaggtttcttccgtgctggctgcattttcttctgcaattgctgccaatccatcaacaattgatgtaaccttatttttcttatcttctagagcttctgcctgcttacgaatctgcacaatggcatctgccactgtgccaatctcattatgtaacagattgaacatctggcttgtttccgaaagcttgtcattttgaacactaatcttatccattaccttactcatcgtctgaacgcttgtatcagaattcaccaaaagtgtatccacaatttcaacaatcttttctgccgactggcgggactgctcagaaagggcacgaatttcatctgccacaacagcaaatcctttaccgtgttcacctgctctcgccgcctcgatactcgcatttaaggacaatagattcgtctgagcagcaatatccgtaatcaattcagttgcttctttaatctgttttgccgactggttcgttaaatcggtctgcttctgtacttcaataactgactgcttcgtctgctcactaatcgcatttaattcttccagattactgccggcggtctcattatattcttccatcttctcagaactagcatgaaggttctccacatttgccgaagtctcctccaacgcctgtcccatctcagcaacctgctggttcgcactcatcgtttcatccgcctggctggtcgcaccggaagcaatttcctcaactgccgtatttacactgtcaaccgaatccgtaatattcgcaaaggattccgcaaactgatttgaaaaaccatccagtgctttcgcagaagatgtaatgtttgtaagaatctcgcggagcgaatgaatcaaactctgaatcgctcttgcaatatcaccaacctcgtcgcctcgttccaaaagtaccggcttcatctcaaactgaagggcaccttttgccacattaccaagatttgacacggcaccatcaatactctttacaatacgtttcaccataaaaagtacaataataaatgccgccaaaaaaattgtcaacataacaaccgccattgatataatggtatttctgagactctgtgtcacctgattctgggtacgtccgcagaatacactaccggcaacctctttcgtacccggctggtagagtggcacataatagccataataatctgttcccagcacatctatatttgttgcaaaatactcttcaccttttttcaaggtatcataaacctcggatgacatttttgtattaatttcacgttttccggattcatcttttaatgttgtcacttctctgacatcaccaaaaaacaatgatacttcaacttcctgctcattttttagctggtcgaccagtttataatttccactcaacatcgtattgcccttatagagattatcccccttcatgacaaacttttcattcccctcagttgccaaatatgtctgtcgtaaacttctggcaataccgcttacttctcgttttactaaatcttcagataaatcactttgtttatatgcactcaacaaaattccggcaatcgttatcagaaaaatcggaataaccaccgtcagacttaatttcaacgcaagacgtgcaccttttttttgattcacaagaaattcccccttttaataaaataaaactataatatataaatattatgctatattattataacatctttctccttttggtacaagagataagttgttattgttgcgttttgaataatcaaagtacgcaggaaaagttgtttgtgtcaagtgttcgttggcacttttttgttttccgtaattccgtagaaaagcgttgcgtctcgtgggcgctcccgctaattgagtgcgtagcggtatgggcactgaaattaccagtgccacataccgacgtactcaaacccacgagtcacaaagtttttctacgaaattactggaattcaaagcaactgaccgcgaacatttaccacaagccaaccatccatcccccacaattggtctatagcaaaagttttcctacattatctaaaaggatgatttttttcagcacaccacaatcggcagggaaaagttttgagtggaatgcgttatatgtgcgtgggtatctgatatgcgtattgtgcatatcgatacccctacgcacatatcagcgggagcggcgcatgacactcaaacttttccctgccgactgtgaagtcctgaaaaactctcctcctaaataatgtaggaaaacgtctctctctcatgatactgccgcaccaattcagcgagtgtaactctctcaagcacatcatctacagcatgatccacttcctgacccaaatcgcgaaccagtgcattcatcgtgcggttgttttcactttctctgtagccatccaaatccacggcatttcgctggccctcaatggcaccgaccacatctttagcggtacatcgtctggtttcttccggaagataatagccgcccttgctgccgcgaatcacgcgcacaatcccggcgtgacgcagtttagaagccacctgttccatatatttctctgacaaatcgtattccttagccacctgtttgaccgtcaccgtactgccatcatgcagtgcaaggtcaatcagaaaaaataatgcatactgaccctttctcgtaatatacataacaacccctctttcctaatttctatcctgctccaaagaagcaattgccacggcaccatcggaaaccgctgtaataacctgacgaagcggtttggttctcacatcgcctgccacataaattcccggcacattcgtccggcagtcctccccggcacaaatatagccggcatcgtttctctcgactacatccttcacaaatgctgtctgcggctccatgccaacagcaatgaaaataccggataactcaatttctttttcctccccggtctggttctgtgtaagaatcactttctgtaccataccgtctccggcaatttctttcacttcataataaggaagaaattcgatattttccgctgccatcactttttcggaaagttccttagccgcgcgaagaccttccctgcggtgaatcaaatacactttttcacaaagatttgccagatacagcgcatcctctaacgccacatcaccaccgccgacaaccgccgtcgttttattcttaaaaaatgcaccatcgcaggttgcacagtacgaaacgcctgcaccggtcaattcttcttccccttttacggaaagttttttatgccctgcaccggttgccactaacacattttttgtgcagatggtttcaccgtcttctaaatgcacttttttatattcggattcattttccacggaactcacttctgcgtctataaacggaacagaaagtgcatccgcatgttctctgaatttcattgccagcgaatatccggattctccgtaaagtcccagataattgtccacgcgttccgtcgtcacaatctgtccgccgctaaatcctgccttctcaatgacaacaacatctaacattgcacgttttgcataaacggccgctgacaagcccgccggtccgcttcctataattaccaaatcttttacctgttctgccatcgtatccctcctaatctacttctgattggcaaactttctaatctgctcacatgtcttttcgatatccttatccgtatgtgccgctgacacaaacatagcctcaaactgagacggtgccaaataaatgccctctttcagcatcgccttaaaataagccgaatagcgatttgtatccgaggtctgcaccgtatcataatcaaccactttttcaccggtaaaaaacaaactcataagagagccaacctgatttacacagaccgtttctccaaatgtttcacgcatcactgctgccagtttttctgcctttttctcaatggtttcataaatcgtatccgaatcacgcagaattttcagtgtctcaattcctgcagtcattgcaatcggatttcccgaaagcgttcctgcctgatacacttccccaagcggtgcaacgcacgacataatttcttttctgcctccatatgcgcctaccggcataccgccgccaatgatttttccaagtgtcgtcaaatccggtgtcacgccgtaatactcctgcgcacctccttttgccagacgaaagcctgtaatgacctcatcaaaaatcaaaagagattgatacttttttgtaatctcccgtaaaaaaggcagaaaacctttttccggacaaaccacacccatattggctgccaccggctccacaacaaccgccgcaatgttatcaccatatttttcaaacaatgcttttaccgattccggtttattatactcagcaatcaatgttgtctctgtataaccctttggcacaccggcactgtccggcacagcctgcaaaagtgccgcagaacctgcctttaccaaaagtccgtctgagtgaccatgataacaacccttaaattttacaatgtaatctttgccggtatatcctctcgccacacggatggcgctcatcaccgcttccgttccggaatttaccatacgcatcatttccatcgatggcatcatgtcatgaattaacgacgcaatttcatattcttttttcgtcggcgccccaaaggtaagtccctgttcacatgcctgtttcaccgcttcaatcacagccggatatgcatgtcccaaaattcccggaccatacgaacaaacataatcaatataatcattcccatcctcatccaaaatatgagaaccttttccactttttacaaataccggtgttccgcccacattgcggaatgcacgaaccggcgaatttacaccaccgggcagaaagtgttcggatttttcaaataactgttccgactgtgtcatagccttacttcctttctctattgataaaactgctcaagcgccctgcctaaatgttctaaatcgcattgctctggaaccacatccacatcgattccatacgcctgcagtctttttttcgtcacttcaccaatcgccgcaaccgcaacatgctcttttttgcggtcacgctcccattctcctatcttgtccttacccatccgggaaacaaacgcctcaacgccggatgcgctgaaaaatgcagccacgtccatattcttccacatggacaaatcccctgaaaaagccccttcaacatcataaaaagggatttccgtaatcgtaacagacttcttttgcagttctaaaacaagttcttcacttgcctgcaaagcccttggaagaagcagatgttctcccggtttcacgacatctgtaagccctttggcaagtgcctctgtcgtaaactgttttggcatataatccgcataaaatccatacgtttccagtgcctttttcgttccgctgccaacgacagcaaaacgaaccttcgcaaactcccgtctgtcaatttgtttcttatctgcctcagcaaaaaataaatgaaccgcattctggcttgtgaaaacaatccagtcatatttttttatctgagataattcatccaaaagtttctctgcaccatctgtacagacaactttcatttcacaaagaggaaaaacaaaagcccctttgtcttccatcatttcacgcagtttattatgcagtttctgcgttgctgttgtaccgatttttttcccggcaagcacaccaaaatcctcactgacaaaatgatattttgccgtctgtcccacaacaaaaaccgctggggaagtaattttatttttaattactttatccgcaatatcaaaaagtgttccatagacacgtttctcatccggcatcgttccgtgggaaatcaccgcaacaggtgttaactcatcctgtccctgttccatcagccggtctgcaatcatgcggatatttgcgacactcatcaaaaatacactcgtgccatcctgtttcgtaatatgggaaaaagattgctctgccccctcttttgtgtgaccggtaaacacatgaaaactgcgactttccttacgatgagtcaaaggaattccggcgagctcactcactgccactgcacttgtcaccccgggcaccaaagcaaatggaattttctctttctgcagtgctaaaacctcctcgccgccgcgtccaaaaacaaatgggtcaccgccttttaagcggacaacatttttatactgttttgccgtctgaatcagaatctcattaatctcttcctgcttctttgcgtggctcatcggtttctttcccacataaattttatggcagttttcaggaaccacagaaagcagttcctccgacaaaagcctgtcatatatgaccgcatcgcatttttgcagcagacgaagtccttttaccgtaattaactccggatttccgggacccgctccgattaaataaaccatactatgatttcctctcctgacacaatttttctacaagattttgccaatctcctctgtccccctgcaccgaccgccggattacttctccctctttttcttccatcagagaaagattcatcctatgtccatcgagggtacacaaaacaccaattggctcatggcatccggcatttaatttcgtgaggaccgcgcgctctgtccgcagacactctgctgtatgaacatccgaaattttttcggcaagttcattagcaagcgttcctttttttgtctccatcgcaatcactgcctgacctgccgccggaagcatctcctttacagaaagatactcgtaaacaaaatccgaatcgttgtcaataccctgtcgcctaattccggcagcagccaacacaatcgcatcgtactcgcctgcccgcagtttattgagccttgtgccgatatttcctcgaagacttttgcagacggcattcggatacatctttttaatctggcactgtctgcgcagactccctgttccaatggtaaaaacagaatcctttgtaaaggaagtttcctttttgtaaatgagtacatcctgcacacaggcacgctccaaaacaccggcaaccgtaagtccgtctttacacgggtttggcatatcttttgcactgtgcaccgccaaatcaatcgtatcgtctaaaagcgcctgttcaaattcttcaacaaacacggcttttccgccaaaggaaggaatcggcgaatccttttccttatcgcctttggttgtcatatacacaatttcgtattcatactccggaaatgcctcctgcaattttgaaacaaccagtccggtctgaatttttgccagttcactttttcttgtaccaatccgaatgactgattttttccactctttttttaccatgtccaacataatctctttccgtttttcttcctccggctctgttttcaaaaccgcatttcttttttcaagaagcgtctttgccatatctccgcagttatccggcagatggctcctaatactcttttttatctgagaagctaacgccggagcactgccaccggtcgaaaccgaaactacgacatcatcctgctttataattgccggaaaataaaaaccgcagtcttttttgacatccactacattgacaagaatccgtttgtccttacaaatggcagcgatatgggaattgacttcactgtcattcgtcgccataatcaccacatcggctccttcgatatcaccatcctcaaatggtctttgaaccaataaaagggcatcttgtttcgattcaattttctgcaattcatcgcaaatttttggtgcaatcaccgtaacacgtgccccaaacgacagcatcatagaaacttttcggtatgccactttgccaccgccgccgataacacataacttatcctgcatctgaatcataaatgggaaaaatgccatttcgacctcctcgatatagaagaaagaaggcagacgctaccttctttcctttttattacgaaattactaatttctcttttgtcacctgtttttcctcatcgacacggaacgcattcaataccggattgtctgcttccatcaacgataaaatcagataatttgccttggaatcataggcaagccgtttgtcctcctccgatggtctcgatggagactccggatgagaatggaaattgccaagcggcacatagccatttttacgcatatctttgactgccgcaagctgctctttcggatccatggaaaaatgctcgttgctctcatccatgtttgtcagaagataaacctttttcacatactgtttttccccttccacaacaccgccaatcaaaccacaggcttcattcggaagaccttctttgcagtgagctaacattttctcataatcactttttgtcaaaaataacatatccttttcttcctttccgcctactttccgtcacactctacctgctcgtaatcaattaactccgtaattgtcggatgatcaccgcagactgcgcaggtgccatttgcctttggcagtttaatcgtgtgaaattccatcttaagggcatcataagtcaaaagttttccggtcagcaaatcgccaacaccaatcagatacttaattgcttccatcgcctgcaaacttccgataacaccgcccatagcaccgataacaccggcctgtttacaggttggaacagcatccttcggaggcggatccttgaaaacacagcggtagcatggtccttcccccggaacataggtcataagctggcccttaaagcggatgattcctgcatgggaaaatggtttctttgccattacgcaggcatcgttaatcaaaaatttcgccgggaagttatctgtaccatcaatgataaaatcataatccgcaatcaaatccataatattttccgatgttacaaactcgcggtatgtatttactaccacatcactgttcatcgcattcatcgtctcttttgccgattttacttttgctttgcctacatctgccgtgccatgaataatctgacgctgcaagttcgacaaatctacctcatccgcatcgacaataccaatggttccaacaccggctgctgccagatacattgctgccggagcaccaagtccaccggctccgataataaggactttgccgtttaacagctttttctgtcctttcacgcctacttcctgcaaaataatatgccgggaatagcgctccatctgctcatttgtaaacgccattaatttgcgcctcctcccatgaaataaagaaattctacgacatcattttctttgagtgccgttgtagcaaaatctgtgctttccacaaattcatcgttcactgttacggttacataatccgggttttccactttctcaacctcaatgagttttgcgattgtcaaaccctcatcgtatgttttcttttctccagctacggttactaccattttcatatcctcctttataaaacttcctctacagcttcttctaactctttccgctttacaagacctcggattcggtttacttcttttccctctttgaaaaacaaaagggttggggaagctgctacttcatatttttgtgccagttcggcatcaaaattcacatttactttgacgacgataagtttatcctcatagtcatcttcaattccgcctaaaaccggcgataattgtttacatggaatacagctatccgaataaaattcaacgataaccggaagagacgccttaagaacttcggcttcaaactcttctgcattcactcgctttgccat

SEQ ID NO: 800 - DNA, 5852 bp, unidentified
  source 1..5852: mol_type = unassigned DNA
ttaatcatccagaacagaatctaaaatcgcaatcattttatccacatcgcttttttcaataataagcggcggaataaaacgaatgacatttgcgcctgcgctcataaaaatgacgcctttttccaatgcctttgtaatatagggaccggcaggaacggaaagttccaagccacgcatcagtcccataccacgtgtctcaacagcaatttcttttttctccaccaatttctgcagacattcactaagatactcgccaacttcttctacgtggtttggaatttctctcttttcaaaaatttccagtgtcttggctactgctgcgcaggcaagtggatttccgccaaatgtcgtaccatgatctcccggcacaaggcatttagccacttcttcttttgccgcaattgcacctacggttataccatttccgattccctttgccatcgtcacaatatccggcacaatatcgtatttctggtacgcaaacatcttaccggaacgtcccatgccacactgaatttcatcacaaatcataatgatgtcattttcatcgcacaatttgcggattccctgtaaaaattcagcgtttgcaggataaattccaccttcgccctgaacggcttccacaatgatggcatatgtattttctgtaaccgctgcttttacactctcgaaatcgttgtaatcagcaaatgtaacaccctgtaacatcggttcaaacggctctctgtattttgccgtaccggtaacggacaatgctcccatgcttcgtccgtgaaatgctttattcatcgagataatctcatgacgattttcatgcccctgcataatggcatattttcgtgccattttcaaagcgccctcattggcttccgtaccgctgtttgccataaatacacggtcaagtccggttgcctttgcaagacctttcgctgcctgcaataatggctccgaataaaaatagttagaaaaatgaattcctttatcaatctgtgctttcaaagcatctgtgtattccttatctccatagcccaatgcacaaacggcaattccggcaccaaaatccaaatattcttttccgtctgtatcgtataatttcacgccttctccatggtctaatacaaccggataacggttatacgaatgaactaaatacttctctgattcatctatcatctgtttcatatcacatgctccttcctaatcctgctcatgcggatacaatgttgtgtggttatcaataattgctgtaccaataccttttttggtaaagaactcaagtaacagacaatgctgtctgcgtccgtccagaatatggacacggcttacaccttcttctaccgcttccacacagtttcttattttcggaatcataccaccgccaatggttccatcctcaatcaactgttttgcctcatcagttgtcaatacagaaatcaatgtttccgggtctttcgggtctttgcagacaccctcaatatccgtcataaatgccagtttttctgcatgaatacactttgcaactgcacttgccgcatcatcggcattaatgttatatgcctgataattttcatccataccaatcggcgcaataatcggaataaaatctttggcaatcaaagtgtcaatcaaatcggaattaacggattttacttttcccacaaaaccgatatctcttccaccggctgtttttttctcacaaagcattgtgccaccgtcttttccgctgatgccggctgcctttactccaagtttctccatcatctggactaaatgcttatttaccttatttaaaaccatttctgccacttcaatcgtatcggcatctgtcacacgaagtccttctacaaattcgctctcttttcccatatagccaagccatttactgatttcttttccaccgccgtgaacgataatcggctgcatgccaaccagtttcaacaaagcaacatctttaatcactgattcctgcaatttttcatccagcatagcgcttccgccgtattttacaactacttttttcccgttgaaatcacggatataaggcagcgcctcaatcagcgtttccgccttaagtacaacttctttcatcttatcttccatctttttatcctctctaacttctgtaatcgccatttatttttacataatcataagtcaaatcgcatccccaggcaattgccgatgcatccccctgcttcatgtcgcaaataaatgtaactgcatcttttcctaataaaatagtcgcctcatcttcactgtaatctgtcggcacaccatcttttactaaaacaatctgctcatcctcagcttctaaaatcaaatcgattacatccgggtcaaagtctgcaccggaataccccagtgcgcacaaaacacgtccccagttcgcatccttgccaaacaccattgctttcacgaggtttgaagtcacaaccgatttgctaaaaatctttgcctcttctttattcttacagtgaactgctcttacttccatcagcctcgtagcgccttctccgtccgctgccatctgttttgccaaatccgttgcaacaaaactcagtgcctctttgaattttacatatccattcgttcctgctttgatttcaacaccggattcgccattggcaagcaccagatatgtatcatttgttgatgtatcgcggtcaaccgaaatcatattaaaactatctgacacaatttcggaaaccatttcctgcagtaaatcatgtgaaatttttgcatctgttgtcgtaacgctaagcatcgttgccatatttgggtgaatcataccggaacctttgctcatgccgccaacagttacggttactccgtccacctcaaagcttactgcagcttccttcggaacagtgtccgttgtcataattgccttagccgcaagcagacctgcttcttttgtatctgccagtgcatcctttaaaagttttgcacctttttgtatcggttctttttttatctgcattccgataacaccggttgaagcagtcaagacctcttttgtcgaaacgccaagtgcctctgcaatttgtgaagccatgtactcattaatttctttaccttcgcctccggtacaggcattggcaattccactattcaatacgaccgcatgaacatcctttttgctctcaacaatttctttatcccaccaaaccggtgctgcctttactacattcgttgtaaaagttcctgcacagaccgccgggctttctgtatagacaagggccatatctgtacggtttttatatttaattcctgcctctgcgctcgccgccataaatccttttgctgcggtaacgccgccttctattgtattcatcatattttcctcctttacggaaccatcggtacaagccggagcccctctgcctcatcaaatccaaacatcagattcatgttttgaactgcctgtccggcagcaccttttgtgatattatccattgctcccatcataatcacgcgatgcgtgcgctcatctacttttacatttacatcgacaaagttgcttccctcaacccatttggtctccggacacacaccctcatccagcacgcgcacaaaatattcatcttgatatgctttcacataagcctctcgaatctgctcttttgtcacaccttctttatattttgcatatgccgtaaccaaaataccacggttcattggaatcaaatgcggagtaaaattaagtgtaacatcttttccgctaatataggaaagctgttcttcaatctccggtgtgtggcggtgcgtggctactccatatgccttaatattctcatttacttcgcagtaaagatttggaacttttgcacctcttcctgctcctgatgttccggattttgcatcaataattaaagtatccatatcaatcagtccttctcttgcaagcggtgcaatcgaaagtgttgaacaggttggatagcatcccggattagcaatcaaacgtgcctttttaacttgcttgcggtttaactcacacaatccgtatacagcctcatccaaatactgagggcttttatgtgtgatgccgtaccatttttcataaaccgcaacatcttttattcggtaatccgcactcaagtcaatcacctttgcctgggaaaggatttcgtcatccagaacacctgccaaatacccctgcggtgttgcggtaaatatcacgtctgcctcttttgccaaagtatgtaaatcatcacttttacaaatattttctacaatctggaaaacatttccaaaaacggaactaaatttcttatccacataacttctcgaaccataccatacaatctcaacttctttgtgctgcaataataatcgaaccaattcctgtcctgcgtaccctgtagcaccgataattccagcctttatcatagcatcctccattccgccgtactttggcagctcactctttttattcatcatttatgcatatttatacatattatacacaaacctcaattattatacatcttttccgataaatatgcaatacctaactagaatttattcgtcattctttgaaaataattgattttatgcttgcataatattcacttgtggtgtatattagaaaaaggttaataccaaaaaatacatacggaggttctattatgaaagaaaaagttattttagcttattccggcggcctggatacaacagcaattattccatggcttaaagagaattttgattatgaagttatctgtgtctgcattgattgtggacagggtgaagaattggacggtctggaagaaagagctaagttctgtggtgcatccaaactttacattgaggatgttgtcgatgagttctgtgatgaatatgtagttccttgtgtacaggctcatgctgtatatgagaacaaataccttcttggtacttcgatggctcgtccggttattgcaaaacgtcttgttgaaattgcaagaaaagaaggcgctactgctatctgccatggtgctaccggaaaaggaaatgaccagattcgtttcgaactcggtatcaaagcacttgctcctgatttgaaaattattgcagcttggagaagtgataaatggacaatggattcccgtgaatccgaaattgaatactgcaaggcacatggaattgatcttccattctccgcagattccagttacagccgtgaccgcaacttgtggcatatcagccatgaaggtcttgaattggaagacccggcaaacgagcctaacttcgatcatcttctggttcttggtactacaccggaaaaagcaccggatgaaggtgaatatgtaactatgacatttgaagctggcgttcctaagagcgtaaacggaaaagaaatgaaagtttccgatattatccgcactctgaatgaattaggtggaaaacatggtatcggtattgttgatatcgtagaaaaccgcgttgttggaatgaaatcccgtggtgtttatgaaactcctggcggaacaattctttacgaagctcatcagcagttggaagaattaatccttgaccgcgatacaacaacattgaaaatggatatggggaataaacttgctcagatttgttacgaaggcaaatggttctctcctctccgcgaggcagttcaggcatttatcgagtcaacacagaaatatgtaaccggcgaagttaaattcaaactgtacaaaggaaacattatcaaagccggaaccacttcaccatacagcttgtacaatgaaagcattgcaagtttcacaaccggagatttgtatgaccatcatgatgcagaaggtttcattaacctctttggtctttctaccaaagttcgcgcaatgaagatggcagaagtagaaaagaataataagtaa

SEQ ID NO: 801 - DNA, 22116 bp, unidentified
  source 1..22116: mol_type = unassigned DNA
aaggctcagcaagataggtagaaggtttgaagtttttgcgataaatctccactgccatttccatcatgcgtggcgcaaagtgtgaagcaaatgcataaggcaagccaagttctgccgcaagataggcactttcggtgctggaacccaaaatataaaatggtatattcaagcctgcggaagggtaagctgaaactgggttgctatctttaaagtaaccacgaagttccgcaatttctgcagggaaatccagactgtttcgcccacgacgaagtgctgcagccgtttgcatatcagttcctggtgcacgccctaaaccgagctcaactcggtttggataaagtgtctccagtgtgccatattgctcagctacgacatacggtgaatgattcggtaacatcacaccacctgaccccacgcgcaaagttttcgtattggctagcgtatgttgaattaaaagtgcggtcgctgaactcaccaaatttttcatattatgatgctcagcaatccaatagcgctcaatgccaatgcgctccgcgtgttttgcaagattcaccatcgaatcgactgcttgcaaataagtttgcccttctcggacaggggcgagattaagaatagagagcttcattttatttcctcatgattgatttgttgagcgtcattatacgcgttttttctggcagaaatatcgataaaattggaatagactgttccgagaaaaggaaaaatattgcaaaataggcacaaattcagatgtattcgaaaaaatgattgtatttaataatatttccctaaagcgcgggcaaaccgaattgctcgagaatgctacagcaactatcaatccgaaacaaaaagtcggtttggtaggtaagaatggttgcggtaagtcttctctttttgccctattaaaaaaagaattaacgccagagggcggagaggtcacttatccatccaactggcgagtatcttgggtaaatcaagaaacgcctgcattggatattcccgccattgattatgtgattcaaggggatcgcgaatattgccgtttgcagcaggaacttaacgaagcaaatgaacgtaatgatggtcatgcgattgcgcgcattcatggacaattagaaaccttggatgcttggacgatccaatctcgtgcggcttccttattacatggtttaggctttaatcaagaagaaatcgctcaaccagtgaaatccttctccggtggttggcgaatgcgcttgaatttggcacaagcattgctttgtccatcggatttattattactggatgagccaaccaaccatttggatttggatgcggttatttggttagaacgttggttagtgcaatatcaaggcaccttggtattaatttcccacgaccgtgattttctcgatccgattgtgacaaaaatccttcatatcgaaaatcagaagcttaacgaatacacgggggattattcttcctttgaagtgcaacgagcaaccaagctagcgcaacaaactgccatgtatcgtcagcaacaacaaaagatctctcatttacagaaatatatcgaccgctttaaagccaaagcgactaaagccaaacaagcacaaagccgtatgaaagccttagagcgtatggaactgattgcaccggcttatgtggataatccttttacctttgaattccgtccaccgcaatctttgccgaatccgttggtgatgattgagcaggcgagcgcaggttatggcagcggcgaaagtgtggtagaaattttaagtaaaattaagctgaatttagtaccgggttcacgcattggtttgctcgggaaaaatggtgcaggaaaatcaaccttaatcaaattgttagccggtgagctcaccgccctttctggtacagtacaattagctaaaggcgtgcaacttggctattttgcgcaacatcagcttgatacgctacgtgcagacgaatccgctctctggcacatgcagaaactcgcaccagagcaaacggagcaacaggtacgggattatcttgggagttttgcgttccatggtgacaaagttaaccaagaggtgaaagccttttccggtggagaaaaagctcgtttggtgcttgcactgattgtttggcaacgaccaaacttattgctgctcgatgaaccaactaaccatttggatttggatatgcgtcaggcattgaccgaagcgctggtggattatgagggctctttggtggtggtttcccatgatcgtcacttactacgtaataccgtggaagaattctatttggtacacgataaaaaagtggaagaattcaaaggcgacttagaggattatcaaaaatggcttaacgaacaaaacagtgcaccagaaaataaatcctcggagaaaaatgacgacaatgaaaattccatgcaaaatcgcaaggaacaaaaacgtcgtgaggccgaacttcgccaacaaactgcacctcttcgtaaacaaatctctcaattggaggaaaaaatgaataagcatgcctccaaacttgcggagattgaaaaccaattggcagattccgaactatacagtgcagaaaataaagaaaaattgaccgcacttttggcactgcaagtagaggtgaagaaagcattggaagaagtcgaaatggattggttagcggtccaagaagaattggaagtaatgctacaagcatagggacagcgtatgagtcaaagtcttttccaacacacaaaacacgaagaatattgcccacaatgcggcgcgcctctgcaaatgaaacagggtaaaaagggactgtttttaggttgtaccgcatatcccgcctgtgattatttgcgccccttgcataaggtggaacataaggtgttgaaagagcttgatgagacctgcccgcaatgtggcaatccactccaactcaaacaaggtgcctttggcatgttcatcagttgtagtcattatcccgattgtgattttgtggtgcatgagcaacaggatgaagaacaatctatagactgcccggaatgccataaaggacatttggttgcccgtcgcggacgacaagggaaaatcttttatggttgcgataactttccccattgtaaattttccttgccggcaaaaccctatgccatgccttgtccacaatgccattttccacttgcgctattaaaaagtgaaaatgccgaacagcaagtgtggcagtgtgcgaataaaggctgtcgacatatttttgagaacgaaaaatgaatgtacaacaaattgccacccgtttaatgcaagacgaagtcgttgcctatcctactgaggcggtattcggtttgggctgtaatccactaagtgaaagtgcggtcagaaaattgcttgatttaaaacaacgtccgattgaaaaaggccttattttagtcgcgccgagcttgcattttttgcagccttttgttgatttttcccatttgtctgacgaacagcttgcacgcttacaggcgcaatacgatcatccaatcacctgggtggtaccagctaagacagaggttccacatttcctgacggggcaatttaatagcattgcggtgcgtttatgtactcatcctgccgtcaaagccttatgcgaaaaaacaggctttgccctcacctcgaccagtgcgaatttaactggtttatcaccttgccgcaacgcagatgctgtgcgttcccaatttggggcagattttcccgtgcttgatgaagcagtcggccaagcacaaaatccatcggaaattcgcgatttgctcacaaaccaactattcagacaaggataagatatgcagcactatgccgtttggggcaatccgattgcccaaagtaaatccccgttgattcatcgcttatttgccaagctaacccagcaaacgatggaatatgttgccaaattaggtgatcttgaggattttgagcagcaattgcaggcctttttttctgaaggagcacaaggttgcaatatcactgcaccatttaaagaacgcgcctatgcgctcgctgacgaacatagcgaacgggcgaaactggcagaagcctgtaatacactaaaaaaattatctaacggcaaactttatgcggacaataccgatggcattggtttagtgacagatttacaacgcttaggttggattcagccacaacaacgcattttaattttaggtgctggcggagcaaccaaaggagtattactgcctttattggaagcacagcagcagattgtcttggctaaccgcaccctagaaaaagcacaacaactggcagataagttcaagccttacggcacaattgaagctgtcgcgatgggtgcgattcccgcgcaaacctacgatttagtgatcaatgcaacttcggctggattaagcggacataccgccgctgttgatgcctcaatcttatcagaggtccacgcctgttatgacatgcaatatgccaaaggcagcgatacgccttttattgcctactgtaaatccttaggtctgaataatgtcagcgatggttttggtatgttggtggcgcaagccgcccattcattttgtttatggcgtggggtaatgcccgattttgtcgcaatctatgaacaactcaaaaaggatatggcatgagtacaagatgcccttgggtgggtgaacttccaatttatatcgactaccatgacaaggaatggggcaagccacaatttgatagccaaaagctatttgaaaaaatttgtttagaagggcaacaagcggggctttcctggatcaccgtattgaaaaaacgcgaagcctatcgagcagccttccatcaatttgacccagccaaaatcgagcaaatgaccgaacaggatattgatcgttgcatggaaaataccgggcttattcgccatcgggcaaaactggaagccattgtgaaaaatgccaaagcctatctagccatggaaaagtgcggtgaaaatttcagtgattttgtgtggtcgtttgtgaatcatcaaccgattattaatgatgtccccgatatttctgtggtgcccgctagaactgaaatctcaaaagcaatgtcaaaagcgttgaagaaacgtggttttgtctttgttggggaaaccacatgttatgcctttatgcaatctatggggttagttaacgaccatataaatggctgttgttgtaaatgatattccagtataatccccctagtttcatctgaataagaactgaattatgaataaaaaatataccttaatttcaatctcaattctgaccgcattttatagtcaacaaagtttggccgatctgcatgctcaatgcttactcggcgtgcctcactttactggggaagtcgtgaaaggtgatgttaataatttaccggtttatattgaagcagataaagcagagattaatcagccaactcaggcgatttatcaaggcaatgtggatttgaaacaaggaaaccgccatttggtagggaattcagttgaagtcaaacaaacaggtgagggcaaccaaactcaacgatgggcttatttgcgaggcggatttgattacaaagataatcaaattaatctattaggtaatgatgcgagttttaatttagatagcaaaaacggtaacgtaaccgatgcagactaccaacttgtaggacgtcaaggccgcggtaaagcacaagaaattgagttaggtgataattaccgtttaatgaaaaatgcgacatttacctcttgtttacccgatgataatgcttgggcggtagacgcctctgagattcgtcagcacattaaagaagaatatgctgaattttggcatgcacgttttaaagtattaggtgtgccagtattctataccccttatctgcaattaccgattggtgatcgccgtcgttcaggtttattaatgccaacagttggtcattctagccgtgatggctattggtataaacaaccaatttattggaatattgcaccaaattacgatgccacatttgcaccaaaatatatgtctcgtcgtggttggcaattaaatggtgagtttcgttatttaacacccgttggtgaaggtaaacttgctggcgaatatttaggacgtgatcgctacgatgaatacatcagtgataaccgtaagcgtcatttattctattggaatcacagttcttcttttcttgaaaactggcgtttaaacgttgattacaccaaagtcagtgataaacaatatttcaccgattttgattctgattatggtgacagtactgatggttatgcgaaccagtatgcacgtattgcttactataaaccaaattacaactttgcgatttcagcacgtcaattccaaatttttgatgaggtttctgtgggaccttatcgtgcgctgccacaaatcgacttcaattattacaaaaatgatttggcaaacggctgggttgatttcaaattattctcacaagcagtacgttttgataatgatagcgccctgatgccaaccgcatggcgttttcatgttgagccaagcttggcaacggcaatgtcaaataaatatggtagcttaaatattgagactaaactttatgcaacgcattataaccagaaaaagggctcttcttctgctgcagaagaggtacaaaaatccgtaaatcgtgtattgccacaattaaaagtagacttacaaacagttttagccaccaacaaaactttatttgatggctatacacaaacactggaaccacacgcacaatacttatatcgaccatataaggatcaaagcaatattggctccaagttagttaatgactatcttggctttggttatgactccgctttagttcagcaagattattattcattattccgcgatcgtcgttatagtggtttagaccgtatttcatctgcaaaccaggtgacagtggggggaacaagccgtttttatgataaaaatgccgatgagcgttttaatttctcagcagggcaaatttattatttaaccgcgtccagaatcgatgataatccaagtaatcgtacaccaaaatcctcttcttcttgggcattggaatctaactggaaaattagtaataaatggaattggcgcggtagctaccaatatgatacgttgctagataaagcatcattggcaaatagcagtttggaatttaacccgatgaagagcaatctgattcagttaaattatcgctacgcaagtaaagagtatatcaaccaaaacttaggtgcgtctgctaaccgttaccaacaagatattaaacaggttggtgtcgtagcggcatgggaagtctcagataactgggcgcttgtcggaaaatactatcaagatattgcgttgaaaaaaccagttgagcaatatgtgggtgtacaatataactcgtgctgttggtctgttggcgtaggagcgagacgttatgtgacgagtcgtcagaatcaacgtaacgatcaggtggtttatgataacagtgttggcgttacctttgaattacgaggcttaggtgaaaatgaccatcaaagcggtattgaagacatgctgaagaaaggtaaacttccttatattcaagcatttagcttatagttaaatgaataaaggctaccgaaaggtagcctttttgtttagaagtgcggttaaaaaagacgacgatttttgaccgcactttgcttatttttttcgttttgctcgaggatgggcttgatcatacacttctgcaagatgttggaaattcaaatgcgtataaatttgcgtagtggacaaattgctgtgtcctaaaagttcttgaactgcacgcaaatctgaactcgcttccagcatgtgagtggcaaacgagtgacgtaatttgtgtgggtttagatgactatttaatccttggcgaatgccccaggtttccattcgtttttgaatagagcgatgagtgaggcgatttccctgttggctcacaaaaagggcttcatctttaggattaaataaagggcgtactttcaaccattgttgaattgcgtgagaagcataacgcccaaaaggcacaatacgttctttattccctttaccaatcactctgacttcacgtacacgcgtgttaatgctattaaggtttaagccttgcaattcagataagcgaagccctgagctatacattaactccatcatggcgcgatcacgcaaatcaatgggatctttgctgtcatttgaaagcaatttttggatctgttcagcatcaatatttttcggtaaatgcttgccttgtttcggtgctgaaatacccgttgccggattcactttcatttgcccttgttgcacaagatagctgaaaaactgacgtagagcagataagcgtaatgccaagctcttttcttttaaaccttgctttcgactttccgccaaaataagacgaactacacttggattcacttgctgccagtgttgaatgcctttttctgctagaatcgctaaaatcgcatctagttgatgttgataattggtgagtgtatgtgggcttacttggcgttcaattcgcaagtaatcccaatattgattgaggagtgtatgcattagagagttaattcaaacaaactttttttcgtgtttagcttaaatccttcgcgttctaaaatattctgttgagcttggcttaattccgctactaaacggttagattgtgtataacggacaaactcttttgctttagaaataagcgctgcataaatctcggcttgatgtttatcttctttgacaaaaatatcggttaattgccaatagcgttgtaattgtaaagaggataagcgaggataaagttgaacaaagccaatcgcttgtgcattttcgtttacagcaataaaaaacatgctttcattaaaacgcatacgatttgttagaaaggttaaagtgcggtcaggattttcactcattccgttggcaagtcgataggcttcaaagagtggagcaagcacttctatattccattgttcggctttgaaaattttcattgttaccagacctattttccgtttatttataaaattggttattttttatcggttccgtacagtagattgtagctttttagcacaaaataatcatcatttccccaaaaaaattttcaaaatgtgattttgcacaaagaaatctgttcaaagtttggtatagtaaacacactttttatttattcaatatggagaaacaaaaatggcacgtcgtcctttagtgatgggtaactggaaattaaacggttccaaagcgttcaccaaagaattaatcgaaggattaaaagcagaattacacgatgtaacaggttgtgatgtggcaattgccccacctgttatgtatttaggtacggctgaagcggcactttctggttgtggttgcagctgtggcggtaaaagtgtgattcagttaggtgcacaaaacgtagatatcaatgtgaaaggtgcatttactggtgatatttctagcgaaatgttaaaagattttggtgcaaaatacatcattatcggtcactctgagcgtcgtacttaccacaaagaaagcgacgaatttgtagcgaaaaaatttggtgtattaaaagaagcaggtttagtaccagtattatgtattggtgaaactgaagcagaaaacgaagcaggcaaaactgaagaagtatgtgcgcgtcaaattgatgcagtcatcaacgcattaggtgtagaagcatttaatggtgcagtgattgcttacgaaccaatttgggcaatcggcacgggcaaatcagcaactccagcacaagcacaagctgttcatgcatttatccgtggccacatcgcagcaaaatcacaaactgtagcagatcaagtgatcattcaatacggtggttcagtaaatgatgctaacgcagcagaattattcactcaaccagatatcgatggtgcgttagtgggcggagcttcacttaaagcgcctgcgtttgcagtaatcgtgaaagcagcggcagcagcgaaaaactaattttcttgttctaaaagagataaaaaaagtgcggttaattttaaccgcactttttgtttttgattaatgttgattgcgttcccacaaatcagcatatttcacaaaggtggagtgggcagaaagtaccgcaagcagaaaaccttgttttccatctaagaagcctgcttttaaaatgtacattttgacaaagcaaccaatcgcatgactaataccttgccataacgttgtttttttccctttggcttggcgttggtcagcccaagctttggcatagcctgcagatttcaccaaatagtgatgaatgcttttataggtgaaatgctctagatctccagttaatttctgtactttcgtgttttcaggataaactactttttcatgtaccagagaatcattatatcccgcataatttgtgcgatacaaacgcaccacataatcaggataccaacctgaatggcgaatttcgcgcccaaacacttcactcacacgaggaatatcataaaccgtattttgggtatcttgttgaactgcttgtcgaatggattcacgaagtttcggagtgacgcgttcatcggcatctaaccacaaaacataatcactggtgacatattgttgtgcacgttggcgttgtttgccaaagcctggccaatcaggatgcgaataaaattttgcaccatattgttccgcgatttcttcggtattatcagtactgcctgaatcgacaataatgatttcatctacccaatcttttaccgtatcgagacattgagcgagatctgccgcttcatttttgacaatcatggcaacgctaattgttggcatattttgatcctttttttgctatactagccgaaatttttgtaagtataaccgaatttattttatgtggcgttttttttatacctgcctgatgtatctgattcagccttttgtcctgttcttcatgttgctacgaagtctcaaggcgccgaattatcgtaagcgtttaggcgaacgatatggtatttatgcgaatcttgttaagcctgcagaagatggggtcgtcattcatgctgcatcggtaggtgaagtgattgccgctacaccgctagtaaaacgtattcagaaggaatatccacatttaccaatcacgttcacaacggttacaccaacaggctctgaacgcgtaaaagccgcgttcggggatagcgtgacgcattgttatttgccttacgatttaccttgtgtcatcaatcgttttattgattttattcagcctaaagtattcatcgtgattgaaacggagctttggccaaatttgattgattgtttggctcgtcgaaatattcctttcattgtggctaatgctcgtctttctgcgcgttcagcgagacgttatggcaaagtcaaacaacatctacaacgaatgttttctcaaatcagcttaattgcaccgcaagatagtattagcggaaagcgttatttggcgttaggttatgagaaagatcgtctgcaattaaccggcaatattaaatatgatcttgtggtcagtgacgaattactcaaagacattgcgacacttcatgagagctgggcgaaagaccgtcagatttggattgccgcgagcacccatgaaggagaagaagagctcattttacaagcgcatcatttgttactaaaaaaacatccaaacttattgttattgctggtgcctcgccatcctgagcgttttaatccagtggcagatttaattgaaaaagccaactttaactttatccgccgttcaacgggtgagattccttccgagaatacccaagtgattctgggcgatactatgggtgaattgatgttgatgtatggtatttcagatattgcgtttgtcggcggaagtttggtcaaacatgggggacataatccgctcgagcctttggcgtttaaattacccgttgtgagcggaaagtatactttcaatttccctgaagtctttacttcgttgctagaagtacaaggtgtattgcaaatcaactcaacagaaaaagcattggcagagattattgataagttattgaattcaaaagacgcgcgtcagcgtttaggcaatgcaggctatgaggtgttaattgaaaatcgtggcgcattacagcgacttttagatttgcttcatccttatttaaccaatatttcggagaaccataaatgacaagcgtaatttaccccggcacgtttgacccgattaccaacgggcatttagatatcattgcgcgaagtgcggtcattttcccgaaagtttttgttgcggttgcgaatagtccgagcaaaaagccactgttctcattggacgaacgtgttgagctggtacgtcaatcggtcgctcatttacccaatgtggaagtatttggattctctgatttactcgcaaatgaaattaaagctaaaaaaattactgcgattattcgtggtgtgcgtacaacgacagattttgaatacgaattacaattggccgcgttaaaccgtttattaaccgatggtgtggatagtttgtttttcccaccaacagaaaaatgggcgtttgtgtcttccacgattgtacgagaaatttatttgcaccatggcgatgtgaaagaactggtgccggaagccgtttatttagccttaaaagcacgtcgtgaatgaaaaaaacacttctgattttaaccgcacttttagctttaaccggttgtggtacggtggtgaaattaattgccccatcggagaaatacacaccttacgcgggtgcggcttatgatttagagatggcacaaaaatggggcttacctattttagatttgccactgtcatttttattagataccgcattgttgccttatgcgtggtcaaattaatttgcattaagatatgaaactcaatcttcaacaacaacaggctgtcgaatatgtcagcgggccttgtttggtgctagcaggcgcaggctcgggtaagactcgcgtgatcatcaataagattgctcatttgattgaacactgtggttatttacctaaacagatcgccgccgtgacctttaccaacaaagccgctcgtgaaatgaaagagcgtgtagcccattccattggtaaagaaaaatccaaaggattgattgtttccactttccataccttaggtttcgacattatcaaacgggaatataaagctttaggctttaaatcgaatatgaccttgtttgatgagcacgatcaacttgccttactcaaagagctgacggcagatgtgctgcaggaagataaagacttgctgcgtgaattaatttccgttatttccaactggaagaatgatttggtttcgccaaaacaggcttatgccttagcgaaagatgccaaatatcaaacttttgcaaaatgttatgagcgttatgcagcgcaaattcgtgcttacaatgcgttagattttgatgatttgattatgttgccgaccttactcttcaaacagaacgaagaagtgcggtcaaaatggcaggagaaaatccgctatttgttggtggatgaatatcaagataccaatactagccaatatgaactgattaaattactggtaggcgagcgagcttgctttacggtggtgggggatgacgatcaatccatttattcttggcgaggtgctcgtccccaaaatatggtgcgcttgcgtgatgattttccgcgtttgcaagtcattaaattagaacaaaattaccgctccactcatcgtattttgcattgtgctaacattttgattgataacaacgagcatgtgttcgataaaaaactgttttccaacttgggcgaaggtgaaaaactgcaagtcattgaggcgaaaaatgaagagcatgaagcagaacggattgtggcagaattaattgctcatcgttttagccgtaaaaccaaatttaaggattatgccattttgtatcgcggtaatcaccaatcccgtctattggaaaaagtgctgatgcaaaaccgtattccatacaaaatttctggtggtacgtcttttttctcccgcgctgaaattaaggacatgatggcttacctgcgtttagtggtaaatcaagacgatgatgcggctttcttgcgtattgtgaatacaccgaaaagggaaattggtaccgcaacattgcaaaaactaggcgagttggcacaggaaaaacatatcagcttatttgaagcgatttttgagtttgaactcatgcaacgtgtaacaccgaaagcttatgatgccttgcaaaaatttggtcgttggattgtggagttaaacgatcaaagtttgcgttccgatccagaaaccgctgtgcgttctttactttcctcattgcattacgaagaatatttgtatgaatatgccaccagcccgaaagccgccgaaatgcaaagtaaaaacgtggcaaccttatttagctgggttgaggagatgctcaaaggcgatgaggtgaatgagccgatgactttaaatcaagtagttacccgtttaaccttgcgcgatatgatggagcgaggcgaagacgatgatgagagtgatcaagtgcaattgatgacgctgcatgcctctaaaggtttagagtttcctcatgtgtatttaatcggtatggaagaggggattttgccgcatcaaaccagtattgatgaagacaatgtggaagaagaacgccgtctagcttatgtgggcattacgcgagcacaacaaacgctgactttttctctttgtcgtgaacggcgtcagtttggtgagttaattcgtccagagccgagtcgtttcttggcagagttgccacaagatgatgtgcaatgggaaaaagataagccaaaattgacggtagagcagaagcaacaacaaacttctagtcagcttgatcgtctgcgggcaattttaaaaggctagagatgataaaaattaaagtgcggtgagaaatatatttgttttttcaaccgcactttatttatgcaaaatgtagataaatcaagcaaccaatattgctttttcaaaaaatgatttgacatattttcaaaaaaacgtattataccgcccacacaccgaatgtggtgagatggccgagtaggctgaaggcgctcccctgctaagggagtatggggtcaaaaactccatcgagggttcgaatccctctctcaccgccatttgttgttagttttatttattctgcacccgtagctcagctggatagagtactcggctacgaaccgagcggtcagaggttcgaatcctctcgggtgcgccattttaaatcggctctatcagttaaaatggttacgaataataaaatatcactacgcacccgtagctcagctggatagagtactcggctacgaaccgagcggtcaaaggttcgaatcctttcgggtgcgccatcttctctcttcaaacttttctttttatcaaaaacaattaactactaattcagttattttcctcgatcatcaatagtttttaataaataatttccttgtatgtctgtgatacttctaaaaccaacattcgtgattttataagggaaatttgtcttgtattcgacgttatcgtggtgatgcccatggaaaacgtgtcttacccctaatttttcagcaagttgattaatcacacgaaatcccattggatggggcttcggtgcttcatggcaaatcagaatatcggcttgctcgttttcaatggcttcaatatcagaagggaaaatagaagtgcgatgacgcaatggtacaccgccacgccaaattttttcttgcgggctatattggcaatagtggatagggtcaaaatacatcggtttattgggtggcatccagatttgtcctcggaatacgccacctaagccggcaatgcgttgaccttggatttcaacaacacgattatgcaaattgcgcgatttccaatgtgtaccccaaatcgcctcaaatgcggcaacggttttgctatcatggttgccgtgaataaaccaaatatcacaatattttgcgagtttatctaattcatcaggcgaagaaagctgcaagtcgcctaaaataatcagggcaacgttgtcattttcttgcacgaaaggataaagatgttcataacttccgtgcggatcgcctgcgaataaaatcatgttatttctcggtggtcaatgtgcgtttagtatgctgtaaaccttcaagttcttcatcatttaacactttttccacaacagatttcacttggttataacggtctagataacttggtgattcaatttcaatgtaaggcactttgtatttatctaacaatttcttcaataactgttggaattgttgacgttgtttttggctgcctagactacgtaagccatcatccacccattttgtgttgtttttcaataaaatagtgacatcaaatgggtattctttgatcatagaatctaagaacggatgcgctttaccttcgtattgaatacaaaaagcttgcgtggtaatgaagtcggtatcaataattgctactttatgggcgtgacgtacggcataatcaatatagcgttgatgacctaatgccatttgtggatagtcagaatattgcatggcttgctcatcgccacctaatttttcaaagacatattcacgaccatattcccaggcagaagtggtattgaatacagcagcaagcttactgaccaagacacttttaccactactttcaccacctaaaatggcaatggttttcgcaaagaacggacgaacttctttcggaatgaacttccaatattggaaaggtgtagtacgaattttcgttgcggatacgttaaagaaagagcgatcaggatccactaaagaaacttcgagtcctaagtatttttcgtatggtgctttgtcttgtggctcactactaaataccatcgtcggggtaaattgtttttcttcaaatagattttttaccgcctcactccaagcttgccagccattcggataacttggaatgccatcttcaactaagtgatgaataaaaatgtgatcattttgatatttaaagatctgttgcatccagcgaaggcgatcttgtaccgtcggcatacgcttcattttactatcataaaacagctttaaatcgcgttcggtatcgctacagacaatcacgtgaagctcatctactttactgaatgcttcataaatcatattaatatggccggtatgaactgggtagaatttcccaaaaatcacacccacttttttatcgtgtttgttcgacataatgtatccttcgctaaatcgccattgcatagtggcagtatagccctattttatgcaatctttgtgtaaataaaaacatttttcattgaatgattttttaccgcgacgttttgcgttatactacgacctgcattctcagggcagggtgaaattccctaccggtggtaacagcccacgagcacttaaaagtgcggtcaattttgattaagtttttacaaaattgtttcgctttgtccttttaaggttagcagatttggtgaaattccaaagccgacagtatagtctggatgaaagagaataaaacggattgggttcccaattccgttctatttatttgcatttctcagccctgattctggttaattttaacgtaacaacaaaggaaattacgatgaatcagtcaattttatctgcatttggtgcgaccggcgaagaacgggtaattaacgcattgaacgcattcaaacaaggcaatggcgtattagtattggatgatgaagatcgcgaaaatgaaggcgatttaatttttcctgcagaaaccattacgccagaacaaatggcaaaacttattcgttatggcagcggtatcgtgtgtttatgtatcaccgatgaacaatgcaaacaacttgatttgccaccgatggttgagcataacaatagcgtgaataaaaccgcgtttaccgtgacgattgaagcggcagaaggtgtgtcgacaggtgtatcggcgcaagatcgcgtcaccacaatcaaagcagcaattgcggatcatgcaaaaccagcagatcttcaccgtcctgggcatgttttcccattacgtgctgcagaaggtggtgttttagcacgtcgtggtcatactgaagcgtccgttgatttagcgcgtttaagtggttttaaaccggctggtgtgatttgtgaaattacgaatgatgatggcaccatggctcgtgctgcagaaattatcgaatttgcgaaaaaatttggttatgcggtattaacaattgaagatttagtggcatatcgtcaaaaacaccagtgctaattaaatgcttggaaaacaaaagtgcggtcagaaaatcttttaaattctgaccgcactttgcgttttaggcttaattcgtttccacaaagcttaatgccgtttcgaccacttcgattcctgcgccttgcttaaaggcattttcacttaaatagcgtcgccattgtcttgcccctttgcagttttggaatgcgccaagcatatgtcgaacgatatgatttaaataaacaccttggctcagttgtttttcaatataagggaacatggcttccaccgcttgtcttggtgtgacgatatccgcattggcatcaaaaagcatttgatcaacatagcccaacaacgacggattttgataagcctcacgcccaaccatcacgccatccacaaattgcaaatgatgtttcatttcttcgatggttttaatgccaccattaattgcaatggtcaactgcggaaagtctttctttaattgataaacacgatcataatccaaagggggaatttctcgattctcttttggacttaatcctgaaagccaggcttttcgtgcatgaacaataaattcttggcagcctgcatgatggactttttcgataaagtcgcagagaaattcatagctatccaaatcatcaataccaatacgcgttttcacggtgacaggaatattcacgacacgttgcatttccgaaatacattctgctactaaatccgcttttgccattaagcaagcaccaaacatgccgttttgcacgcgatcggaagggcagccgacattcagattaatttcatgatagcctctttcttggactaatttggcacaatgtttaagctgtgcgggatcacttccaccgagttgtagggcaactgggttttcttgcaaatcaaaatctaaatgatcgtatttcgcatgaataatggcgggagccgtaaccatttcagtataaagcaacgcctttttactaaattggcgatgaaaatagcgacaatggcgtgtcgtccaatctaacattggcgccacggaaaagcgtccacgataaaagtgcggttggttttctgacatattttatttctcttgaatcttgttacggcgaagatcttctgcttgttgttcctgcattcgttgacggaaacgtccagccgcaaagtggtaaaaaggtttcggactaaattggcgcgaaattatggaggcaatgatactggaaatcaagagccaaatcagcacaggttgagccccagtcatttccatcaccactacgctggctgtcacaggggattgtgtgccaccggctaaaaaggctgccatacataaaatgaccaagaagcgttgatccaccatgccgttactgatttcccataacatggtgccgatacccgcgccagtagtgagagatggcgtaaaaattccgcctgcgatgccattccaataagtcgtaaccgttgcgaagagttttagtatccccacttcaggcgaaacgagctgtccttctaatgctcttgcgaccacatcataacctgttccataggtttgtccttcgctgtaggtgcccagagcagccaacactaaaccaagtaataaggcaatataaatagggtgttttcggatccaatcacgccatttgattggagaaagtcccgcgagtcctttggcaagcagtcgtccaaatataccacccagtacaccgcagacgaggccacaaatggcaagccaaagatataaataaggaatagaggttgtgcccctataaacaggaaagtaagggctattgccttgaatcgccactaaaataaaaccggccgctaatacaccgagcaacacgcggcgttcccagcgtaacatcacacctcgaccaagttcttcaatagcaaaaatgaccccagctaaaggggcattaaatgcggcagcaagaccgcctgctgcacccgttgcgatgagttcattcgtacttaagccgcggaaagcaaagttgtatttacgacagaaattcccccaagctagcatgactgcagcacccacttgaacagaagggccttcacgtccaacagacgcaccgataaccattgcaaagaaagtaagtggaattttccaaatggtttggcgaaatttaaccagttttgttttataaccattataaggaagattaatggaggcaatcacttgtggaataccactgccgccaacataaggcgtgtatttagcggtaaaccaggtgagaaaagcaagaccaagcggtaaaacgatccaaacggcgagagggtatttggctaaccaataggcattaaattcaagtcccatgtcggcgagtttcgcaaatccaaaggaaaaaagtgcaacaaatgtcgcaccaatcagtagacatataaattctagggttttatgagagatacgatgggtttgtcgaagttttttatggtagaaataacgtaaatgaaaaatgaatgaacgtaacataatgattgccaacaaaataattctgtttgaaattataaaagcctagtcacagacaggcaattgatttgggaaagtgcggtcagttttgtgtcgattttttatcaagcgatcctttgcgatcctatttctgtttaaatattgacaatgtgaggcgaaaccattaaaattcagcgtctatttcttctgtctattggatggagagatagattttgtaacaaacattctattatgaataacatttaaactggagcttttttaatggcaactatcaaccagctagtacgcaaaccgcgtgtgaaaaaggttgtaaaaagtaacgttcctgcattagaggcttgcccgcagaaacgtggtgtgtgcactcgtgtatacacaactacacctaaaaaaccgaactcagcattacgtaaagtatgtcgtattcgtttaactaatggctttgaagtaacttcttacatcggcggtgaaggtcacaaccttcaagagcacagtgttgtgcttatccgtggtggtcgtgttaaagacttaccaggtgtgcgttaccacactgtacgcggcgcattagactgtgcaggcgttaaagatcgtaaacaaggtcgttctaaatacggcgttaaacgtcctaaagcttaatggaactccgttaagtaaggccaaacgtctaaattagtaaaaatttaaatcagaaactccagtatcacattagctcactttaaagtgcggttaatttttatagagttttggatatcctgaagattaaatatacggagaaattcgcaatgccacgtcgtcgtagtgttgaaccacgcaagattcttccagatccgaagttcggttcagagttacttgcaaaatttattaatgtattaatggtagacggtaaaaaatccgttgctgaaaccatcgtttacggtgcgttagacaaacttgcagaacgcacaggtaaagaacctttagaagcatttgaaattgcacttgaaaacgttcgcccaactgttgaggttaaatctcgtcgtgttggtggttctacttaccaagtgccagttgaagtacgtccagttcgtcgtaacgcattaggtatgcgttggatcgttgaagctgcacgtaaacgcggtgataaatcaatggctttacgtcttgcaaatgaattatctgatgcatcagataacaaaggcgcagcagtgaaaaaacgtgaagatgttcaccgtatggctgaagctaacaaagcatttgctcacttccgttggtaatacgcttttaaaatttaagggcttcatcctcgatgaagccttacccttatataaacagatattaaacttaacaaggttataataatggctcgtacaacccctattgaaagatatcgtaatatcggtattagtgcgcacattgatgctggtaaaactactaccactgaacgtatcttattctacaccggtgtaagtcacaaaattggtgaagtacacgatggtgcagc

SEQ ID NO: 802 - DNA, 21397 bp, unidentified
  source 1..21397: mol_type = unassigned DNA
gaaaggaaatacaacatgaaaacctatggcgtaattatggcaggcgggggcggaacccgtttctggccgctgagtacaaaggcagagccgaaacagtttttaaacctgtccggcaaagatattctggttaacgagacgatcgacagacagcatgacctgatggatcagaaggacatttttattgtgaccaatgagacacaggcaaagatgatgaaggagcgtacagcaggcagaattgcggcagatcatattctggcagagcctgcggcgcgtaatacagcagcgtgtatcggttatgcggcgatggaaattctgcataaatacggtaacggcgtgatgtgcatttttgcggcggacgcttatattcgcgatgaggcggaatacacccgcgtgatgaaggaagcggttcgtgcagtggaagagacggacgcacttgtgacgatcgggattcatccgacgtttccctcgaccggctatggttatatccgcagcgtggaagaggttggaaaagtatggcgcaaggtagaagaatttgtggaaaaaccggatttggaaacggcgaaaagctatctggcatccggcagttatgcgtggaacagcggcatgtttgtctggaaagcctccacgattcttcgctatttcgaagaacttctgccggatgtgtacgcctgtctgaaacagatcggggcagcgctcggcacagaaaaagagcaggaggttctgcatgaggtttatccgaccatcccgaagatttccgtggattacggcattatggagcgcgcaaagggtgttctgatgctggaaggagatttcggctggaatgacgttggcagctgggatacgctggatgcagtgcgcacccgggatgctgccggtaacatcagctccggcgatacgctgcttctggatgcgaaaaactgcgttgtatacggcggtaaaaagctgatcgccgcagtcggcgttgaaaacctggtcatcgtagagggcagggattcgattctggtctgccctgtcgatcaggcacagcgcgtcaaggaagtcgttgagacgctggaaaaagaaggcaggacggaacggctttaaacggcgaaaaaacgcgaaatatcacgaccgttttccgtttggtttccaaaatctgagtgttagaataaagtagaaagcagcggcagaatgttcacagtgcggtcacactgttggtgcggaaaaaagactcagaggaggaatcagaaatggctgcagaatggaaagaaacactcgaaacggagcgggagatatcggcgtttatgctggaacttgggattccggcgcatttgaggggatattattatctgagggaggcggttttgctggctgtctcggatatggaactggtcggcagcgtgacgaagctgttatatccggtaatcgcaaggcgttacaaaacaacgcttcagcgggtggaacgcgcgatccgaaacgcggtggaggtgtcctgggaacggggcaatccggaggtgtttgaggatctgttcgggttcagccgggagacgggcgcgccgaggccgacaaacagcgaatacatagcgagaattgcggacaagataagaatggacgcaactacaggagagaaacatgttactgagcgtaatcgtaccttgctataatgaagaggaaaacgttccgattttttatgaggaaatgatgaaaaattccgcttttttggagcaggaaaaactggagctggaaattatttatattgatgatggttccaaggacaataccgcagcggaggttcggaagcttcacgaaaaggatgaacgggtgcatctggtgtccttttcccgcaactttggcaaggaagcaggaatttatgcgggcttccagaaagcaaagggggactatgtcgtgatgatggacgctgatctgcaggatcctccgtcccttttaccggagatgttttcctacattaagcagggctacgacagtgtggcgacaagacgtgtgacccgaaaaggcgaacctccgatccggtcgttttttgcaaggatgttttaccgcatcatgaataaaatttccaaaacggagatcgtggacggcgcacgcgactatcgcctgatgacgagacaggttgtggattcgattctttcgatgtgcgaatataaccgttttacgaaaggaattttcggctgggtcggctatgagacgaagtggctggagtatgaaaacgtggaacgcacccacggcgagacaaaatggagcttctggaagctgtttttgtattcgctggatggaattaccgcattttcaacagtgccgctggcaatttcgtctatcatgggcgttgtgttctgcatcgcagcgtttgtggcgatcatcgccctgattatcaaaaacctgatttaccatgatccgacgcccggttggccgtcgatggtatgtattattctgttggtttccggcgtgcagcttttctgcctgggaatcgtgggacagtatctgtccaagacctatctggaagtgaaaaagcgtccgatttatctggtaaaggaagaactgtaatgaattatgagaacctgatcagcattgtgatgccggtttttaacgcccaggcgtatctggaggaagcgctggaatcggttcgccgccagacatggacggactgggagctgctggtggtagacgatcattctacggacgggagcgcaggtcttgtgtcagaaatctgcagaaaagacgcgcgaattcggcttctttcccagacggacggggtaaagggcgcggcaaatgcaagaaatttcgggacagcacatgcaaatggacgttatctcgcatttatggatgcggacgatatctggcgggtggacaagctggaacgagaaatggattttttgcgggaaaaagacgcagcctttgtattttgctcgtatgaatttggagacgagcatgcggtcggaaccggcaaaattgtgcgggttcccgatcagctgacttatcagaaagcactcagccggacggtcatttttacaagcacggtgctgtttgaccgggaaaaaattgacaaggcgcttttgcagatgccggacgtgccgagcgaggacacggcgatgtggtggcagattttaagaaacggacacgtcgcttacgggttaaaggaaaatctggtgatctacagaagaccggaaaaatccctttcctcgaacaagctccgggcgattacaagaatctggggactttaccggaaacaggaaaaaatgtcggtgatcgcaagcgcagcatgtttttgtatgtgggcggtgcgcgctgtgtggagaagaatatagcgggagaacggaagatgaagaaaaacgattctgtcaagcggctgattatcctggcgcttgggttgattgggctgtgcgtgctgactgctttttatgcgcacgactggttcgcctattattatcatcatattgcatggaaaacacataaccgttttaatgtaaacggtcatttgctgattgttgctctgtatttcatattgctctttttcttttccaatacttatggagcacttaaaatcggctatctgaaaccgctggatattttcctgtctcagctgttttcccttctgtgcgtcaatgtaatcagctatgcgcagctgtccctgatgtatggctggtttatcatcggcggggggcatatggtgtcgatgatgctgtatcagctggtgtttgcagggctgtggggctggctgtgcaatctgatttaccgtcgcgcgtttcctccgcgggagctgcttttggtgcacggtgagcgcccggtagaggatatccttgggaaatttgcaggacggaaggataaatatcatgttgcaaagtgcatgaacatcaaagaggggtacgatgcggtgatccgcgaggtcggaaagtatgacgcggtcgttctctgggatattcatacgatggacagaaacgtgctgctcaaatattgctacagccattcgatccgcgtttatatgatgccgaagattccggatgtgctggtaaagggaagcgagcagctgcacttgtttgatacgccgattctgctgacgagggaatatgcgctgaacgtagaacagagaattgcgaaacggtttatcgatgtagtatgttcgctgatcctgattgttgtgacatcgccgatcatgctgattacggctgtggtgatcaagctgtatgataaaggtcctgtgctgtacaagcaggtccgctgcacgaaggatgcgaaggaattttatattctgaaattccgcagcatgcgcgtggacgcagaaaaggacggtgtagcgcggcttgccgccaaaaacgattctcggattacgccggtgggcaaatttatccgtgcggttcgtatcgacgagctgccgcagctgttcaacattttaaagggcgagatgtcctttatcggtcccagaccggagcggccgcagatcatccgcgaatatatagaagaaatgccggagttcgcataccgtaccagagtgaaggccgggcttgcgggatatgcgcaggtatacggaaagtacaatacaacgccgtatgacaagctgaagctggatctattttatattgaaaattattccgtatggctggatttgaagctgatgcttctgacattgaaaatcctgtttacgcccgacagcacggagggcgtggacgagaagcaggtgaccgccatgaaaaaacaggtgcaggaggaagaaaaataatgcctctgaaaagagatgaagcattttggaaagagggcatggacgaaaaacgctttgccctctgttgtattcataaaatatggatctgtctggcggcagctttggctggcgctgtttttgctgcggggatttatcttggtgtgcggcagctgacgatggggccgaagcagtatcggtcggaggttttatattcgatcgtctatgacatcgacgaggatgacgaggttttaaaagaatttatcaacgaatataacgcctatacctggggggatatgatgcgctccgaccgtgtgatggatacggtgcttttgcagctgccggacgtggaacggtccgtgattgaggcttcgatcagcacggaaattgcgtctgacccggaatttctgacggcgtactttacgacaggggacgcagcactgtccgaccggattgcagcggcctataactgcgcgatgacggcatttggacagacgatgcagggacgcggtctgacggcaattgaagtatggaaaaccgtttcggcacaggcggtgcttccggaaaataaagtgaaaaatgcggcggcgctcggtctggtgctcggactgcttgtcggaatcttgggcgtggcaatctggtatgttctggacgattctgttttgctcagctcagacgtggaaaaacgctgcgcaatcccggttctgggctaccgaacagcaaagcccgatgaacagttcggtgcgcttctggatgcgcagctgagagccaaagcgtctcagaccgcttttcaggaaatgtcgctggacacggtgctttccgggacgatgggacttggggaagaagaaaagattccgcttatccttttggttcgctggaacacaccctgtattaaaaaactcggacttgcccttgatttgcttgctcagcgggagatcgcggttgtgggcgtgatcctcacggacgcggacgcacggtttttgcacgcttactacagagtgtaggctgccagttcactcgtggcagcctgtaggcagattccatgctcgcatgaaaatttgcctacagactgctacgaagggagcgcccattttatgagcaaaaaggagctgcgaagcagcggaaaacatcgaagatgcgattcatgacaatagaatgtccgcggagcgtgcattctattgtattgcgaatggcgcgggtgaactggcgcaggattacaagaaacaaaggagacggctcatgaaactgcagattctggtttcctccctgaatcaggaggtcaagtcgctggcagagaaaatgaatctgcaggcggatgcaattctcatcaatcagtgtaacgaaaaccgttacgaggaatggacgcaggacggtcatcggatccgctgctatcatctggcggagcggggggtcgggctgtcgcgcaacaacgcgcttctgcgtgcggacgccgacctgtgcatcttttctgatgaagatatcgtttatgacgacggtgcagttgagcggattatcgaagggtttgagcagcatccggaggcggacatgctgttattcaatgtgcgcgtgcaggagagccgctttacctactggaattcgttttataagcgggtgaggtggtataactgcggtcgttatccggcatacagctttgcactgcgcacggcgaagatgcacgaaaagaatctgacctattctttgttgttcggcggcggcgcgaaatatgcaaacggagaggatagcttgtttatccacgactgcctgaaagccgggctgaaagtctacagtattccggtcgaaatcggagaagaacagcccagaccgtcaacatggtttttcggctttgatcgcaaattttttcacgacaggggcgttttgtatcatgtgctgtacggaaagctggcggcggtgatgggatttcggtttctgctgaaaaataaatccaatatgaattctgagagctgcccggaggggctgacttttgatgaggcgaaaaaagcgcttctgtccggaatccgcgacgcaaagggagggctgtaaatggtattttattttctgattacagcggttacgattgccctcgcggggctgatggacgcggtctggacgcgctcggggcaggaggcaggcggtgtagtgcggtgcgctggacaagccgccgagagtgcggcatccgggaatggcaggcgcgcccgcggcatcccatcatccggcggcggcttgtttccggcgggcgtttcccgacgtcgcgccttcgacatcgtgtgtctcgctgctattttcctgattctggcgctcgtgagtgcgctgcgtctggaggtcggtaacgattacggcaaatatgtcgagaattttcacgaaatctgggcgggaaccgatcaggcgtatgtggtgacggaagccggattcaatttcgtggtatggttgatttatacactttccgggtatgaaaattatctgctggtattcgcggtgttcggcgcggttacggcttttttgtttttaaaggcgctgtacgggcagagtgactgcttctggcagagcttcgcgatgttcatgctgctgggcgtatattttcggacatttacgacggtgcgttattatctggcacttgcggcagcgctgtatggaatccggtttgtactgcgcaggcagtatggctgtttcgtgatctggattggcattgcggcgctgtttcataaatctgttctgatggtgcttccgctgtatttgttggctgtgcttccgtggaaaaaatggattgcgccggcgctgactgtgatcggagggatcggttttgttttccagcgtccgcttttaaatctggcgctgacgtggtatcctacatacagggacaccgtatatctgtcacaggatatcggtctgaaagcgaatgcgtccggaatcctccggtgcgtgctcgtttttatgctggcggcagtggttggcaggtgtggaatggaaaaggagcagaaccgtttctacctgaaattaaattttttcggactgctgttttatacctgcggttcgtttttgccactggtatcgagaatgtcctattatatgattacgccgcagctgctgctcgttccgggactgcttggctgcgtggagaaccggaagcggaaaaatattttaacagcacttgtggggatcgtatgtctggggtattttttgtggtttttaaaaacggcatccggaagcgggatgcgcgtgcttccctataagacctggatttttacggataaggagtggatcaatggcgcagatttcttttagcattgtggtagtatgcttaaaccccggcgaaaagctgttgaagacggtgcagagcgtattgaaccagaaatacggaaattatgaaattgtggtaaaggacggcggttcgacggacggctccctggaacaacttccggcggatagcagaatccgggtttatacaagaccggacagtgggatttatgacgcgatgaatcaggcgatgtcctatgtgaccggtcagtttgtccagtttttaaattgcggagatcttttgcacgacgatatggtgctggaacggcttgcagctgtgatggagcgcaagcgcagcaggggagccgacggggaaggcctgggacataaggaaaaagagcggattttttatggaaatcaatatcatgaggcgtggggcagcgtgatctattctgcaccggaggtcaatgattttacctgttacagaaatgtgccctgtcatcaggtttgcttttacgacgtccgtctgtttgcagagcgtggttatgacgtaaaataccgtgtccgcgcagattatgagcatttcctgtactgtatttacgatcggaaagcggaagcggtttatgtggagatgattgttgcggattacgagggcgggggcttttccgagacaagggagaaccgtcggatttccgaaaaagagcatgccgaaatcacgaaacgctatctcggacgcgacaaggcgctgcgttataagctgctgatgcttctgacactggcaccgcttcggacaaagcttgcagaggacgaaaaatattccgagtggtacaacgggatcaaggcgaaaatttacggaaggtgcggccataaggacgaaccgggggagaatcggaaatgagagtgttatgggtatgcaatattatgctcccggtaatcgcgcaggcgctttcgcaggaatatagcgtgcgggagggctggctgtccgggatactggggcggtatctggagacagagaacggcgcagagttgagcgcagcggacgtgacagacagcgctgcatcgcccggcggacggcagcagggagccgaaactgcggctgcactgacgctcggtatcgcatttccggttgcaccgggcagggaggagttatcgcagcgtctgcagcttggcagctataaaaaagaagtcgcctgctatggctttgcagaggatttggagcacccggagcgctatgacagcgcgatggaagcgcgttttttgcagattttagaggactttcagccggatctggtgcatatcttcgggacggagttcccgcatggctatgcctgtgcgaaagtatttcacagaccggagcggacgcttgtgggcttgcagggactttgtatttcctgtgcggacaactacatggcagatctcccggaaaacgtacagaacagcaggacactgcgagatattttaaagaaggacagcatccggcagcagcaggaaaagttttatcagcgcgcggaaaacgagaaaaaactcctgttgtcagtcggacatgtgacgggacggacgacattcgataaagcgatcagtttggagataaatccatcccttgtttatcataccatgaacgagacaatgcgcccgcagttctacagcggatgctgggagatcgaaaaaactgtgcccggagaaatcttcatcagtcagggagattacccgttaaagggctttcactatctattgcaggcgatgcaggaaatcctgcaaaactgtcccgaggcgcatatcaaggtggcgggcatcagcgtgctcggcgtaaacggaataaagagcagaatcaagattccggcatatggaaaatatctgcgcaggctgattttgaagaatcgcctcgaaggaaaagtgcgtgtgctgggaaatctttctgcggaggagatgaagcgggaatatttgtccgcgcagatatttgtgtgtccgtctgcggtggaaaattccccgaattccgtggcagaagggcagcttctcggcgtgcccgtggcggcgagcagaaccggcggaatcccggatattgtaaaagacggcgtaagtggtctgttgtttgaaaaaggaaacgttcacgagcttgccgcgtgcgtcagccggattttgacagataaacagctggcaaaggagttgtcggcttcggaacgggagactgcggcgaagctttacaacggtgagaacaattatcaaaaactgatagaaatttatcaaagcatcgaatgaacgaagctgctgaccggagcaggaaggcgggaatggaggaaaacgtgaaggctgtttttatttccaattatatcaatcatcatcagattccgttttccaacgcactgtatgaacaactgggggacgattaccatttcatccagaccgagccgatggaagaagaacggattgcgatgggctggggactggatgcagcgactctgccatatgttgtttgggcggatcgggaggaagaacgctgccggaagctgatcgaggaagcggatctggtgtttgcaggctggacgaagcggctggatctggttttaccgcggctttcctcgggaaagctgacgtttcgggtgagcgagcggatttaccgcgagggacagtggaaagcgatctctccgaaggggctgcttgcaaaatataaagaacatatccggtttcgaaaccagccggtgtggcttttgtgctgcggcgcgtatgtggcgtcggatttttcactgatcggggcttatccagggaaaaagctgaaattcggctattttccggagacgctgcgctgtccgcaggaggaattgtttgccaaaaagaaaacggataaactgcaaatcgtctgggcgggacggatgatttcgttaaagcatccggagtttgcagtgaagttggctggaaaattaaaggaacaggggtattcgtttgagctgcactttgcgggaggcggtccgatggaagaggcgctgaagcaggaagcagcagcgctcggagtggcagagaaaatcgtttttcatggatttttaaagccgcaggaggttcgaagcctgatgaaacgctgccagctgcatgtgtttacaagcaactatctggaaggctggggtgcagtagtcagtgaggcgatgaacagtggctgttgtgtggtggcaaaccgtcagatcggcgcggttccgtttttgattgaggacggcgtaaacggtaaaagctacccggacggctcttatgaagcctttgagcggacggtattggagctgtgcgcgcagccggagcagatcacagcgcttggaaaagaggcataccgtacgattacagaaaaatggaatgcagaatgtgcggcgcagcgctgcctggaattttatgaaggctggaaagccggaaagctgccggagtgggaggatggaccgctctctgccgcgccgaagctttccgcacgctggagttataatgagggaacattggatggagaataaaacagaacaaaactgcctgatcagcgtgatcgtgccagtttacaatatcctggactgtctggagcgatgcgtcaacagcatctgcgctcagacctggaaaaatcttgagatcctgctggtggatgacggatcaacggacggaaccggaaagctgtgcgacctgcttgccgaaaaagatgacagaatccgggttttccataagccgaacggcggttcttccagtgcgcgaaaccttggaatcagtatggcaaagggaaaatggatcgggtttgtggacagcgacgactggatcgagccgcagatgtatgaaaggctgtatgaagctgcgaccgctgcaggcacttcaattgcgcaggcttcgcgggatgagatcgacgaggattaccacaaaagaccggacgtctgtacgccgccggaacaggaagttacctgcacggcagaagattttctgaaaacgctgctgctgcatcagggcgattgctcgttctgtacgaagctgatcaaaaagagcctgtttgaatgtcaccgcttcccggagggaaagttaaatgaggatttccgcctgctggttgagcttttatgtgagggcgaaagggtgcggatcttgccggagcagctgtatcacgttttttaccggatcgggagcaatacgcgccggaaagataaaaacgatttttcgagagtgtttgaagatatcgtagaaaatgcggattatatggagcagctgacccgggagcgctacccggagcttcgggaatatgcggtgcgcttcgcactcgttcagcgcctggattatctgctgcacatcccggtgggacggatggtggatacagatgcgttttacaaatcggtaaagcagtatctgcacgggcatttttcggatacgcggaaaaatccgctgctggataaaaagagcagagcctatctgacgcttctgacgattgcgcccaaaaccgtacgccgcgtgcacggctggatgatgaagctgcggggagtggagtgaaaaaaacgccgtaacatcaatctctattgagaggatgctacggcgttttggcgtttgaaatttatgttacagttcactcgcgccattcgcaaaagcgcgtcttcgacgctctccgctgcttcgcagctcatttttgctcataaagtggcgctccctccgtacctttttgtaagcagattttcatgcgagcatgaaatctgcttacaaaaaggtacgagtgaactgtaacgaatttattttacaggctttgcgcctgctttttcctgcagtttttcgatgtttctcttgaaccagttcttctttttctgattctcgggctgtaccagcgttccgcggaccgccttaacacttgttaagtagatgccgctgacggttgccttgacttcttttttcacaggaaccaggtcgaaaatcttctggtcgcagactaaggtaacgatctgcggaccgacttttgccttgacaatcggaagcttggaacggcgcatcatcttcggcgtattgtcgatgactgactgcggaagtccggcttctttgagcttcatgattttcttgtcaattacaagcatggtcacattctgcttataggcttcaatctgctgctgctgttcttcctgttttttctgcatctttcttccaagaaaataaagaacaacgactgcgacgatcagaatggcaaggatgaccagcaataccactgcccaggttttcatagtggtgaatcctcctctttctttgtactgcacagcggcgctgtctgtacggtgtgtccgcttagcattcttatagaacattctagcagaatttacggtattgtacaaggagttttgttgaagttaatagccacctggggtataatgtatccagcacgaaagaaaaacaagcgacgccgaagacgcggttttgcgaatggcgcgggtgaacagtaacgtttttctcgtgcggatagcgagcggacggcctgcgaagcaggcaaggaagcgcggagcgcgagtccgcgagcattggtgaatgaggacagcgccgccttcggcgctgctgacaggaaggaacaggcagtaatgacgacgtgggtgcagttttggcaaacatttcaggaagtattccgctacacatgggcacatatggtatggatcaatctggttcttgcgattattattattttcttccagagaaaggaagcaaagtcagcgtgggcgtggctactggcgttgaatgtgctgccgggtctgggatttttaatgtatcttctcgccgggacggacatgcacaaacggaagatgttcaagatcaaaggaatcgaggagcagataaacgatgcggtgcgccgccaggaatacagcgtcaaaagccgcgagctggagcaggaaaacccggatttgaaggatttttcggatctggtcttttttaacctggaaagtgccggatgcatgatttccggagacaatgcggtagagattttcaccgacggcaacgacaaattcgatgctctgatcgaggatattaaaaatgcgggatcatatatttttttacaatattacatcataaaagatgacgtgctcttccagagaattcgggaggcactgctggaaaaagcggcacagggtgtagaaattcggatcttgtatgatgcgatgggttgtcggagcgttggaaagcacttttggaaagaaatggaaaagcagggcatccatgttgcggtctttttcccggctctgtttggcagactgcatctgcgtgtaaactacagaaatcacagaaaaattgcagttatcgacggaaaagtggcttatgtcggcggctttaatattggcaaagagtatatcggactggatccgaagttcgggcactggcgggatacccatctgagaatctgcggcagcgcagtcggtggacttttgctgcgctatattcaggactgggactatgcagcgagggagaatctgtttgaaaatccgaagtatttcatcctgccggaagaaaaagccggcaatgtcaaaatgcaaatcatttccagcggaccggactccgaactccagagtatccgggacaattacctgcggctgatccacaaggcaaaaaagagcatttacatccagacgccatattttataccggatgaatcgatccagacggcacttctgatggcaacgatgtccggcgtggaggtcaatctgatgttcccgtgcaagccggaccatccatttgtgtattgggcgacactttcctatgtcggcgagctgatcatggcaggggcaaactgctacacctatgataatggatttttacatgcaaaaggattgtctattgacggaaaggcgtgctgctacggaacagcgaacatggacatccggagcttcgaactcaactttgaggtcaatgccatgatttttgaccagaatatcgcaggggaaatggaacggattttccgggaagacttaaagtgctgtacgcggatcacaaaggaaatgtacaagagcagatctgtctggatccggtttaaggagcaaatcagcagactgctgtctccggtcttgtaacagcccaccaagtgtgataatatataggatattgcaattctatttactatggattttatgtccgtaagatgatgaggagatcaatttatgaaaaaatttatgacagccgttacggcagtgtctctgtctgccatgatgctggcaggctgcggcaaggcagatgtacagcaggagagtactgtgcaggaaagcactgcagctgagacagaagcagcaacagaaaccgaaagtgaaaccaaggtatacccggatgaagcatatctggatggtatcaaccttggcgactttgtagagctgggcgattacaagggcgtcgatgttacggttaccaaggcagaagtaactgacgagatggtggatcagtacattcagagtgttttggacagcaacaaaaataaagaagaagtagaccgggctgtaaaggatggcgatgttgttgatatcaaatatgtcggcaaaaaggacggtgtagagtttgacggcggttcttccgacagctacgagctgaccatcggctccaatacctttatcgacggctttgaagacggcgtgatcggcatgaagaaggatgagacaaaggagttaaaccttaccttcccggaggattacagcaatacagaccttgccggtgcagacgttgtattcacggtaacggtaaatcatgtttatgaagaaactgacgcggttctggacgatgctttcgtagcagcccgtaatattgacggcgtaagcacagtagcagaatatcgtcagtacgtttatgataacctgatgagctctgccaagagccagcaggaaacagagctggaaagaaatgttctggaggcggtaacggcaaatgcaaccttcaaggaaactccagaagagatggtaagccgctattatgaccgtctggttaagaacctgaccgctactgcaagcatgtatggaatcgatctggagacctttatgtcatacagctacggtctggctgcggatgaatatgaagacgagcttcagaaatctgcacaaagcgcagcagagcagattatggttatgcaggcgatcgcagaaaaagaaggtctgaccttaaccgatgaagagctgcaggcagatctggaaagcagcgcatccgaatatggttatgattccgtagacgcttatcaggaagcgattggcgacctgcgcggctacaaagaatatctgatgtctgaaaaggtaaccaagtatctgattgagaatgcgaacgtaaccgaaacagaggcgtccacagaggaagcgaccgaagagacaacagaaactgaaaccgagacaacaacagagacagcgaccgaagcagaataagccagggcacagctgacgcacgaggcgagtgaggagagagagcatggaactgacaagtgtaagacagttattcagagaaaaagaacagtttgccggccagaaggtgacagtaggcggctgggtaagaagcaaccgggattctaaaaattttggattcctggttgtaaatgacggtaccttttttgaaccgctgcaggttgtatacgcagcagacaagctggataattatgccgatattgccaaaatcggcgtcggagcagctgtcattgtaacaggtacgattttagagacgcccggtgcaaaacagccctttgagatgcaggcagacgaggttgtagtggaaggtgcatgcggaccggattacccgctgcagaagaagcgtcacagctttgaatatctgcgtaccattgcacatctgcgtcccagaaccaatacgttccaggcagtgttcagagttcgttccctgatcgcttatgcgattcatcagttcttccaggagagagatttcgtctatgtgcacactcctctgattaccggaagcgactgcgagggcgcaggcgaaatgttccaggttacaaccctggatttgaacaacgttccgaaaaacgaagacggtactgtggattattcccaggacttcttctgcaaacctaccaacctgaccgtaagcggacagttaaacggcgaaacctatgcgatggcgtttaagaatatttatacgtttggaccgaccttccgcgcagaaaactccaataccacccgccatgcggctgagttctggatgatcgagccggaaatcgcatttgcggacttaaaggacgacatggtactggcagagtccatgctcaaatacattatccgctatgtgctggagcatgctccggaagaaatgaacttcttcaacagctttgtggataagggacttctggaaagactgaaccatgtattgaactccgatttcggacatgtgacctataccgaggcgatcaagattttggaagagcacaacgacgaattcgattataaagtatactggggctgcgacctgcagaccgaacacgagcgttatctgacggagaaggtgttcaagcgtccggtatttgtaacagactatccgaaggaaatcaaggcattctatatgaagttaaatgaggatggcaagaccgttgccgctatggactgtctggttcccggcatcggcgagatcatcggcggcagccagagagaggatagcctcgagcttctggaacagcgcatggacgagcttggactgaacaaagaggattacggcttctatctggatctgagaaaatacggctccgcaagccatgcgggctttggtcttggatttgagcgctgtgttatgtatctgaccggtatgggcaacattcgcgacgtcattcctttcccgagaacggtaaagaactgcgaattataattccagtgaactggaataaaatgttacagttcacccgcgccattcgcaaaagcgcatcttcgatgctttccgctgcttcgcagctcatttttgctcataaaatggcgctctcttcgtggtttcttgtacacagattctcatgcgagcatggaatctgcctacaagaaaccacaagtgaactggaataaaaatattgtcgagcgggatgaacttttgggtttatcctgctctttttttgttgtatactgtataaagtgaaaactagtacatcgttttcgaaatacctataccactcacttgcctgtgaatccgattgcacaggtataaaagcctcagcgtagcccgctacgcctgcgtttttatacctgcacactcgaatccacatcctacgcgattggtatagttatttacgaaacgctgtaccagaatacagaaaaaggaagatacggatgggaaatcatcactggaaaaaaatagcagcagttatgcttgcggcagcgatcggaatacagcctgtctatgtgcaggcaaagacacgggaagaaattcagcaggaacgagaacagaaaaagagcgagcagcagggcacgcagagtcagtataagcagagccagagcaaggtcagcagtctggaagggcagcaagacgctttggaggaagaaatacaggagctggattcccagctggtagaggtcatcgccagcgtaagtctgatgcaggatcagatcagcgataccgaaaagcagatcgtaaaggcgcaggaggactatgatgcggcgaaggcgcaggaggatgcacagtatcttgcaatgaagaagcgtctccgttacctgtatgaaaagggcgataccagctatatcgagatcctgagcaacgcctccaactggagcggcatgctcaatcaggcgaattatgtggagaagctgtatgagtacgataaacagatgctcaaccgctacatcctgattaaagaagaggttgcacagaaaaagaacgatttggaagataaaaagagcgacctggaaacgcagaaatatgagctggaagaggaacaggcttccatgcagcagatgatcgatgagaaaaagtcccagtcgaacgatttcgacgcgcagattgcgaaagcgaagcaggaagctgcggcatataaagcgttaatcaaacagcagaattccgagctggcaaagctggacgaggaagaaaacgcaatcatcaaggccgaggaagagcgccggaaagccgaggaggctgcgaaaaaagcggcggaagaaaaagcaaaggcggaagccgaggcgaaagaaaaagctgcaaagagcagcgattccggcgcttctgacagtagctccaatcgctcaagcagctccgacagctcctcttcctcaggcagtagctccggcagttcttcgggcggcttaaagaccgttcctcctgcgagcggatcgagtggaagcgacattgcagcgtatgcctgccagttcgtcggaaacccgtatgtagcgggcggaacgagcctgacaaacggtgcggactgctccggatttatctgggcagtgtacaggcaatacggatacggcctgccgagaaactctgctgctatgagaagtgcaggacgcgaggtttcctatgaagctgctcaggcaggcgacatcgtctgctatgcaggccatgtggcgctgtatctgggcggcggacgaatcgtgcatgccagcacagcgagaacaggaattaagtacggatatgcgaattataagccgattctgacaattcggagaattgtgggataaaagaaaaaagttacagttcactcgcaccattcgcaaaaaccacgagtgaactgtaacttttattcatgacaatagaatgctcgcagagcgtgcattctattgttgctttaaagactctttttcagaaacttgatcgtttcgtcgatcagctgggatacggatagatcggcggttccgatgatgtggttgttgcagcggttgaccggaagcaaaagtttctgggcatggctctgtccgacggcaactgccatggcgggcgtcacttccccaagcagggagtctgcggacaaaatgccgagggggccgatgataaaatccgcatcccggcaggcaacaagcacgggattttctccggttgcaccgaagtcagccccggctttgagcatggcagcggttgcggttgcgttggtgccaatggcatacagttcacagttgggcagctgctctttacggaggcgggcagtcacaagactgccgattctgccgccctgaccgtcaattactacgattttcataaatcctccatttagagacattttgcacagaaaaaataggagctgaacaatattgttcagctcaattttttatctgactcagtcgtcgttatctaaagccagtccttttttatactttgcgacagcagcctggatcttatcgttgggatcgagcagatcgctgatggaagtatcatggttcaaggtatcgatcagataagcaacgtatttgctcatatcacagttgacgtaccactcccgctttaacagctcttcaggctgataaatcaggttggtggtcaggacacggttgatattgccgcatgcataagccttgtcgaatttctccataccgcttgtgaacagaccgaaggtggtgcagatgaagatcttacgggcaccgcgctgctttaatgcggatgcaacttcgagtacactttcgccggaggaaatcatgtcatcgatgatgatcatgtccttgccttctacgctggtacccaggaattcgtgagcaacgatcggatttcgtccgttaacaactctggtgtagtctcttctcttatagaacatacccatatccagaccgagtacgtttgcaatgtaaattgcacgtcccataccgccttcatccgggctgataaccatcatgtggttggaatcgatctgcaggtcgggctcggtgcgcagcaggtttttgatgaactgataagaagcctgaacggtttcgaagccgtttaacgggatggagttctggactctcgggtcatgggcatcaaaggtgatgatgttgtcgacgcccatctttaccagctcctgcagagcgagtgcgcagtccaaggattcccgtgcggtgcgcttgtgctggcggctttcataaaggaaaggcatgataacggtaattcttcttgctttaccgccgacagcagcgatgatacgcttcagatcctgataatgatcgtcaggagacatatggttttcatgaccgcagagggaataggtctggctgtagttggttacgtcaaccagcagatacagatccgtaccgcggacagattccagaataacgcccttggcttcgccggaaccaaaacgcggcaccttgctttttaaaatgtaggagtcacgctggtagcctgcaaaggcaaggctgtctttgtgctcgctctcgcgctgggtgcgccatcttacaagatactggtcaactctctgtgcaagggattcgcaaccccttaacgggataatccccagggagccaaccggaatggtttcgagatttctggtttcttcacgttccatcatggaagttcctcactttctgaaggtaaaagttaatattttggatatctgtgtcagcggactggacccgagacagcggatacctttttacacatacgaatatcagggccggtgagtttaca

SEQ ID NO: 803 - DNA, 6127 bp, unidentified
  source 1..6127: mol_type = unassigned DNA
  misc_difference 5331: note = a, c, g, or t
  misc_difference 5332: note = a, c, g, or t
  misc_difference 5333: note = a, c, g, or t
  misc_difference 5334: note = a, c, g, or t
  misc_difference 5335: note = a, c, g, or t
  misc_difference 5336: note = a, c, g, or t
  misc_difference 5337: note = a, c, g, or t
  misc_difference 5338: note = a, c, g, or t
  misc_difference 5339: note = a, c, g, or t
  misc_difference 5340: note = a, c, g, or t
ttatctttcattcctgtcgatctgcagatttttataatattgcattggagtaacaccatactctttcttaaatgccctgaaaaaatgattgtatccgccaaatcctccaagttcataaacctcacggatactttttccctgctctatatagtgtctgcacagatccagtctgctctttacaatatatgaatgtggcgtttcgcctgtcatcttcttgaattctctcacaatatgatagcggcttacataaaactcgttttccaggcgctccaatgatatatcttctgtcaggtgttctcttatatatatgaaaatatcatccattacaacatgctttttcttatttaattttagctgtacgtcctccttgacagacgaccgcaacgcaagtaccagaagcattgtcagcaggcttttctcatacaatgtgtgtgcaaatttaggagattccttaagcattgaatacagctttttggaaatattctttataagcatggcagattcactctcagaatgaactgtcttaacctgaaagggaacgatatcaaatgcctcgtcaagtcttgtattttcatctgataagctctgcaataactctgttcccacatagagcacatatagttctaacggatatttgtttcttcgatattcaatcttcactttattgccaggcttaataaatattaagtcctccatggtacagaccgccttttcattttcctgacgtaaatatcccataccacctgtcacaaaaataattgtatggtttttcttctgtccaaaactgcgctgtccgctatcttctatttttatatattccatctcataactctgttttttcatatgttaattttgcacattccagcatccatatttttgttcattttgtcaatttatacaatacatcaattttccatagtttgcaagcaatttttgtatatgtttatctctctaatccccatataatgaacatgtagctaccaaaacaacacaaaaatgagaggtattattatgaaagaaacaagaccattttccatgaaggacaaaatcggttacactcttggcgatttgggatgttgctgtacagaacagttccgagccatgtatcttgctattttttataccctggtgctgaaggtcaacccggtgcacgtaggaatccttatgcttatcacaaagctatgggatgccataaacgatcctttaatcggtgcactcgttgacagtcaccagaacaagggtaagggtaaattcattccgtggattaaattctttgcttttccaaccgcagtcctttgtatcttaggcttcgtcaacgtaagtaattttgcttatggtgcccgtcttgcttacatgttcatcacatatgttgtatatgaaattatgtacacatgtgtaagcgtaccatttggaagtctttcaagtgttatgacagatgatgtaaaccaacggaccgacctttcacgcttcagaagtcttggcggcacaatctttatgaccgtcatcgttattgccggtccattattcttatacaaagacaaccagcctgtaccaagccacttccttattatggcagccatctgtgctgttatcggtttcatctgccttatgtttacatcacactggtgcaaggagcgtattatcaccgagccagttgccaaagaaaaagagaagcttaactatttagacgtgctgaaagccatctccaaaaacaaagctttacttggtgttatgttatccagctttattggtatcgttggtgccggtatggtaaacggcttaaatacctacttattccgtgactatttcggaaatgtcgccattatggcagtttcaggcatgttaagcgttatctggtcgcttatcgcattcattgggacaaaatttgttgcaaagaaatttggaaagaaagaatggattatgtatagtgcaactttctcagttgttgtttatgctattttattctttttccctcttgagaacccaatgctctttattattatcaacggaatctgttatcttggtgtcagcggtttccaggtattagtctgggcccttgtaaatgacgcaattgactatcaggaacttcagaccggaaaacgtaacgaaggtatcgtgtactctgcatatacatttttccgtaagcttgctaatgccgtatccggaagtatgagcagctttgcacttgcaatcgcaggctttaacgtaaatgaggccgttcagagcgaagcattctccggacgtctctggaaaacatataccggattatatgtagccgggtacttattagctgtacttgtattaaagtttgtataccctcttacaaaagagaaaacagctgaaatgttacagaatttatcagacaaacgaaatgctgcaaacgcagaataacttcagaaaccgaggtatcttgcattgacaaaacaagttgaaataacaaaccgctcaggtcatgtcttacgcggaattgtaaatattccggatgaaggctcgcgcttccccgccatcattaacgtacacggatttaccggaaataaaagcggatacaaaaatatctatacccacacagccagatttctggctgaaaacggatttgccagcgtccgctttgatttatacggaaatggcgaaagcgacggtgagttcgaggacatgacattcaccggtatcttacatgatatcgaagatattataaactggacaaaacagcaggattttgccaatcctgataaaattattttatcaggccagagcatgggcggctatgcagctgccactgctgcgcctatcgttaatccacatgctctcatactcatgtgcccgggagccggcatgtggtttggatgtaaagaccgcgccgaggcaatggaagcacagggaatcacaaaagcagatatagaggggctttgcttccctacttcttttaaccatgatttatatcagtatgaaccgttttcatccgcagcgggatatacaggtgctgttcttcttatcagaggaacggcagacgatctggtagatgatgctacctgtcatcgatatgaagcactctataatggcaaatgcagttacaaaacaattgaaggcgcaaatcacaactttgcaagcggttctgcaagagctgaattagacaggctcatattagagtttttaacaccattgaaataagataatcactttgaaaggatgtgtgcacaatgaaattattagagcccattaaagttggaaacattgaatttaaaaaccgtattatgtttcccccacttacaacaggatacgaagaaaaagatggatctatcggcgaacagagttttcgtttctatgagcgccttgcaaaaggtggtgttggatacattgtcattggagacgttgctcctctttcaacattctctcctacaccaaaactttactctcctcaacaggcagaaggcttccagcggcttgccgatgcatgtcataaatacggtgcaaagcttggaatccagctgttccatccagactataacgtcgcagctttaaacgaaatgtttcaccagggaaaaatgcaggaggcaagagccaaacttcaccatgatatgcagcactttgtaaatgaagtaactgcggaagaactggatgaaattattaagcacatggaaaattgtgctgttttagcccacaaagcaggcgttgactgtatcgaagtacatggagaccgccttgtcggatcgctctgctctcctattttaaatcacagaacagatgaatatggcggagaccttgcaaaccgtacacgtttcgccttaactcttgtacggcgtttaaaagcaattgtcccagatatggttatcgactacaagcttccaatcgtaactcctcttggagataacggctttcggggaaaaggtggtcttccacttgatgaggcctgcatttttgcaaaagaattagaagctgccggtgttgacacattgcatgtcgcgcaggctaaccacaccggaaatatgggggataccattcctgctatggggacacagccatatggttttatggtttcatactctaaaaaaatcaaggaactcgtttccattcccgtatccgtggttggtcgtattgtaacaccggaagctgctgaagccgttattacaaatggctctgctgacatcgttgcactcgggcgttcactgcttaccgatcctgattttgcaaacaagtgtgccgatggacactgctgcgatgtcagaacatgtatgatgtgtaataaaggatgtacagacaatatccaaaaccgtgcattcctaagctgtgtattaaatgccgagaatggttatgagacaagccgtcagattactcctgcagtcacagcaaagcgaattgcaattatcggtgcaggaattgcaggacttgaagcagcacgtgtcgccgctctgagaggccatcaggtaactatatttgaaaagtcactccagatcggtggtcagcttcttattgccagcgttccaccccgaaaagaagaaatgatgagaagcattaactactatcttaacgtgcttcccgaattatcagtgacattccgtctgggtcaggaatttaccggaaaagactatgattcgtttgatgaagtaattgttgcaacaggtgcaacgaatgcaatcattcccgttccgggcaaagatcttccaatcgttacaagtgcatgggatattcttgctaaaaaagaaattgtattcggcaacgtatctgtcatcggcggtggtcttgtaggtgttgaaactgcggaataccttgctgcccgcggatgtaacgttacaattattgaaatgatggatcagattgcaaaggaagaaagcagcacgattctcccaactttgatgagtgaattagagcattccaatgtccagatccttacctctgcaaaactatcagagatcaatgaccatgcagttattgttgagaaaacagaaaatgaaaaaacctcggtcttagagatcagatcggatttcgttgtaatggctgttggtgcaagaaagaatcttccggatctttcggcttgtccgctcccgcttcattatattggcgattgtgccggagagcgtccgagcaatatcgatcatgccattaaatcagcatatgatgccgcatgtgaaatataaaaggttttttccctattcgtacccagtatatattcacattcgcagaatatctgcagacatgaaattacgggcgtgtcagtttctgacacgcccgctttcattctcatcttatcatttgtattcttgccgcagtcttcctacaaccggaaatgctccatgctgtctgcaagcactttcatgtcgccctccagcttctcgnnnnnnnnnnttccgctggagcgctccaccgttccctccagctcagttgtcatactggaagtctcctccgtggatgccgcattatctgtcgcaagatgcgtcagcacctcgatgctctgggtaactttctcacgctcctcattcgcagtgcggatcatatccgtcaccacgcggatggaattcgtgcacgcctccagtgccttctgcatatccagaaacatctcgctggtatgattcagcgcctctacctgctgcttcgacgcatcattcatctgtaccataatgcccatcgacttctcggaattctctgtcagctctccgataatgtcgttaatctcatgcgctgtatctgccgactgtgtcgcaagacttccgatctcttccgcaactaccgcaaatccgcgtccggcttctcccgcgcgcgccgcctcgatcgaagcattcagtgaaagcagattcgtctgatctgcgatctcactgatcagcgtcgccgccttgctgatcttattgacggatgcattggtactctccgtctgtgtatacatcgactcgatatccgcctctgtcttattgttcgtatcgatcaattcacgaagcttagcgagcgacttatcggaatactcctgcatctgattggcattgccgaccagttcttccatctcgctggagatcttctcgatgccttccgcgatcgtcatgataccgttggacgcttccgtcgtggatcctgcctgcgtcgtgctgttttccgcaatctcattgacggcaaccgcaacgtttccgatggactcctgcat

SEQ ID NO: 804 - DNA, 25339 bp, unidentified
  source 1..25339: mol_type = unassigned DNA
ctaagattgaagaataaaaagataaggtgatggaaatgaagatattagtattaaatggaagtccacatccacagggaagtacaaaagatatggttaatgcatttaagaaaggagctgagagtgcaggacatatcgttgatgtggtggatgtatgcaaaaagaagataggtgggtgtttggcatgtgaatactgtcatagcaaaggacacggtgagtgtattcagaaggatgatatgcaggaagtatataatcttttgaaagaagcagaaatgcttgttattgcatcgcccatttattatcacggcatatccggtcagctaaaatgtgtaatcgacagattttattctgcggcatatccgagaggaccgaagaatttgaaaaaagttgccatgatacttagctccggagatgctaatatgtatgagggtgctcttttctcgttcaaaggagactttctggattatcttggacttgaaaacatgggtgtgtttacagcacatgggtctgaaaacaagagcgagaaaaagagagaagaactaagggcgttcggggcatcgctgcgttaggtaaattccatttggcgagatgtcgatagaccataaaattgtttttttctaaagcagactattgattgtatttatattaagttttcaacaacaatgtaaccattgaaattacatctgttttttgatatgattactgtcaaagagaggtgtttataatgcagatttcaagcagatttacaatggcaatccatatgtttgcctgtatagatacattttcggatcagaagatgactagtgattttatggcagcaagcattggaactaatccggtgattgttcgtaaaatattgcaacaattaaaggctgctggtcttattgaagttgcaagagggacaggcggtgtgacaattaccagaccattggagcagattacattccttgatgtgtataaagcagtggaatgtgcaccagatgaagaactgtttcattttcatgagaatcccaatcagaaatgtccggtaggaaagaatattcaccatgttcttgataagagactgttagaagtacagaaggcaatggaggaaaaactttcagaaatgacacttgctgatgtgaaaaaagatattgcagtgtatacagaggaagagtagcctacagaaggcttcggatgagtgattatatcatcacaatttccggagccttttcgtttttcataatcaatgtaaaatcttcaaaaggagttgtaacaaaaaaagttacaaaaagtttgatgtaactattgacattacattaaacggatgatattgtatagctacaagatgtaataataattgttacaacatatcgaggaggtaatttaaaatgcagaaagtagtagaatttttacagaaaaattcagttcagtacttagcaacagtcggaagagatggaaaggcaaaatgccgtccattcatgttctgttttgagcaggacggaaagctttggttctgtactaacaacacaaaggatgtttacaaggatatgttagcaaatcctgaagtagaagtatcagtatcttcccctgaatacgcatggattcgccttcatggcaaagcagtatttgaggacaacaagagtgtaaaggaaggatgcatgaacaatcctatcgttaagggacagtaccagacagcagataatcctatttttgaggtattctatcttgaaaatccgcatggtttaatcgcagatttctctggaaatccaccttatgaattttaaagacaattaacagaaaaaattacagtcttcgggacaaggtgtaattcctgaccggcagtatagtctgcgagcaaaagctgatatggtgcaattccataaccgacggtaaagtccggatgagagaagatatgataaaacaagtcccgcagggaatcccgtcctgcgggctgttttaaattcaggcatatctcacaaaaaggagatttatgagtaacaatacagcaactattaaaacaagaaaaaatttagtttctacaagaacgataacaatgacagctctactggcagctatatcatatgtgttggcatttttagagtttccggttcctttgagtccatcatttggcgaatttctgccatttattaagactaagctggacgttgtgctattcaatgcattgccgtttaatatcttaaaaggcttggtaattggagcaattaccatgatgatatataaaaaacttacaccgatactgaaaggagagacttggaaatgacaaaaatggattatcttgaacttctggtggatgaaattcattcaacaacagttgcaacgataggttcagatggacatcctcagacaagaatcatagatatgatgtactatgatgaagaaggtgtgtatttccttacagcaacgggaaaaacattttatgaccagttaatggagcagcagtatgtggcaatatccgcaacaaaagacaaaattgcggtgtctctgcgtggaaaaataaagaacatcggaaaaaagaatcttgatattatgtttgaaaaaaatccatatatgaagaaaatctatccgggagatacgaaagacgcaatcgaagtgtttcggctgtatgaggcacagggagagtattttgatatcagcaatccatcaaatattgtgagggatactataacaattggaaaaaccgaggcagttcagacagggtattttattggaaaagaatgtattggatgcaaactgtgttactctgtatgtccgcaaaaatgcattgatatatcttcagttccggttactatcaaccagaatcattgtctgcattgcggaagatgtgcagaaatttgtccgaagcagtgtattgagaaaagaggttcattatgatttttaagaaaatcagaaaagggtatgctgactggagaaactttttatgtagtactccggcaagggattatgtattccaaaaggatgcatatgaagaccagattgacagggcagcaaagaatataagaaatacagactgtgttataatcggggcaggagccggggcatcgacagctgcgggaatccaatatggtggtaaaaggtttacagacaattttgcagaatttataaaaaaatacggtgagtactacatgacagatatgtatgcagccggattttatccatatccgtctgaggaggcaaagtggggatactggtcaaaacatgcattgatgaaccgctttgatcctccggcattgccgctttatacagagctttatgatcttgtaaagaataaagaatattttgtacttacaaccaatgtggatcatcagttttataaagcgggattcgatgaaaaaagaatatttgcaacacagggagattatgggaaaatccagtgccagaaagcctgtcattcaaagacttacgatgcaaaagacctgtttcgtaaaatggataaagcaagaagagactgcctgattccatcagaacttgtaccaaaatgtccggtgtgtggcggcaatatggctatgaatctccgttgtgataattattttgtggaagatgaagcgtggcatgaggcagccgacaggtatgcggggtttctggaacagcataaagataaaaaggttgttcttttggaacttggagttggatttaatacgccgattattatacgtttcccttttgaaaagatggtgagggagaactcgtcttatagtttgatacgcctgaatatggatgaagcggtagttccggaaagcttcggggaacgtgcaatcggtattggcggtgatatggcaaaggcaattactgatataagggggctggtattatgacacaggatgagcaaagagaatatctgattcagtatcttttaaaagaagaaataccgtttggcagacagaacattcctacggataagcaggggcaggaaaatctgctccgctcacttatgaatgtcagaccgccaagaccaatcagtaatgattttttgaaaatacaggatgagtatcttacagaaagaaatatagagcgtggaatcacagatgttgacacgcttgcacctgtaaaatccgattcgagattatatatctggcaagggaatattaccactttgaaatgtgatgcgatcgtgaatgcgtgtaactcacagatgcttggttgtttttcaccgatgcatgcctgtattgataactttattcatacttatgctggaatggaacttcgtctgaaaatgcatgaaattatggcaaagcaggggcatgaagaagagaccggcaaagcaaagataacatcgggatacaatcttccgacaaaatatattcttcatacggtaggacctattatacaatggaaagtcacaaaagaagatgaagacctgttggcaagctgctacacagagtgcctaaagcttgcagcggatactggtgtggaatctattgcattctgttgtttgtctacaggtgtattccgttttccacagcaacgagctgccgagattgcaacgagcactgtaaagcagtatcttaacaaagacagcagaataaaaaaggtaatctttaatgtgtttaaggatgaagatttaaaaatatacagtggattgttataaacgtctgttgaaatatccgataaatcttattgtactgttactgcctgagaatgtgatttatattggaatccgatgttaagtgaaagaatggtgggaagaacgagaatattattaaaaaagtggacagttcaccaattgggggctgtccactgagaggacggcggttagtcaccgcctcctactcaatttttaacaggaaatattaaagttcaagtgaatcttctgcatcaacccacatctgtaaatttccatcaagatataatcttgcatattccagtggttcgtcaatagcaagtgtatttaatgcacagtctgatccaggcgtggtttttaagtccttctcagtttcccagcagtcaatgcgaagcatatagccggcactggtataaacatcaatactgttgcattgtggattatattctgcaaatattgttctcatcgtatcttatctccttatcgatcaataaatcatcagttacaaaaatcagaagcatttcaatcagttcaccatgtcacttttattttgtgttatactgttttatatgattttcttgcccttgtattttcccttatcagagtttgtaaacactggcgggacgatataacacaagggaaacaataagggaaagctcacctgcgacaaatccagtgttttcaagggtttacagagaatttaataacaaaatataacagttattaaatctcttaaaacaggtgaaatctcaatcggaatttaaggaggtgcttataaatgaaattagtagatttagcaacaggtcctgattggatagtgtggattgtctttgtgatatttgctgtattttctattattttactttctggacacgggagttggtttatttccggatataatacggcttcaaaagaagaaaaggaaaaatatgatgaaaagaagttatgcagaacaataggaattggaatgtctattatagcaattcttgcattgacaatgggcttgcttgaaaatattttgcctgcattttttgtatatattgcattggggattattttggttgatgtcgtagtaattatcattttaggaaatacactatgcagaaagtaacaactttttagtttgtatgcgacaaacgtttgaacactttttgaacaccgcaaccgtgatgaagtcctcaaagcccctttctatcagtatttgtgattgcttaaaacggttcgattccggtctgcggcattgattaaaagcaggaggaacgctgaatttacagcgtttctcttatttttttacttcaaaaagtttgaaacacctttgaacactttttcttgtgtcttaaatttatttaaactatacgggataggagttaagttaattgaatatatataacggaattttgtattaagagcagacaacacaaaatatttcgtataagtatttaatctagaatatgagcaatggaggaacctatagtatctatgttgatccgaatcccacaatttaacctttcaataagattgacaatatagaacagaaaatcattaccggtaaaatggaaatatctaaagcagattttccttgcctgcagaggatagaaaacataaatacagtatgctaaaatgaaagtaacaaaccagaaactgaggagataaagaatgtttgtcagaggatatcagatgtcggactgtaaagaaattacagagctgttttataatacggttcatacaataaatgcgaaagattatacaaaagaacaattagatgtgtgggcaacaggtcaagcggatttagaaaaatggaatcagtcacttcaagagcactatagtatagttgctatagataacaaaatcatcgtaggctttggcgacatagataaagacggttatcttgaccgcttgtttgttcattctaattatcaaggaaaaggggttgcaacagctatttgtaaccaactggaacaagcggttgatggaaaaattacaacttatgcttctattacagcaaaaccattttttgaaaaacgagggtataaagttgtaaaggaacgacaggtagaacgacaaggaatttttcttacaaattatgtgatgataaaggaacaataaatcttgaatttataaatcgaaaagggaatttatgaaaaaaattagtttatttattgcaatgagccttgacggatatattgcagacagcaaaggcagtgttgagtggctgactggacagggcaatgatgaggataatattgattcatattctgaatttgtgaaagacatagataccgttgtaatgggttggaatacttatcatcaaattgttacagagctttcaccagaagattgggtttatgacgattttacaacctatgttgtgacacacaagcaaaaaaagtcttccgacaaaatccattttgtcaacaaaaacccagttgaactgataaaagagctacgaaaagaaaacggaaacggaatttggatatgtggcggtgcaaacttaatccaacagttggttagagcagatataatagattgttattatataaccgtcattccaacaattttaggatcaggtattcgactttttgaaaaagctgaccatgaaattaagttgaggctgctaaaaacacagtcatataatggcatgatggatttaatctatgcaaaaagataaatcccagtttgcgaggtaaagcgtatggaaaaattgatagcaatggtgatctgtacaattcttgtagttgcattggttggctgtagtacttcaaaggatgggaattatcctgcaacaataatggtaaatggaacaaatttctattcaaccaacaatgcggttgctgttgaagtggatgatagtgttattcaatacacaacttcctatgcggagaatggtgttcctaaaaaggatggagaagcaaattttaataaagataccggaacgccatacgcaattcttgaagatggtatggtagtagtgcttattgataatgaatggatagagttcaaagcaaagtaagcagaaaagttctagtttaattgaaaaaatttgaatgtgagaggtgcatataagtgaaaccgaagaaagccagaaaactcatttattttctgtacattattggatttattttaatactacttagctacaagagtataatgtttttgccaattggtgtgattgtagcaggttcgtctgttgtgcctaatttacttttttacaagtgtccgcattgcggaaaacatcttggaagtaatggtggtgatttttgtcaatactgcggaaagagtattgataattaaagtccagttagtgttgagatgaaaagagctatctaaataggtttggagttaggagatgatgtcaagcaattccctatattacttccggggcaagtgaaactattaagcttgaaaagggtaagtggtatcgtgttgaaacaggaaaagatcttacaatgagtatagtaaatgttcgtatagaataataaatgtcaatagaaattcgttcttcggttttttatattgtatattatataaaattgcattatattactatagtaatcaagtaaattagattttaaggagcgataactttttataacaggtaggttgtgaatggaggaaatctgtatgattatcgaaggtaatgaaaaagaaatagaggcaatggaacaatttcacaaaggaaaccgacaggaaggactgcggttacaagaagaattcgcagctgcattcagagaggaatataaagataaagatcattgtccttgcaagaaagcctgccgctatcatggaaattgtaaagagtgtgttgcgatacatagagcacatcaagaacatgtaccaaattgtatgagacctattattaatgcaaagataaagctgttatctgaattaacagagcatacgatcgcagaggaaatcgaagctccgcatgagatacttttttcagatttagggtaacagattttataacagtagcgggtgaagcaaatccccctgctttagctgtggggagtgtcaaaacagcagtgagagaaaatagaagttgctttataatagcagcgagagaaaacagaagttgctagggggaagaataatgaagattgaacatatcgcaatgtatgtaaatgatttagaaagtgttagagattttttcgttaaatactttggcgctgtatgtaatgacggttattataactcaaaaacaggttttcgatcgtactttcttttgtttgatgatggagcaaggcttgagatcatgaacaaacctcagatggaggacgaagtaaaatcgccggtgaggacaggatatattcatatagcatttagtgttggaagtaaagagaaagtggattttctgacacggcaaatgcaagaagatggatatgaggttgtgagtggtccaagaacaacaggagatgggtattacgaaagctgtattatagggatagaagggaatcaaattgaaattacagtttgacaaaatatttttaaagcgttgaaaaaaattattgaggtaaatttttatttatctcaaatactatataaaattatagaaagggaaactgctatgatattagaaaataaactcggcattaccgattctgtagaattagccaaagctgaagaaaaaatcagcaaaaaaagagcaatagaactttttgaaagcggctatttgaattatcttaagccgggaacttttaaatcacttgctgaaatacacaaatatttatttggtccgatttatggttttgccggacagataagaactgttaatatttcaaaaggtaattttcgttttgctccgattatgtatttagaagcagctcttgaaaatatcgaaaaaatgcctcaatcaacatatgatgaaattatagaaaaatatgtggaaatgaatattgcacatccttttcgtgagggaaacggcagaagtacaagaatttggcttgatttgattttaaaaaaagaattaggtcaggtaatcgattggagccgtgtagataaagaggactatctttctgccatggaacgcagtcctgttaaagatattgaaatcaaacatatattaaagcaggcgctgacgaacagaatcaatgaccgtgaggtttatatgaaaggtatcgatcacagttattattacgaaggctattccacatttaagataagtgatttgtaattaaaatatttctatcaatggcagaagttaatataaagaactgccgttgcaagtcgttctctaagtaaaattcaaaggagaatcgattgtgaagagagtggcaagcgaaagaaacctatttgcaaagatagcctgagcttgctgctctaaattattgtttacggattgaacggaaagattatgaaaaaaaacagttgacaaattattttttagtgttatactttgaaagtcaaaatatttaagaatcaaataaaatatgacggagaagaaaaatgataggaagagtttgtggaacgggatcgtatttaccgattcggacagtaagcaatgatgaactatcgcatgtcatggagacgtcggatgaatggatacgagaacgaaccggaatcagattccggcatgtggcattagaagagacaacatcagacatggcggcggaggctgcggcccgggcgttgaaaaacggagaagtaaatgcggatgagatcgaattgatcttaactgcgacatcttcttcggatgtgatttatccatcggctgcgtgtattgttcaaaagagaatcggcgcccagaacgcgttggcatttgatctgaacggagcttgttcgggatttgtgattgctttcaatacagcgcaggcatatattcgcgcaggaatctataaaacgattcttgtagtcggcgcagaaagcatgagtcgccttgtggattggagtgacaggagcacatctgtattattcggcgacggcgcaggcgcgctgatactgaaagcggaagaaggtgatcattattggcagacaggtcattctgacggcacgaaagattttgtgctgacattaagatcaaaaagtctgtttgaagaacaggatgataatccaaaagatgtcttatcaaaaagtgatgaaggatcgtcagtggaagaacacgatgacgtaagtaaaaatgcagaagatatcagccggaaaaagaaaagtcataaaacaggaatttgcatggatgggcaggaagtatttaaatttgcggtcagaaaagtaccggagctgacagaagagcttttagaaaagtcgggactgaaaattgcagatattgatttttttattttgcatcaggcgaatgaaaggattgtgaaagcggcggcaaagaaattaaaagtcgatatgagccgttttccgataaatatggaaaattatgcaaatacatctgccgcatcgattccgatccttttggatgaacttgttcaaacgggaagattgagaaaaggtcaaaaaatattgcttgccggatttggtgcagggctgacatgggctggaagtattttagaatggtaaatctctttgagagatcaaacgaaaacaaattgtggataaaaaataaagtaaaagagaaaagaaaggaagaaattatcatgacagagagaatgaaagaaatcgtagcagaggcattgaatgtagaaatcgaaactttaaaagaggacacatcatttaaagaagatttgggggcagattcacttgatctttttgaattggtgatggcgtttgaggaagaattcggagtagagattctttccgaagatctggaaaagatcacaacgatcaaagatgcggcggcatatatggaggctcacaaagagtaaaaaataaaaaaccggatataaaaaatgaaaatagaaacaaagaggccgataataaaaaagaaaaaagtatcaggagaaagtattgtcaaaatgaaaacagaaataacggaacttttgggaattgaatatccgatcattcagggagggatggcatgggttgcagaatatcatctggcagcggcagtatccgaggcaggcggtctgggaattatcggagcggcaagcgctcctcctgaatgggtgagagatcagatacaaaaggcaaagaagatgacagataaacctttcggagtcaacattatgcttatgagtccgtatgcagatgaaattgcaaaggtaattgtggaagaaaaggtaaaagttgttacaacaggagccggttctccggaaaaatatatgcagatgtggaaagaagcggatgtaaaagtgattccggttgttgcgtctgttgcacttgcaaagagaatggaacgctgtcatgccgatgcggttgtcgcagaaggaacggaagcaggagggcatatcggagaggcatcaacaatgactcttgtaccgcaagttgtcgatgcggtaaagattcctgtcattgcggcaggaggaattgcagacggaagagggattgcggctgcatttatgctcggagcaaaaggagttcagatgggaacggcatttatcgtaacagaggaatgtcaggttcatgagaattataaaaatgaaattataagggcaagagatatcgattcaaaagttaccggaagatcatgcggacatccggtgcggacgcttagaaatcagatgacgaaactgtatctgcaaaaagaaaaagagggcgcgtcttttgaagagctggaagcattgacacttggcggtttaaaaaaagcagtcgttgaaggtgacgtaaaaaacggaagcctgatggcaggacagtcggcaggacttgtcacagagaagatgacatgtgaaatgctgatccgaaagttagtaaaaggaacagaaaaacaaatcagaggaagtgtattttatgagtaagactgcatttatttttccgggtcagggcgcacagacagccggaatgggaaaagatttctatgagaacagcaggacggcaaaagacatatttgatatggcgtctgaattattgtcgcttgatatgcggaagttgtgttttgagaaaaatgatcttcttgataagacagaatatacacaggcggctttggtaactgtcagtatggcagcagagcatgtattaagagaatgggggatgactgcggacgttacagcgggattgagcttaggcgaatattgcgcggcagcatcggcaggagcattttctacagaagacgcagttctgatggtgagaaaacgcgggatttttatggaagaagccgttcccgcaaacaaaggggcgatggcggctgtaatcggacttacaggcgctcggacagaagaagtattggaaaagattccgaatgtatggatcgcaaattataactgtcccggtcagttggtgatcacaggagaaaaaagcgcagtggaaacagcgggaagtagcctgaaagaagcaggagcaaagagagttattttattgaatgtgagcggtccgtttcattctccgatgatggaaactgcaggacaacagcttgcgcgtgttttggagaatgtcaggctgaatcaaccggtcattccttatgtatcgaatgtgactgcggattttgtgggagaaacaggagagattaaggatcttttgatacggcaggtatcatctcctgtgagatggcagcaaagtgtggaaaaactgatcgccgcaggggtagatacatttgtggagatcggaccgggaaagacattgtctggatttatacggcggattgacagaaatgtaaaatgtttcaatgtcggtacatgggaagaagcagaaaaagcggcagaacagttatgttaaagcgacagaaagtggaaggaaaatgatgttaaaagggaaaattgcagttgtaaccggggcatcccgggggatcggcagagcgatcgcggtgaaacttgcggcagaaggcgcagtcgtgatcattaattataacaggtcgaaagacgaagctgaaaaagtaaaagagcagattgaagcgtcgggaggacaggtaaaactgattcagtgtaacgtagcttcttttgaatcatgcgaaaagatgtttgaagaggttatgaaagagtttggaagaattgatattcttgtcaacaatgcgggaattacaaaagacggtttgcttatgaagatgtcggaagatgattttgatgcggtcgtagatacaaacttaaagggggcgtttcactgtatacgctttgtttcaagagcaatgatacgtcaaagaagcggaaggatcattaatatctcttcggtgtccggggtacttggaaatgcaggtcaggcaaattatgccgcatctaaggcaggggtgatcggtctgacaaaatcagcggcgagagaacttgcaggaaggaaaattacagtaaatgcagtcgcgcccggatttatccggacggaaatgacagcggttctttcggaaaaagtgaaagaaaaggcagttctgcaaattccgatggagcgattcggagaggcggaagatgtggcgcaggctgttgcgtttcttgcatcagagcaggccggatacattaccgggcaggtgctttgcgtagacggaggcatggcgatgtaattataatcgctccgcttgaaaaggaggaagtatgaagagaagagttgttgtaaccggtcttggagctgttactccgatcggaaatacagtggatgttttttgggatgagattaaaaaaggaactgtcgggatcggaccgatcactcaatttgacgtttctgattataaagtgaagatcgcagcgcaggtaaaaggatttgatgcaagagaacggcttgattttaaatctgcaaaacgaatggaattgtttacacaatacgcggcggcagcagcgaaagaggcgtttgaagatgccggaatcgacatggaaaaggaagatccttacagggcaggcgtgatcgtcggatccggtgtgggaagcttaaaatgtgtggaagataattatgagacgatcctaaagaaagggccgaacagagttcatccgctgatggttccgctgatgatttcaaatatggcggcgggaaatatttcgatccggcttggacttcggggaaaatgcacaaatgtcgcgacggcatgcgcctccggttcacattgtatcggagatgcttttcgggcaattcagtatggtgatgcagatatcatggttgcaggaggagcggagagcgcgatctctccgacaggtctggcaggattcacggcgcttacggcgctttctacatcagaagatccgacttgtgcatcaagaccgtttgacaaagacagagatggatttgtcttgggagaaggagcaggcattattgttttggaagaactggaacatgcgaaggcaaggggcgcaaaaatatacgcagagcttgcagggtacggagcaacggcggacgcatggcacatcacatcaccggcagaagacggagagggcgccgcaatggcgatgaagcttgcaatgcgggaagcaggcgtacgggcagagcagatcgactatattaatgcacatggaacaagcacgcatcacaacgatctgtttgagacaagagcaatacgcagcgcacttggaagcgcggcagatcaggttgtcgttaactcaacgaaatcgatgatcggtcatcttctcggagcggcaggcggagttgagtttatcgtatgtgtaaaaagcattcaggacggatacattcatcagacaatgggaacaaaaaatgtcgatcccgaatgtgatctaaattatgcggtaggctcaccggtcaagaaggatgtaaactatgtattgacaaactcactgggattcggaggtcataacgcttctcttctcgtgaaaaaatatgaagattaaggcggggtgcaaaaatgaagacagaacagatccttcagttggtagaagctgtgtcgggattcggattggacgaatttgaatacgaagaagacggagtaaagctgaagttgaaaaaaggcggaaacgtctgcacatcagtatcggcagaaacggcaggaagaacaaagacagaagcggagattgcaagaacagaagaaaatgcggaagtcttattagaaggcaaaatagtgaaagctccgcttgtcggaattttctatgcgtcgccggaagaaggaggaactcctttcgtgcaggcaggagacaaagtagaaaagggaacggttctcgggatcgtggaagcgatgaagcttatgaatgagatcgaaagtgattttgagggaacgatagaagaggttcttgtcgaaaacggagcggcggtagaatacggacagcctctttttgtcatcaaataaagaacgatacaaaaacggcatagtaaaaatatcagggaggcagagtacggagatggaaagagagacaaagaaaagcttaaatatagaacagatccagcagatcatcccgcacaggcatccgttttgcctgatcgacaggatcgaagattatgaaccgggggaatttgccataggctataaagcggtaacatatacggaagaattttttaaaggccatttcccgaataaaccggttatgccgggggtacttattgtagaagcgcttgcacaaacaggagcagtggcgattttaagtacgccggaaaataaaggaaagattgcatttttcggaggaatacaaaactgccggtttaaaggaatggtatttcctggcgacgtgctgagattagagacaaagattattcgtcaaaaaggtccggtaggaatcggaaaagcggttgcaagtgtggacggtaaagtagtagtaagcgcagaattgacgtttatggcaggagaatagatttatgatcgaaaaaatattgatcgcaaaccgtggcgagattgcggttcggattattcgggcatgcagagaaatgggaattgaaactgtggcagtctattcggaggctgacaaggaggctcttcatacccagcttgcggatgaagcagtctgtatcggtccggcgcaggcatcggaaagttatctgaatatgcagaatttgatcagcgcagcgctcgtttcgggagcagatgcgattcatcccggattcggatttttatcggaaaatgcaaaatttgcagaactttgcgaacagtgcgagattacctttatcggtcctgattctaaagtgatcggtaagatgggaaataaaacagaagcaagagcaacaatgatcgcggcagggattccggttatccgggggacaaacggagcggttttagatctggaagaagggaaaaaagaagcggcgcgcatcggatatcctgtgatcattaaagccgccttgggaggcggaggaaaagggatgcggacagcgcaaagtgaagaagagtttgaaagttgttttgtgacggcgcgcaaagaggcggaaaaggcattcggagacggaacaatgtatatcgagcattttgtggagcatcctcgtcatattgaatttcaaatccttgcagattcatatggaaatatagttcatctcggagaacgggattgttcgatacagagaaatcatcagaagatgatcgaagagtgtccgtgcgccgcgttgtcagatgaacttcgtaaaaaaatgggcgaaacggcggtaaaggccgcaagggccgcaggctatacaaacgccggaacagtagagtttctgctggaaaaagacggtacattttattttatggaaatgaacacaaggatacaggtggaacatccggtaacggagtgcgtaacagggatcgatctgatcaaagagcagatacggatcgcaaacggcggggaacttactttcaggcaggaagatatcaggatgacaggtcatgcgatcgaatgtcggatcaatgcggagataccggagcgcaattttatgccgtcagccggaagaatcacagatctgcatcttccgggaggaaacgggatccgtgtagatacggctgtttacagcggatgcgaggtgctgccttattatgattccatgttggcgaaactgatcgttcacgggaaagaccgtcgagaggcggtagataagatgaggagcgctctgggagaaattattatagaaggaatcggaacgaatgtcgattaccagtatgagatttcggaaaacgaggattttatatcaggaaagacagatgtggattttattcggaggctgagtagtgaaactgcataatatgtttaaaaagaccgtagggaaagaacatggaacatcgaaaaatacaaaagtaagaaatgttcccgaaggattgctgaaaaagtgcaataagtgcggcgcggctattttggcagaggatgccgtaaataacaattatatttgtccgaagtgtcacggatatttcaggatgcatgcaggacggcggatcgagatgatcgcagatcccggaacttttgaagaatgggatgcaaagatgaagtttgaaaatcctctggaatttagcggttatgaggaaaaagtacgaagattaagggaacagaccggacttgacgaagcggtcgttacagggaaagttatgatcgcgggccatccggcggtgatcggagtatgtgacggacgttttatgatggcgagcatgggcgaagtggtcggtgagaagatcacaagagcgatagaacgggctacgaaagaaaatcttccggttattttgttcgcatgttctggaggcgcaaggatgcaggaagggatcgtttctcttatgcagatggcgaaaacggcggctgcgctgaaacggcacagtgaaaaagggcttctgtatgtgagcgttttaacagacccgacgacaggaggagtaacggcaagctttgccatgcttggagatattattctggcagagccgaatgcgctgatcgggtttgcaggaccgagggtgatcgagcagacgatcggaaagaagctgccgaaaggatttcagaggtcggagtttttgctcgaacatggatttgtagatcggatcgtagagcggtcggaaatgaaaagcgttcttgcgcgtattttgcatatgcatgaccgtacaaaagaaaaaacagaagaaagtaccggggaaaccgaaaagattgaaagcactacacaagaagatactatgccaaaacaggtgcggtcaaaaggcggaataagcgcgtgggaaagagttcttctttcaagaaaaacagaccgtccggtcggaacagactatgtgaatatgctgttttctgattttatggaatttcatggagacaggctttttagagacgatcctgcagtggcaggaggaattgcaatgttcgggaacattccggtcacggtgatcgctcaggtgaagggaaagacgacgaaagaaaatgtgacacgcaattttgcgatgatgtctccggaaggatatcggaaaacattacgattgatccggcaggcagaaaagttcggacgtccggtgatctgtatcgtagatactccgggagcattttgcggacaggaagcagaagagcacggacagggagaagcgatcgcttcaaacttatatgaactgtcctcgataaaagttccgatcgtttcggtactgatcggggaaggcggaagcggaggagcactggctctggctgtggcagatgaagtgtggattctggaaaactctgtctattcggttctttctccggaaggatttgcaagtatactctggaaagacagcaagcgtgcgtcagaagcggcggaagtgatgaaactgacggcggatgatctgaaatgcttagggatagtggaacaggtgatcagagaaccgaagtcgtatacgtcacagacaatggctggggtatgtgaagaattaaaaaacatgctcagcgtttttttgaaaaaatacggatctatggatgaaagacaactgctgaatcatcgatatgacagatttcgtaaaatgtaaaaagtgcttcttttccgaacaaagtgtgtgctataatataggttacgaaaatgcaggcgcaagaagcgtcggttatggaacacaatatatggaaaaggaggaggtccgatggatgcgtacagaacaattaatgatacgcttgtaaatctgtttaatgaaatatgggaattagaaaaagaagcgatcataaccgaagaatttaaagacattacaaataatgatatgcatatcatagaagcaatcggattatccggtgaaaatacaatgtcatccgtagctaagaagctgaagatcacggcggggtctctcacaactgcggtcaatgcgcttgtcagaaaggcatatgtgaagagggaaagaagtgaagaggacagacgggtcgtatatatagcgcttacggaaaaaggagagaaagctttttatcatcacgagcagttccatcgtcagatgaccaacgccgtgatagaaaagctggatgacgaagaaattgacgcacttgtaaaaatgcttaaagatatttctgcatttttcagaagttatcagtcataacacaggaaaacggaaatctgataaggcgggatttgtggtatggatgaatttatttttattttggaattgatcggaacagtagcgtttgcttcttcgggagcaatgatcgccatagaaaaaaagatggatattttcggggtaaatgtgctcggggcgacaactgcggtaggtggcgggatcatgcgggatatcatactcggattgacgccgccgggggcgttttcgcatccggtctatgttcttgtggcggcgctgacatcgacgattctttttgtgatcgcatatgcgaaaccgacggcttttgagtctcgggtaaagacagattattatgataagctgatgttctggtgcgatacggcaggacttggaatatttacagtagtggggatacaggcggcggtgcgggccgtcggcggggaaaatgtgtttttctttgtatttatcggaacgcttacaggagtaggaggaggggtgcttcgtgatattatggcaggcgagactccgtatattcttgtaaagcatatttacgcatgcgctgcgattgcgggaggaatcgtctgtgtagtcggaagaacggcattcggagaagcttacggtacgatattaggactggcggcaacggtgctgctccgttttttggcagctcatttcaggtggaatctgatgcgtgtatcataaggtttttcatctcggaaaatagccggatgataagaaaattacagtgaaggcggactgaaattacagcaagaatgataaaaatttgacgttttctgaaaaatgaggtacaatcccctatgaaactttttgatttgggttgaataagtgatactgaacaggattagagagcggtatcggaaatacttggttgtattattttaggagggaacaagtatggcagtaaagaaaacaacttcgacatcaagggcagcggctaaaatagcaaatgcgatcaaagcggagcctgcaaaggcggctaaaacagcggcgaaagcagtaaaggaagaagagaaaacagctgtgaaggcagaggaaaaggcagaagtgaaagcttctgaaaaagctcctgtaaaagcagagccggaaaagaaagaagcagcgaaagcgattgagacaaagaaagacacaacgaaaaagcttgagacaaaagcggcagttttggtagatacaccggagacagaagagaaggcagctgtaaaaaaatcagtaaaagctccggcaaaggcagagaaaaaagcgccggtgaaaaaggcggcatctaagaaagcggaactgaaaacagagatgtttcttcagtttgcgggaaaagaatatacagacaaagagatttttgacaaaataaaatatgtttggtcaaaagttttgaaaaataaagtcggcgatatgaaagatgttaagatctatctgaagccggaagagtcagcagcttattatgtaattaacggcgatacgacaggtaaagtcgatctgtaaaagtctgctatcctctctgtagcgggattgccccggcagggaggttttttatttatatgaggagaaaggaaggcgtatggcatgagcgaaaatacgaaaagtaagatgacggagaagaaagaacaaaggaaacggcttgaacagcagatccgttttattattgaagcggacaaagtgaaaagcgtttttcggcagacatatcttgccgacggaagccggaaagaaaacgatgcggaacattcatggcatctggcattgtctgcgatacttttgaaagagcatatggacgcgcctgttgatctgatgaaagtgatcgtcatggtactgatccatgatcttgtcgagatagatgcgggtgatacttatgcatacgattccgagggcaccaagtcaaaaagagagagggagttaaaagcggcagagcgtattttcggtattcttccaaaagatcagggaacatatttcagaagtttgtgggatgaatttgaagaatatagtacagaggatgcaaaattcgctcatttgctcgataatttccagccgcttttattaaatgacgcatcagacgggaaaagctgggcagagcatggagtgcataaggctcaggtgtgtaagcgaaatgagcggattgcggatacgtcggatatcgtatgggaaaaaatgcttgaaattatggataaacatgttgagaaaggaaatttgaaaaatgtatgagcgggaaacagagcggctgcaaaagatgattgaagaaagtgaaagtatcgttttcttcggcggagcgggagtttcgacagaaagcggaataccggattttagaagtgcggatgggatttatcatcagaagtatcgtttttcacctgaacaggttgtaagtcatacgttttttatgaggtatcctgaagcattttatgaattttataaagaaaaaatgatgattcttgatgcaaagccgaatgcggctcacctgaaattggcagaactggaacgggcgggaaaacttacggctgtcgttacgcagaatatagacggtctgcatcagttggcaggaagtaagcgagtgtatgaactgcatggcagcattcacagaaattattgtatgaactgcgggaaattttatgatgcacaatatgtcaaaaaaagcgaaggtgttccgaaatgctcctgcgggggcgtcgtgaaaccagatgttgtcctttatgaagaaggtcttgatgaggagacgatccggggcgctgtggaggcgatcgcgtctgcagatatgctgcttatcggaggcacgtctctcgtagtttatccggcagcaggatttatcgattatttcagaggaagccgtcttgcggtgatcaataaatcagaaacggcaaaaaatatccgatcagaactgacgatttcagctccgatcggagaaatattaagccggataaaagtgtgatcagtcagattcccatcgtccggatgcgccgcatgggaggacaagtcccgaatcagtgacaggaagtccgatttcctgcgactctacatggccgttccatggctttagttctgtcgagatcatatacgtaagtacagcgggtgcaagccctgtcgtataggaattgacaaggaaaaaaagggcgtctttagacaagatctttgtgcaaagtttgatgagcgggtggatcatatcttcgatcttccatatttcgcctttcggaccgcggccataagacggaggatccatgatgatcgcgtcataagtattgccgcggcggatctcccgttcgacaaattttacacaatcatcgacaagccagcggatcggagcgtctttcagcccggaagacactgcgttttctttcgcccagccgaccatgccttttgaggcgtccacatgggtgacatgcgctccggcggccgctgccgcaagagttgcgccgcctgtataggcaaaaagattcaaaacttttaccgggcgtcccgcgtttcggatcttttccgaaaaccaatcccagtttgtcgcctgttcgggaaagagtccggtatgtttaaaactaaatggtttcaaattaaatgtaagagatccatagtgaatctgccactgctgaggcagactgaaaaattcccattccccgccgccttttttactgcggtggtaatggccgttcatctgtttccatcctttatgattctttttcgtgttccagattacctgaggatcggggcgaacaagaagataatctccccatcgttccagtttttctccgttagaacaatctataacttcataatctttccagttgtctgcaatccacataataatatcctttctccatacagtgtgtgcgaatatagctatagtttaccacaagcatgtacaacaggaaagcataaaacaatctaaattgtaacagttcagccatgcagcgcggttttacgaatgcacaggctgagcttttactgtctgtggatttcgtcaacttgaattttcaaagtgaaatacggcatgattcatgatacaatataaaataagaaataaaattttgagggagatgtcttatggtgaaaatgacagtagatgcaatgggagatcactgtccgattccggtagtgaaaacaaaaaaagcgcttggaaaattacagggagcaggacagatagaagtgcttgtagataacgagacggcaatgaaaaatgtcatgaagatggcaaaaagcagcggcgcgtcagcggaatcggaaaagatcagcgatcgggaatacaaagtgatgattacggtagaagagaagaacgcggctgtatcagaaagcgatcaaaaaggacagaccgcaggaaaagaaagccgggcgcaggcagaaggcggggggaaagaagcaggcgaatcggatcacaatccggcagcagaaaatggaagtaacagtagtgcgcaggggatgaacaaagtgcagttatcatctgcgggatgcgcgacatgtatcggaacggtcgttgcggtttcttctgataaaatgggaagcggaaatgatgagctgggcgcagttttaatgaagagtttcttttttgcggagacgcagcttgatacgcttccggataaaatccttttttacaacggaggcgcgaaacttacggtggaaggttcggactgcctagaagatatcaggattttggaaaaagaaggcgtcgagatactgacgtgtggcacatgtcttgacttttacggattaaaggaaaaactggcagtcggagcagtgacaaatatgtatacgattgcagaaattcttcaaaacgcagtcagcgttgtttctccgtaacgacaggagaaggacataaggaaaaatatttattatgggtgaaaaagaaagaatggcaaaaagtataaacggatagataaaagtgtaaggacagtattgcaaaagtttgatacaatacgataacagctcataggaaagcggcatgttttgtcccgaaatgcagcctttgagttgagtaagtttacatggggaaaaggaaaacaaaaatacagatatcccctacataataaggaggtattaagacaaatgaaaaagaccaaaaaactggtaatgtcatggctacttgccttttgctgtgtcatcactttggttgcgccgtctgtcgtaaatgcggcagcagatgatttcgagatcatcgatgatacagacgcacgttttgtatattcagacggtaatgcaaataacggcggatgggaatcggcgggagcgggcgacgcttccgttacagagcactggagcaacacggcaggcgcgacattggacattacattcaacggaacaaaactggagctttacggtaaaaaagctgcaaatcatgcaatgttcagcgtgagcattgacggaagcgaggcagtagaatgcgacgcctatgccgcagtgacagaaccggaggcaaaattgtttgaaagcaaaacgcttgcggcaggaaatcatacagctcatatcacagttttaga

SEQ ID NO: 805 - DNA, 13452 bp, unidentified
  source 1..13452: mol_type = unassigned DNA
tatctacgttgggcagttaatagctggaccgccgatcctctgcgtgactcgcgtttccgcacttgggcggcaggcgatacatacagtatttatcccggtccacgcagtagcattcgcttcgaacgtttggtcgagggtatacaagattgcgagaagatccgcatcctccgggaagagctgacaacgaaaggagctaaaggcaaactcgagaagttgaacaagacggttgccaagatcactccggaaggtttatccgagacacaagaatccgctacgcagatggttaatgagattcataaacttctgaatacattataaatagtacaggacgcagactacgcagagcacgcagtctgcgtcccctaaatatatcatcaagcccctacaatgtttgatattcatcaaaaaacgaaatccttacctccgatacctttctttttctttgtccgcctcgattccttcgcctatttttggggcactgaaaaacacaaaaaccattctatatgaacaaactattaatgggcacatgccttacgatggccatgcaagtagggcactcccaaaccttgccgcaattgggtaaagatcctatcgagaaaatcgtagccgccatgactgccgaagagaaagtatccctgttagtcggaaccggaatgcccgggttcggcggccaatcagccgtagtcggcagcacgcaaaatatagtgccgggagccgccggaacgaccttcccgatcgaacgtctgggaatccccgctatcgtagtggccgacggtcccgccggattacgtatctccccgactcgcgaggggaacgaggcgacctattattgcacggcattcccggtcgctaccttgctagcctccacatggaacaccgcattggtcaaaaacgtaggcaacgccatgggcgacgaggtgaaagaatacggttgcgacgtactcttggcccctgcgctgaatatccaccgaagccctctctgcggacgtaacttcgagtattattccgaagatccctacttgacgggccggatagcgacagcgatggtaaacggtatccaaagcaatggcgtgggaacctccatcaagcattttgccgtcaataatcaagagaccaaccggacgggaacggatgcccgcctcacccctcgtgccttgcgggagatttacctaagaggtttcgagatggtcgtaaaagaggcaagcccgtggacggtcatgtcttcctacaataagataaatggtgagtatgcctccgaaagccgtgatttgctaacgaccatcctccgtgacgaatggggttttagcggccttgtcatgaccgactggtttggcggcaagaacgcccccgcccagatccacgccggaaacgatctgctgatgcccggccggccagaccagaaagaggccctcctaaaagcgcttgaggacggttctctctctatcgacgacgtggatacggacgtaacccgtgtattacgactgattcttcaagccccccgctttgcccaatacgcccattccgacaaaccggacctgaaagctcacgccgaggtaacccgtgcgtccgcttccgaaggtatggttttattaaagaatacgaataatgccttgccgctggccccgggtatcaagaagatagcggcttacggtaccacctcgtacgattttatcgccggaggcaccggcagcggcgacgtgaacaaggcttataccgtatccctcgtggaaggtctggagaacgccggttataccatggacgccgaagtgaaagccttatacgagaaatacagtaccgaggaaaaggcgaaacagccgaaagacacgagtcccgccgccgctttcttcaaccaccctcgtatcccggagttcgtaccggatgccgcagggctggccgctaaggcgaaagaggcggatatcgccttcgttacgataggccgtagctcgggagagttccaagaccggaagatcgagggagatttcaacctgacggagaatgagcgagcgttgatccaatcggtttccgacgctttccataaggaagggaagaaggtggtcgtaatcttgaatatcggaggcgtgatcgagaccgccagctggaaatcggaaccggacgccatcctattggcttggcaagccgggcaggaagggggtaacacggtagccgatatcctgtccggaaaggtgaatccttccggtaagctcccgatgactttccccgtgagcatcgccgacgtagcctccacgaagaatttcccggacgcttcggatatcgacctgaaagaaatgttagccggtttcatgggaggaggcccggagcatacggatcgtaagaatattgactataccaactacgaggagggtatctacgtgggctaccgttacttcgatacgttcggcgtgcccgtctcctatccgtttggctacggacagtcgtatacaactttcaattattcgagcttgaaagtgttcatgggcgatacggactacagcatcagttgcacgatcacgaacaatggcccggtagccgggaaggaagtggtccagctatatatctccgcccccggcaagagcatggataagccggcgaaagagttgagaggtttcgtcaagacccaactcctccagccgggggagagccgtgagatcatcttcaaggtgaaagatacggatctggcctccttcgacgagagcgccagtcattgggtcgtagagtccggtaaatatgaggcgcagattggctcctccgccgacgacatccgcctaagggattccttcaacgtgaaggggcgggtaacggagaaggttcatgcggtactgttgcccggcgagaggatcgatcttctgaaaagataagcccggaggtatctacctagttatcgggagggcggggtatcaacctcgccctctacttattaatcacccggctgttccggctctaagaaagtaaggtaggtctccacacgcccctccagcttcgcctccatggtcccttgctccgacacgaagagatatttgtcctttttctcttcctcggtccatgtatcgggagtgtagggagcgatcttccggtcgccggcagtcctcatgaaatagatagcgggcagaaggccgttcagttggatctggttcgggtcgatatagcgttcctcgtattgtcgcgagaaacgcgagctcaccctctccagccgaaagcggtcgagattattcataaacaggtaatccgtgccttcatctcccggcagggaggtgtagatcatagatgagactttcacggcaccggccggtgtcgtgtacaaataatagaaatatacagtccatgtattcttggagcgggtttgaagggtatgtgtctcctgcaaggaatgcaaggcccaaaatcccgggggcgtgcatctcaccctttgtacgaatttatccttcgcgatttccactcttccccggatctccagaaagtccttataggccactgcctctatttcctcgtttgtcattgatggcgtaaacatgattatttttaatttttaaggtaaagagacataaaggtacgattataaatggggattccaagggtttcaaggaaatgtggatgaaagaaagacaaaaaagagaggcgaactcgtacccttatcttttttattccatatattcgtgatgaaaatcccctaagacccatttaaaagagaaaaagttatgactgaagatatagatttaatacgcgtcactggcgtggaatatgtaaagggctataccatgcgattggaatttagcaacggtaaggtgaaattagtgaacttcctccctttactgaaagggaaacttttcgagccattgaaagacctccggaatttcgtccagttcgggctcacacactgggcgctcgaatggtacaatggggcagatttcgctccggattacttgtacaggaatggggtggaggcttaagacaaggccggcggttcgcttcaggtttcgtcctcacgaaccgcttcacggagaagagcgatattgatcttgtggtggatttcgacaaagaggtggaacaggtgaattacgtgaataatttcttcgatctgcgcaacgccttatctgccatcttccaccgggagatcgacttgctagaggacaagtcgatccggaacccgatcctaagaaagaatattgataatacaaaattgctgatctatggatgaatatatcgagaaacatctttatgatgtgctactttctatcgaagagactgagagttactttgagggtaggccaaaataggatactaaagatcgatcccgattttctttggacgcttatcataaaccatatcccggtgctgaaggggggcatgatagggatattggaaaaataaaatatatggaactataaaaccttctccatttcatacaataagatttgacggagaaggttttatggtcatatagatattttcactaatccgttaaaaggatcttatcacagataatgattataaatagataatctcacccgtatccgtattcaacttaaaattcgagatcttttcttgtccttcaaatgatatcacagacacttccatcgtccaaatatttttatcttttcccaataccttagcaacaaatttactattcacagcacattctcccagcgcatccacattcacgctccaaagagaattctttgattccaaatcatatttgtcgatagtaaccaccgtataatcagcccacatccttgcatgcatcaaccttattatatgagtataagaactaggttctttacaaaatacactcaacatcctatcatctcctagatcattatcttcaaattctatcagcctcttaccttccggagagaagactactttgttacccattagaacacttccatcataccaattccttatatctaaataatatgttccaacaaagaccggaaacattttccctccattacaaaaaaacatatcatgaatataaccaccactttcagaatctttgatcgtaggataaaatacatacccccattctgttttcaacaaaccgctcgaataaccgaaagacaaggccttcacaaaatattcctcgtattcgccatatcctttattgatctttatatttctatcataaacattctcgcccgtatattcttctcgcaattcaccattttcgtatataccaaaccacactttatcattcttaaaacctgataaatactcattatcagattcaggatcatcctgaaaagccacagaatttatgacctcaactccttctgatgaatataataggttaccataaaaatgaggatgataaaccaatatattctctccaaactctctaactgaaaaaaagttctcacttccccaactggcttctcgttctttaagagagatagcgctttcctctttcaacaaaaaaggtttatataactcaggagcaatcttcatgaaacatacatatttatctcctaccttaaatggattaccaagaaatgaactggtgtagtctgattcctcacttgaggaggccttccattccgtaatttgttctttcgtattgtcattgaacataccaaaccacaccttttgacctttaatcgcataaatccaagccgtatcattagatgagtaaaactcaagcgtcgccatatcgtaaccgacagtatccttcacatgatagccgccgaactcactataatcataaggaacatcaggttcaggaataattccctctttagcatcttctccacaggccataaaaaataataaacctaacaaataaaccaattttctcatatctttatcacattcttcctcccgtgcctcctccggtaggcggttaacaaataaaagaagcgtggagaccattgtctatcactgtactgaggctctggactgcccttacccaataataagacaatgatcccacgccttatgcaggtatataatctatccatgaatgggtaggtatataacagataaagcgcaggagccattttcctattatcttgggtaatgaaattgtccagattccagtacaagataatatcgaaacgcttctacgttatttttccaatacgtcgcgaagatcgtgtttttttaaaacattcgcaaaacaatcagattcttaatgtctcttagccctaagaaatgccctcgaagggtgaaaaatgacttcttagggctaagatgattattcgcgccattcaatccccattttttagacctaagaagcccttattcagcaaatatccctaacttagagaagtttttaaactctaaatcaaatttaccatgagtacttacacaaaaatcaagacacttccgctctctcttttcaacaacgccgagtacctctccttcatgaaccacgtcctcgacctagccaacggaaatagcggtgacggcgattccgagtcccccgacgagatctccctgctgaccggcaacgacggcatccccgagctgggcctcaccaaagaattcctcgagacctacgaggcagacctcctcgccatggccgacgtggtggacgagagccgcacctcgcaggagaccgagcaaatgaccttgcacgataccaaccgcgacaacctcgctatctatatcatcacccgcatctcacgggccggtaccctcccgttggaggccgagcgtgacgcgggcaagtatctatacaaggtcatcaagccctataacggggtcgcccgcctccccatggcgcaggagaccgccaagataaagggcctcttgctggatttgcgcaaggacgagaacaagccgtacgtcaccacgctcggcctcgacgcttacctcgccgaactggagaaagagaataacgcctacgaccgcctgtcgcagcaacgcgtccaaaaccggaccacctccaaaaaggaaagcggcgccaacctgcgcaagcggatcgacatgtattatgacgatctcaccctgctggcccagtcccatagcatagcgaagccgtccgagaaagcgaccgccttcatcgccgccctcaaccagctgatcgccgagaccaccgccgcctacaaccagcgcatggccgcctccaagaaaccggcgcccgctcccgagcctacacccgagcctacgcccggcggagactccgagagcccggacgagatctaaccgtcacgtccctccctcccgacgcggaagcgggaaataaaaagagaaggaaaacaattccccttctctttttattccgtatattcgcgaaggaaattcctaaaacagagcgatatggagacaacgacatcattaaagacattcgaggtaaccatccccgagaaatacgccgacatcttgaagaaattcatcacttcgctggaaggcaaggtgaaggcacagaagaaatccggattggacgaggccttggaggacgtgaaggcaggaaggatacacaaatacgagaactttgaggcattcaagcaaaaaatgctagagctatgacttataccgtacataccacttccaaattcgaacgtgacatcaagcggtgcaagaagcggcacttggatataaacctcttattagagactgtagaaatcctcaaaaataccggttcccttccctcccaataccacccgcataagctatccgggaaatacgcaggattgtgggaatgccatatccaaggagactggctgctgatatggagccaagatgacacggagctaatcttgcttttcaccgatatcggaacgcattccgacctattctaaatagaaaaagccgcctccccgttacaggaagcggcttttttgtatctagtatttacttttcccggataaatatattaatcggcgtaccggtaaaatcccagttctcgcggatcttgttctcaaggaaacgtttgtacgggtccttgatccattgcggcaagttacagaagaacacgaaagaaggcacgctgcccgccgggagctgggtgatatatttgatcttgatatacttacccttccatgctgggggaggataattctcgatgatcggaagcatcacctcgttcagcttggccgtagggacacgcttggagcgattctcgtaaacctccttggcggtctccagcaccttcaggatacgttgtttcgtcagagcggagataaacaagatcgggaagtcggtaaacggagccagacgctcgcggatagcggtcgtatacgagtcgatcaccttctggctcttatcttcgatcaagtcccacttattcacacaaaccaccaatcccttcttattcttctgcaccagcgagaagatattcatatcctggctctcaatgcccctcgtagcgtccaacatcagcacgcaaacatccgagttctcgatcgcgcggatcgaacggatcaccgagtaatactccaagtcctcattcaccttccccttcttacggatacccgccgtatccaccaaatagaagttcaagccgaatttattatatttcgtgtagatggaatcacgggtcgtgcccgcgatatcggtaacgatatgccgatcctcgccaataaaagcattgataagagaagattttcccgcgttcgggcgtcctataatcgcgatacggggcaactcctcctccagtatctccaccttctcctcgggcaacgtcgccacgatcttatccagcaaatccccggtataagaaccattgatggccgagatgcagaaaggatctcccaagccaaacgagtaaaactccgccgaggccggatgcagatcataattatccgccttgttcgccaccacgatcaccggccgcttgcaacggcgcaagatctgcgccacctccatgtccagatccgtgatgccgttcaatacatcgacgacgaacaagatcacgtccgcctcctcgatggccacttttacctgcttgttgatctcctcctcgaaaacatcctccgagttaaccacccatccgcctgtgtcaatcagcgaaaactccttgccggtccactccaccttgccgtactgacggtcgcgggtagtaccagcctcctcgttcacgatcgcctgacgggtacccgtcaaccggttgaaaagggttgacttacctacattgggtctccccactatcgctactatatttcccataaattctcctttcgtatgctattattagtccagctgataaccgaagttcttcaatatgttgtcacggttacgccagtctttttccactttgacaaacatttccaaaaacaccttctttccgaagaaacgttcgatatccttccgggccatagcacctactttcttcaatgcttgcccttgatgcccgatgataatccccttctgggtatcacgctccacgatgatcagcgccttgatatggatcagctcatcatcttccttgaacaactcgacgaccacttctactgcgtaaggtatttccttctgataatataacaagattttctcacgaatgatctctgtcacgaagaaacgggccggtttatcggtcaaggcgtctttctcgaaataaggcggggaatcaggcatcaactcctccacccgacgcttcacgtaatctatattgaaattcgaaagcgcggagatcgggatgatctcggccttcggaagcaattccttccactgggccacgagcttctccagctccggctgattggtctggtcgatcttattgatcaacaagagaaccggacactctatgctctgtacccgtgctaggaactcgttatttttatcaatcgtctcgacgacatccgtcacgtacaacagcacgtcggcgtcgcctaaggcggattgagagaaattaagcatggattcctgcaacttataattcggccgcaagactcccggcgtgtcagaatacacgatttgcatatcgtcggtattcacgatacccataatacgatgccttgtcgtttgcgccttcgaggtgataatagagatccgctccccgaccaaacgattcatcaacgtagacttacctacgtttgggtttccaacgatattgacaaaacccgatttatgctttttttccatcatacccccatttcagataaaccgctccccacgtaaagcccgctccaaaagcggcaaggatcaggttatctccttttttcaattgattctcccattcccatagacaaataggaatcgtaccggcgcttgtgttgccatatttctggatattgatcatcaccttatccatatctacgcccaagcgtttcgccgtagcgtcgataatccgcaggttcgcttggtgaggaacgatccacgcgatatcatcatgcgtcaagccattcttctccgcgatctcagcggccacgtccgccatataagaaaccgcgtacttgaacaccacacgtccatcttgataaacgaaatgctcacggttgtccaccgtctcgtgagaaggaggataagccgagccgcccgatttcatgatcagatgcggatagcctacgccgtctgtccgtaaaatagtatccaagacaccgaactcctcggtagttggctccagcaagaccgctccgcaagcatccccgaacaaaggacaagtagaacgatcttgataatctgtaatagatgtcatcttatcacccgatacgacaaccaccttcttataacgccccgagcgaatataattagcgcccgtctccaaagcatacaagaagcctgcgcacgcaccttgcatatcaaaagtcatcgcattcttacaacctgtatgataagcgatgatagaagaagttgtcgggaaatgatgatccggggtagtcgtagcggtcaagacaacctctacttcttccggattcaggttcgttttctcgagcaattgcttcacggcccgtatacccatgtaagagagtcctacgccctcccctttcaatatcctgcgctccttaatacccacacgagtcatgatccactcatccgtcgtatcgaccatcttggaaatatcctcattcgtcaatacatcttcaggaacgtatccacccactcctgtgataaccgcatttatcttatccataactttaaaaataaaaggactacttatcccaattaaaaaaaagccctaaaaaaacttttagggctatttcttttgttcatcaaaccatataagttgacaaacttacacagcagcttctttttcaatcgctaatttacctctgtaataaccgcactcaccacatactgtgtgatagatgtgccatgcgccacagttcgggcaaattgccattgttggagctacagccttgtcatgagttcttctcttggctgttcttgtcttaccttgtcttcttttaggatgtgccattgttttatttatttaattgttatcattctctagcaaacctttcagagcatcccaacgaggatcggcaggactagcgtttccgtcatcttccaacgccaaatcatcacctcccatgtcatcctcaaaatcgtcttcggtctcatccgaacttctggcggtatgtttcttcaatttagacgacattgccttattacatttacccggcgcatgtacatgcttcatgggaaccgccaaagcgataaactcatacaggaaccacgccaaattaatagcgccctcctcttccggtatcacgacaacctcatcactttcctcggcatattccttgccgaattttaccaccagacgattgtgggtatcaataggaatttccatatcgtccaagcatctatcgcatggaacaacaacaaccccttctatctgaaagttcatctcaaacatcattgacgaccgttttacggtaagatgaaccttcactttgcccttctggacctcggttccgtcaatgtccacaaaaaacttgttctccaaaagatactcgaattcgtgtactcccggagagagatttttcaaatctacattatataatttaaatttccccaaagccttttagtgtaaaaaccttgcaaaggtacgaaaaaactaaatacaaaaacaatacctttatgcttattttttcctataatacgatttaacccttatatttcttcaattttatacgaaaagtcgtccctttccccagctccgaactcttcacgaaaatctttcctccttggaaggactcgataatacgctttaccaaggacaagcctagtccccagccacgtttcttggtcgtataccccggattgaaaaccgtcttgaattttgatttcgggataccttttccggtatcagccaaatcgatcagcacgaccttctctctttcctctacttttagcgaaatctcaccctgcccctccatagcgtccaccgcatttttcgtcaggttctcgattacccaagcgaacagggaatcattcattaagaccaatatcggccgctccggcaaatacgtattaattttcaccttcgaggaaatacgggtctccatatatcccaaagccgcacggatggattccacgatatttgtcggaaccggatccggatctgaaccgattttagagaaacgctccgctatcgtttgtaagcgtttcacatccttatccatctctgtcaatagagaaggatctatatctttcgttcgcaaatattcaacccaagcgattagcgaggatataggcgttcctaattggtgagccgtctctttcgataaccccacccacactttattctgttctgccttctttgtactagccaaggctaaaaaagcgattaatataaaaacaaatacaactgataattgcgcatagggataaacaagcagtcgctttaagataatcgaatcatcgtaatataaatattggtaagtaccatcctccatgtcaattacgatcggaggatttttggttctcagttccttaaccttattcgtcatgaactgcgctacattcttttccggaatctctatattattgtaagaaaccacgctatccgtctcgctgcataatataacaggaatagaagtattcccttggatgatttttaggataagattcatattaaggcttggattctcactggtcatgacccgggttgcctcactccaaacctcgatcttctgacgctcttctcgggccagatctttaatcaagagatccgagactaccacagaagccatagcgatcaatacagcggcaaaaataaagcctaatttccatctttgacgagaatcatatatgctgctcataaatcagaatcattcggtgaattcttaatataacggcaagatacgaactttattgttcccgattcagcaaacaatgaaatctcacccaattgtagagacgtagcgtgcagcgtctcatcccttcaaatggtaacttagaatatcgtcagacgatacgagatgcggcacgctaggtctctacgacggctggtgtatataacagaaaaaggagtcaccccttacggactgactcctctccatcggctatcgccttcttcaagacggcggctacctactcttccactgttacgcagtaccatcggcgtgacga

SEQ ID NO: 806 - DNA, 15870 bp, unidentified
  source 1..15870: mol_type = unassigned DNA
  misc_difference 10775: note = a, c, g, or t
  misc_difference 10776: note = a, c, g, or t
  misc_difference 10777: note = a, c, g, or t
  misc_difference 10778: note = a, c, g, or t
  misc_difference 10779: note = a, c, g, or t
  misc_difference 10780: note = a, c, g, or t
  misc_difference 10781: note = a, c, g, or t
  misc_difference 10782: note = a, c, g, or t
  misc_difference 10783: note = a, c, g, or t
  misc_difference 10784: note = a, c, g, or t
  misc_difference 10785: note = a, c, g, or t
  misc_difference 10786: note = a, c, g, or t
  misc_difference 10787: note = a, c, g, or t
  misc_difference 10788: note = a, c, g, or t
  misc_difference 10789: note = a, c, g, or t
  misc_difference 10790: note = a, c, g, or t
  misc_difference 10791: note = a, c, g, or t
  misc_difference 10792: note = a, c, g, or t
  misc_difference 10793: note = a, c, g, or t
  misc_difference 10794: note = a, c, g, or t
  misc_difference 10795: note = a, c, g, or t
  misc_difference 10796: note = a, c, g, or t
  misc_difference 10797: note = a, c, g, or t
  misc_difference 10798: note = a, c, g, or t
  misc_difference 10799: note = a, c, g, or t
  misc_difference 10800: note = a, c, g, or t
  misc_difference 10801: note = a, c, g, or t
  misc_difference 10802: note = a, c, g, or t
  misc_difference 10803: note = a, c, g, or t
  misc_difference 10804: note = a, c, g, or t
  misc_difference 10805: note = a, c, g, or t
  misc_difference 10806: note = a, c, g, or t
  misc_difference 10807: note = a, c, g, or t
  misc_difference 10808: note = a, c, g, or t
  misc_difference 10809: note = a, c, g, or t
  misc_difference 10810: note = a, c, g, or t
  misc_difference 10811: note = a, c, g, or t
  misc_difference 10812: note = a, c, g, or t
  misc_difference 10813: note = a, c, g, or t
  misc_difference 10814: note = a, c, g, or t
  misc_difference 10815: note = a, c, g, or t
  misc_difference 10816: note = a, c, g, or t
  misc_difference 10817: note = a, c, g, or t
  misc_difference 10818: note = a, c, g, or t
  misc_difference 10819: note = a, c, g, or t
  misc_difference 10820: note = a, c, g, or t
  misc_difference 10821: note = a, c, g, or t
  misc_difference 10822: note = a, c, g, or t
  misc_difference 10823: note = a, c, g, or t
  misc_difference 10824: note = a, c, g, or t
  misc_difference 10825: note = a, c, g, or t
  misc_difference 10826: note = a, c, g, or t
  misc_difference 10827: note = a, c, g, or t
  misc_difference 10828: note = a, c, g, or t
  misc_difference 10829: note = a, c, g, or t
  misc_difference 10830: note = a, c, g, or t
  misc_difference 10831: note = a, c, g, or t
  misc_difference 10832: note = a, c, g, or t
  misc_difference 10833: note = a, c, g, or t
  misc_difference 10834: note = a, c, g, or t
  misc_difference 10835: note = a, c, g, or t
  misc_difference 10836: note = a, c, g, or t
  misc_difference 10837: note = a, c, g, or t
  misc_difference 10838: note = a, c, g, or t
  misc_difference 10839: note = a, c, g, or t
  misc_difference 10840: note = a, c, g, or t
  misc_difference 10841: note = a, c, g, or t
  misc_difference 10842: note = a, c, g, or t
  misc_difference 10843: note = a, c, g, or t
  misc_difference 10844: note = a, c, g, or t
  misc_difference 10845: note = a, c, g, or t
  misc_difference 10846: note = a, c, g, or t
  misc_difference 10847: note = a, c, g, or t
  misc_difference 10848: note = a, c, g, or t
  misc_difference 10849: note = a, c, g, or t
  misc_difference 10850: note = a, c, g, or t
  misc_difference 10851: note = a, c, g, or t
  misc_difference 10852: note = a, c, g, or t
  misc_difference 10853: note = a, c, g, or t
  misc_difference 10854: note = a, c, g, or t
  misc_difference 10855: note = a, c, g, or t
  misc_difference 10856: note = a, c, g, or t
  misc_difference 10857: note = a, c, g, or t
  misc_difference 10858: note = a, c, g, or t
  misc_difference 10859: note = a, c, g, or t
  misc_difference 10860: note = a, c, g, or t
  misc_difference 10861: note = a, c, g, or t
  misc_difference 10862: note = a, c, g, or t
  misc_difference 10863: note = a, c, g, or t
  misc_difference 10864: note = a, c, g, or t
  misc_difference 10865: note = a, c, g, or t
  misc_difference 10866: note = a, c, g, or t
  misc_difference 10867: note = a, c, g, or t
  misc_difference 10868: note = a, c, g, or t
  misc_difference 10869: note = a, c, g, or t
  misc_difference 10870: note = a, c, g, or t
  misc_difference 10871: note = a, c, g, or t
  misc_difference 10872: note = a, c, g, or t
  misc_difference 10873: note = a, c, g, or t
  misc_difference 10874: note = a, c, g, or t
tcagatcgccacatcctgccactgtccgccgatcagttcgcgggtggatttgaacccggcctttttcagcagttcgaatgcttccgcacgtccgtcgttcaccaggtcgggatagtggcagtctgagtttaccatcaccggaatatccagctcatgtaagcggtgcagatagtcggtatgcgggtagacctcctgtttcttcacgaggtttttcgtgttgacttcgaccatcaggcccttttcggcaatcaggtgcagacagtcgttgaactgtttttgataccagtccgcttgcaggtcgaagccttcgcatttgtgcccgttcatgtatatcttgtccatgtgcccgacgatgtcgattccgcctgcctcgatcattcgccgtgtggaactgaaatagtgggcgaccagcttgcggatatctccgtcgtagtaggcgtcgacagacttctggtattcccggaaaggaccgtcgatacacaccatattctcttccgcaagcggctgtgcgatcggaagaaagtggatggaaccgatacggtaatcgagcggcagattgcggaagtaggggatggacgcgttgtagctttcgtctaagaaatcgatttccagtcctacgtatatttccaaccggtcactgtatttctttttcagtcgttctatttctgtcaggtattcgggcatgtcgtctttagacatgttccagaatgtttcgaacggcagtggtgaatgggatgaaaaaccgtaggcgcggaacccgtgcgcaacagcgaatttaatgaagtcttccggcgtgctccgaccgtcacagaatgtacaatggctatggtagttactgagttgcataaatttttacttgtaaaagggcaaagataatttttttatcccgaaagacaacctgtttgataaaaaaaggcttgattgctgcctaagggttagcggcagaatcaagccttgaaaaacacgtgaataatgaaaaatcgtatgttttattttattacgttcagttcttttccaactttgataaatgcagcgattgctttatccagatgttccgtttcgtggcctgcggacaactgtacgcggatgcgggcctggcctttcggcactaccgggtagtagaagccggtaacataaatgccttcttcctgcatcttggctgcgaaatcctgggataatttagcatcatacagcataacggcgcagattgcggactgagtcggcttgatgtcgaaaccggctgctaacatcttttcacggaagtagctgacgttgttcatcagtttcgtatgcaaagcatcgctttctttcagcatcttgaacatttccaggctggcacctacgatagcgggagcgacagagttggagaacagataaggacgggagcgctgacgcagcatgtcgatgatttctttctttccggttgtgaatccgcccatggcgccaccgaatgctttacctaacgtacctgtgaagatatcgactcttccgtatacattatattgttcagccacaccgtgtcctgtcgggcctactacaccggcagagtgggattcgtcaaccattaccaatgcgtcatatttttctgccagttcgcagattttgtccatcggagccacgtttccgtccatagagaacacaccgtctgttgcgatgatgcggtgacgttgtgcctgggcttcttgcaggcaacgttccaggtcggccatgtctgcattggcataacggtagcgttttgccttgcaaagacgtacgccgtcaataatggaggcatggtttaaagcatcggagatgatcgcatcttcttcagtgaacaacggttcgaacagaccgccgttggcatcgaaacatgcagcgtacaggatcgtatcttcggttttgaaatagtcggagatagcggcttccagttgtttgtgcagatcctgtgtcccacagatgaaacgtacggatgacatgccgtatccgtgtgtgtccatagcttctttggcagccttgatcagacgttggttgtcagacaggcccagatagttgtttgcgcagaagttcaaaacgtcgcttcctgcgtttactttgatgtcggctctttgaggagtggtgatgatacgctcgttcttatacaatccggcagctttgatgtttgccaattcctgagtaaggaaatctttcagtttaccgtacataactttgttttttgttagtatttttaattaagttgacaattatatctctattatcgcagacaagtggcaaaatattattcttgaaaccatttttttctttgtctctgatttgtctgccgatgcggcaaaggtcatattttttttgaatatataggctaaaaaatacaagaaattcataccggaatgtttttattctctatacctttgccatcgaaaaaacttaaaagaacatcaaacgcaatgaagaatgtattagtaattggttctaccggtcagattggatcagagttaaccatgaagttgagaggtatctacggtggaaacattgtagcaggttacatccccggacaggagcctaaaggcgaactgctggaatcagggccttctgcaattgtcgacattacaaacgaacagcagattgctgagactgtgtccaaatataaggtagatacgatttataacttggctgcactgctgtcagccgttgcagaagcaaaaccgcagcttgcctggaaaatcggtatgggcggtttgtttaacgtattggaagttgcgcgtgaaatgcattgtgctgtattcactccgagttcaatcggtgtgtttggcaataacacgccgaaagacaagactccgcaggatacgatccgtaacccgcgtactatgtatggcgtcacgaaggtttcaggcgaattgttgagtgactactataatatccgtttcggtgtcgatactcgttccgtacgttttccgggacttatctcctatgtgacacctccgggtggtggtacgaccgactacgcagttgatatctattattcggctgccaaaggtgagaagttcgtatgtccaatcaagcagggtacattcatggatatgatgtatatgccggacggtctgcgtgcagctattgaaattatggaagccgattcgacgaagttcgttcatcgtaactctttcaacattgcatccatgagctttgatcctgaaattatctacaacaacatcaaaaagtatgttcctgacttccagatggaatatgatgtggatccgttacgtcaggctatcgcagaatcatggcctaactctttggatgacacatgtgcccgtgaggaatggggctggaaaccggaatatgatctggattccatgactcaggatatgttggctaaattgaaagaacgtttcaataagtaagaattaattttccgatcattagcagatcggtaggaaagaagcgactgcccggtgtcggacagtcgcttttttgtttggatcgtttttatccagtattgtaggctgtttcaatcataatgtgtctgttgtttgtgcagggaatgactaagtcaaaagtgtatgaaaaattatgttgtaaaacatgaaatggttaaatcaggttaagagaaagcttttttttgtggaaatattatgctgcataacataaactctctatatttgcactgtgtttttcatggtattagatttaaggttaacaatgaagattggctgtctgtgaagatagcctttttttgtttatacccggttgatgttgtttcctccgagaagcgatcattttatccgaattgcccgttcttttggtattcttgattatatttgtatatctgaaaagattcattgtaataaaaatatctttatatggaaatgtacaaagcaaatgacaaccggtatgccgatatggcttataggcgttgtgggcggagcggattgctattgccggtcatctctctgggattgtggcataatttcggcagtgtagatgtgttcagtaactttattcagattgcgtatgccgctttcgacaatgggattacacattttgatcttgccaataattacggtcctgtgtatggatcggcagaggaaaatttcggccgtatcctgaagaaaggtctgggacaatatcgggatgaacttgttatttccacaaaagccggatatgacatgtggcctggtccgtatggcaactggggaagtcgcaagtatctgatggcaagccttgaccagagtttgaagcggatgggattggaatatgtggatattttctattcgcatcgtccggacccacagacgccggtcgaagaaacgatgggagcattggctgacatcgtccgccagggaaaagccctgtatgtcgggatatcgaattacactgccggacagacggaaaaagcacttgccgtattgaaagaacatcgtgtgccttgtttgatccatcaagcgcgttattcgatgctggatcgcaggatcgaaccggacttgttgcctctgttgaagcaggaaggagtagggatgatcgccttctcgccattggcacagggcatgttgacggataagtatctgaacggtattcccgataattcgcgtgcggccaaatctacgggccatcttcaacgtgaacaggtgacggaagaaaaaataaataaagtaagacaactgaatgaccttgccaaacaacgcggacagacgttagcggaaatggcgattgcctggctgttgaaagacgaccgggtgacgagcgtcctggtgggagccagttcggttgcacagttgatagataacctgaaggcgttacaaaatacagccttttcagcggaagaaatacaaatgatagaaaatatattacagtaatatacactgataaatcatcatttattaatccaaacaattaatgaaaccattcttatatcaggttgcatcccttttttattctgaatacggggcggaagtgagccatctggcctttgttttcccgaatcgccgtaccgggctgttcttccagaaatacttgtcggaagtatctgagaagcctcttttctcgccgacgatcctgacgatcaacgatctgtttgtacagttgagcggaaagcaggctgccgatcggatcagcatgctgtttaaactatatgatatttatttgagacatagcggttcttccgaaacgttcgacgagttcttgtattggggggaaatgctgctgaatgattttgacgatatcgataaatatatggtagatgcccgtatgctcttcaccaatgtgacggacctgcgtgagatagagaatgattttagttttctgagccctgaacaaattgcggctatccggactttttggtcttctttttacccgaaaggagatacgcccaaccaggaacaatttctggcggtctggcagattttatatgccctatataccgatttgcgggaagcgcttgccaccgaaggcaaaggatatgaaggtatgattttccgggaagttgtcgaacagatggagaaagacgaatgttgcgacctgccctatacaaaggttgtatttgtcggactgaatgccctctcggtggctgaagaacgtttcctttccgggttgcaaaaacggggaatagctgatttttactgggattacgcctctccgaaagtgacggacccagataataaagcctcttacttcgtggagcgcaatttgcggcaattcccgtcgcaattaattgaaaatggacaattgactattgacaatgaagatgacgacaaaaagaagatcgaggtgatcggcatcccttccggaatcggacaggcaaagcaagtgtgcagcattctgaacgagctttgcaaggaagacgaaatgagtgcggaagaagcgttgcggacggctgtgattctgccggatgaacatttgttgattccggttctgaatgccattcccgaacagatcaaacggatcaatgtgacgatgggatatccgttggccggtacaccggtcgcatctttgatggaatatattctggctttgcaaaagaatattcgttatgtggaccggaggccggtgttctatttccgggatgtcttgccaatcctgaaccatcggtatatctcgactacttctccggaggtggtttctaatctggtaaaagatatttcagaaaacaacaagatttacatatcgtatgacgatctgaataagacgccattgttgtccatcctttttactccggtgactgcggtggaaactttctccgattatttgattaacgtgttgcaggaactgaataaagctgttgaaggtggaaagttgaaagttgaaagtgtaaatagtgacactgagccactttcaactttcaactctcaactctcaactattaacgatatcgaacaggagtttatcttccattatttcgctacggttaaccggatgaaggaagtcatgcgggaggcgaatgtagaaatgaaaatcgacacctatttccgtttgctgaaacgtgtgacggacacaattacgattcctttccatggtgaacctctttccggtttgcagatcatgggggttttggagactcgtgcgcttgactttgaccggttgattatcctttcgatgaatgaaggaattttcccgttgaggaaagcggctaattcatttattccttataatcttcgtcgtggattcggtttgccgacatacgaacatcaggacagtgtttgggcgtatcatttctatcgtttgatttatcgtgccagccatgtcagtctgctttatgatacaagaagcaacggattgcagacaggcgaggttagccgtttcgtgcatcagttgcattatcattatgaggagccgatacagaataagctggttgtttacaatgtctcttcttccaagactcctgccttgcaggtagctaagacggaggaagtcatgaaccgtctggctgatttccggagtggtgggacgcgggcgatatcggcgagtgcagtcaatacctatctggattgtccgcttaaattctatttctccgttgtcgagggaatacgtgaagaagaggaggtaagcgagacgatcgaaagtaatgtttttggaagtatcctgcataaggtgatggaagaattgtatcagccattctgcggaaagatggtgacggctgatctgctgaaagcgatccgaaaagatacgcctatgttgacgggagcagttgcccgtgcctttgccgaaattttctttaaaacggacattgttcgtccactcaccggacaaaacttcctgatcggcgagatgattcgcaaatatgtggagaaagtgctggaacgtgacgcaaaacagactcctttccgttatatcgaatcggaaaagaagataaaatgcctttttccattgacggataaaagcaatatccagttgaaaggatttatcgaccgtatagacgaggtacgcgatgtcgtccgcattattgactataagagtgggggcgggacgacgcagtttacctctgtagaagctcttttcgacaaagcagatacggatcgttccaaagcggttatgcaggtctttatgtatgcatggatgtataacaggtcagttcagctttcaacagctattcagccgggtatctattatatgaggaccctcttttcttcctctttcgatcctggaatttaccatcgtacagaccggttcaaaacagaacaggttttggacttcgccaactatcgcacggattttgaagacagcctgcgaaattgcttggatgaaatcttcgacacagaaaccccattcgtgcaaaccccgaacggcaaagcctgcatgtattgtccgtttaaggatatttgcgggaaatagtatttttacagatttcccatatattcatccacaatttcattcaggaagcggttgaatggaagaagctttcgaaaacaatcgatggtttcttccatccagtccggctggctgaaaaaactgtcgggcttaatacctataacgctgaagtctttgtgccttaatatatgaccgtaaggagaatcggaggggaaaccggccgggatacgttttagcatgtccccttcgagtgacgggtacagagctttgaaggaaggctcttcgatgatggaaacaaattcatctatgttattgtatatttcacgtcgaaggactttcaatatttccggtttgggataccagataccaccggacagtacgcagtattccggttcaagatgaaagtagtaagctccccggatactatgacgtcctccttgagcaatacaggctaacatataagtcttgtaaggcgacttgtcgaggctgaagcggatgtcgcgattaatacggaacagacatttccgggcatccaatccccgtatatcaggatcaaatacgctgattcgttcgattaactcttgtacttcgttgataaaagcacagcgaagtttgtcatatcgttctctattttcatggaaccaaacggtattattgtttcgtcgtaaatcgtctaagaatcggataatttctgcattcatattaggatattcttttttttattgtatttcgtatctccattgtttcggagtcatctgtttcatctttttgaaatagcgattgaagtagggaatgtcggtgaagccgcattgccaggctatttcgttaatgtccttatccggaaagttgcggagtaaagtgccaacggcctctatccggtattcgttgatgaagtttgtaaacgttttgcctgtttcacgtttgaaaaacgagcagaacgccgttgtgctcatgctgattacgtttgcggcgtccgaaagagttattttctccttgtaatgctcgatgacgtatttgaagatcagttgcatacgttgcatgtttttggtaatgccgttgaataccgtttcctgcaaaccgatagggattaaatcggttgtggttccgatttgttgcaggatgcggatcaacatcagcatcctttcgcttgcattcaggaggttcatttcttctaagcaggatttgatctttccggctgtttcgcctgtcagcaggatgccttgctggattgccgataaccggtgagcggcatattcccattcggtaaaaaaagacaggccggtttgtagcaagtcgggattgaattgcacaactatgcatctccgttttccatcaggctcgcagctttcggggttatacatccaacaatgtggttggttggtcgggaccagtacgacttctccctcctcgaacggctccagaaagtcgcctatcatccggtagcctgaacctttcacaacataacatatttctatttcgggatgaaaatgaagaggcatttcgtctttcgggtacaagctggaataatcgtagcgtaatgaggcacaactatcttttttgatttgttcgaattttagtttctcgtgcatgtcggatgaactttctgataaaacacagtaaaattagacaataattgcataatctgcgacaattacacttaataattttgttgtttctttgcggccggaaaaacagaaagattgaattaggttatgaagaaaggtttgtatgcattgtcttttggcacatttgggctggggattgcagagtttattatgatgagtatcttgccggatgtggcggcaggatttgatatttccttatccgaagccgggcatcttatttcggcttatgcgttgggtgtatgtgtgggagcgccgttggtagtggtggtggccaggagttggccgctacgtacgatcttgctcgctttggttgggctttttgttgccgggaatctgcttatggctctgtcggccgattattggatggggttgtgtgcccggtttgtatcggggttgccgcatggggcttatttcggagtcggttcgattgttgccagccgtttggcggagaaagggaaaagcacttctgctgtagctattatgattatggggatgacgattgccaatttgttcggtgtcccggccgggaatttcctggggtactttctgtcctggcgtttggtttttgtgattgcagcgttgtggggtggcgtaacgatttggtttatccggaggtgggttcctgttttgcccgccctgccggcgacgaatctgaaagggcagtttcgttttttgagaaggccggaaccgtggatgctgattgctgctaccatgttaggaaacgggggagctttttgctggtatagctatgtcaatccgttaatgacggaggtgtccggtttcagtgtcgggacaatgcctgtattgatgttgctggcgggtgcgagcatgtgtgtcggtaactatttgggagggcatttgtctgatcgttttacacctggtatcgtagcgatgtccatgcagtttctgatgtttgcatcacttctgctgatttatttttttgcttcgtacggctttttgtccgctttgctgatgtgcgtttgtactggttgcctgtttgcagtttcttctccacagcaattgttgttgcttcaatattctcctggtggagagatgatgggcggggcgatggtccagcttgcttttaatttggggaatgccgtgggggcttattttggaggattgtcgatcgaacatggggcagggctggaaagtacggcattgatcggttcgttttttgccctgttaggaactacggtatttctggtattcaactatatggtgtttaaacctcagaggaaattacttttaaaggggggaatataatttccgaggatcaagacggtgtttttggagataaaaaacagccgtccgaaatcgggacggtgtttttggagataaaaaacagccgtccgaaatcgggacggtgtttttggnnnnnnnnnnnnnnnnnnnnnnnnnnnnnnnnnnnnnnnnnnnnnnnnnnnnnnnnnnnnnnnnnnnnnnnnnnnnnnnnnnnnnnnnnnnnnnnnnnnnagataaaaaacagccgtccgaaatcgggacggctgtttggatttataatgtctcttgtttcagttgttcgacgaaacgatcgattcgctgtagttctttcggaatatcgattccctgcggacagtgtggattacattggttgcaactagtacaatgatctgcttggcggagtttcggtacactgcggtcgtacccgatcagataagcccggcgagcttcgcggtagttttcatcctgtccgctctgagggacattcccctcgttcacacatttattataatgaagcaaaattcccggaatatcgataccgtaaggacaaggcatacagtatttgcagtcgttacatgggatggtcggatactgcatcatcaagtcggcggtgtcgaacaagaaacggttttcctcttccgtcaacggttgcaacggacagtaagagcggaggttgtcttgcaggtgctccatgtaagtcatgccgctcagcacggtgagtacgccaggaaacgagccagcaaaccggaaagcccaggaggcgacgctccgtcccggttcgcgttgcttcaggcgggcgacgatatggtcgtgcacgttcgaaagccgtcctccgaggagtggttccatgatgatggcgggaatcccccgtttctgtaattccccgtacagatattccgcatcggtgtttcgcgggttgatctctttggcatgtttccagtccaggtaattcaactggatctggacgaaatcccattgatattcgtcgtgtttcgaaagcaaataatcgaacacctctatatctccgtgataggagaaacctaagtttcggatacgtcctgccttgcgttcttcgagcaggaagtcgagtatgccgttcttgacataccggttttcataggcttctataccacccatgccgatcccgtggagcagcatataatcgagataatcgacttgcagctccttgagcgaattgttatacatcgcgatagaggcttcgcggctccatgtgtcgggagagaagttcgaaagcttggtggcgatataatatttgtcgcgcggatagcggctgagggcgatccccatagcatgttccgaacgtcctttgcagtaggcgggcgaggtgtcgaagtagttcacaccgtgctcgatggcatagtcagtcagccggttgaccatctcctggtcgatttcgtcatcgctatctcttgcgctgcttttggcaatagtcggcagacgcatgcatccataaccgaggatggaaactttgtcttttgtggacggcgtcgtgcggtatgtcatccggtccgtgggaataggggtggagcttcccgaacctgaggccatctcgctgtccgaactgcacccggagagcaacggggcggtagttgccgtgctgattcctacaatcttcaggaaatcgcgacggtttatcgcttgatgattgtctttttccatatgtgatgattcttttatttcttgatcaaatattccggtgttgttcgtgcccttccacataaatggcgctgaacggacgcgacgggcacaggttttcacaggctccgcagccgatgcatttttcctcgtttacgaccggaagttgaggcgaatccgggtcgttcgggtcttttgccaccatcaagatcgcctgggtagggcaatggcgggcacagttgccgcaagtgacaccatcccggttgacgatgcaattttcctgaatcagtacggcatgtccgatctggatggccgttttgtccgctttcgtgatcggacggatcgctccggtcgggcaaacttccgaacatttgacgcattcgggacgacagtatcctcgctcgtacgatacttctggctgcataaatgtttgaaggttccccgaaggacgcagcacatggttcgtacaaaccgatacacaaagctggcacgcggtgcaatgctgggagaaattggcagcgctcagcgaacccggaggggtgatcggggttgtccggtccggtttctttttatcttcgatgatggccagtccgccgtcgactttcttgtccgggagttgtactttttcttgggctttcaatgcggcagaagtggcaagtaatgccgatacggtaaagaacttgcgacgatcgggcttgtctacgaccggttggttggtctgtgtttcagccttgtttgtttttctgcgtgtatatcggatggccccttgtcggcatttgtctatgcagtccatgcaatcgacacagcggctatagtcgatctcgtgtactttcgcattgatacaggctgctttgcaattacgggcacacaagccgcaaccattgcatttggacgtatcgataaccggtttgaaaacggaaaaacgggagatcaatcccaaaaacgttcctaccgggcagatcgtgttgcaataggttcgcccattccgccaggcaagtatgatcagtataatgaaggtaactgtggcaatgataaaggttgggaggctccgtagccagacttccgtttcgtagaaagcataattgtctgcccgttctgccaagtaggccagaaagttgtttccccattgccagaggggtgcgaataagttagaggcgatacgcccgtaagcgctgtaaggtgcgatcaatgccgcccatgctcctaacccgctgatcatggcaaggataaatatcaccatggctccgtatcttaaccaggacaaggcgggggaataacggaaacggtttttcttccgtttccccgcaagccatgaaacaacatcctggaatatgccgagagggcagattacagagcagtaaacccgaccgaaaatccaggtcaatacaatgagaaacagtaccacgccgaggttgagtgccaataccgccggcaggaactgtactttcgccaaccacccgaaccatgcatgcaacgtccccgtgaaatcgagaaacagcagggttacaagcgtaaaacagataagtgcagttgtaagtctgatcgttcgcaacataataaactctttttagatagtctgttattttatgttgcaaacataataaaaggaaatggtttgcaacttacacgaattacggattgatgtaccaatattacggttttgtcaacttctgcaaaaagtctggctgacaaaccttagaacttcaggcaaggccgtccgccaataggtccagctatggccgccgtctcgtactcggaattcatgcctgatccctttctgcttcatgacctggtgcacctgcatgtttccgtccagcaggccgtcgtcatcaccgcaatcaatgtaataacgaattttgggcaagttgttttgattccagtcggaaaggatcttcaagacattgttttgcttccagtgttcgtctcccggcccgaacaggcggttgaataaatccttgtgcgatttgttttttcttgcctccatgactgtgtcgtcgaaaacggcggcactcaacggagcacatgcgcagaacatgttcggatgatgcaagctgtacaggaatgatccgtagccacccatcgacaatccggcaattgcccggctttctttgtcactgcgaatccggtatgttttttccatataggggataagttcttcaaaaaacatgtcttcgtaaggtacttttccgtcatactggttgatataccaagtgtcccatgcgtccggcatgacgattatcatcggcacggcttcctcgtttgcgatggcacggtcggcaatcgttttcatttgtcccatctgtatccagttggtttcattgtccgtgtaaccatgcaagaggtagaggaccgggtaattccttttcgaggtgttgtagtcggaaggcaggtagatggagtaggaaactttcctacctaatttgttactttcaaaagagagcgattcgaaaactgtgctctgcgaatatcctgccatattgagtagaaagcacaggataagatggaggtaaattttgtttttcatatattattaataattagatttgcttgtctggacaaagtagaaataagagaagagagtttgtctgaaaacttattaggtttcgacatactctctttttcttatttggaattaatctgccatcggatagggaaattcggtcaaccctttgtacatgaattgataggtcggaacttcgattcccaattcttgggcagttcgtacgacatagcctgtcaatgtttccacttcggtgcgattgcttttttgaaaatcactgtgcatggaggttgtggagttgttaggcatgatcttctgggcgtcgatggcggagaatacttgaccgtccggcagacggatccctttggcttctgccacgcttttgagttcataacctaatgtgatgaacagatcgatatggttatttaccacttcgccaatcgtttcattgaaataggaggtgatagtggcggcggtcgagatcatgaagaatttcttccagatttccaagtcaatgtcatccggtattgtggtaaggatacgggcgttggccaatatatcctgtaagtctttctgtcgtttcttgtttccttgtttacttccgaagaacatccggtcctttatggtgaacttttccactcttcccggtctgaccaagcgggaaccgatgtaaacgcatcctttccaaacttcattgttcggtaatagcttttgtatgcgttccgctatatccgctccgttcagcaggggaatgataaccgtattagggccgatgatcggagtcagctgaactatattctcctccaagtcgtagcttttggtacagcaaaacaggtaatcgactggtcctatttcagcaggattgtcggttgcgagggttggttttgctttgatcgtcaggaatgtatttttgacttcgatgccgttcttacgtatctcttccagattttcaccccgggaaatgaaatagatgtcaatatcttcagagtctttgtaacgggcagctaatagtcctccgtagtagccgcctacagctcctataccggaaatcgctattttagttttattcat
